(19) United States
(12) Patent Application Publication
(10) Pub. No.: US 2024/0401047 A1
(43) Pub. Date: Dec. 5, 2024

(54) TREM COMPOSITIONS AND METHODS OF USE

(71) Applicant: Flagship Pioneering Innovations VI, LLC, Cambridge, MA (US)

(72) Inventors: Theonie Anastassiadis, Somerville, MA (US); Neil Kubica, Swampscott, MA (US); Qingyi Li, Somerville, MA (US); Nikolai Naryshkin, East Brunswick, NJ (US); Stephen William Eichhorn, Medford, MA (US); William F. Kiesman, Wayland, MA (US); Christopher E. Arcadia, Barrington, RI (US); Hongchuan Yu, Chestnut Hill, MA (US)

(21) Appl. No.: 18/700,523

(22) PCT Filed: Oct. 13, 2022
(86) PCT No.: PCT/US2022/046632

§ 371 Date: Apr. 11, 2024

Related U.S. Application Data
(60) Provisional application No. 63/284,934, filed on Dec. 1, 2021.
(60) Provisional application No. 63/284,946, filed on Dec. 1, 2021.
(60) Provisional application No. 63/255,420, filed on Oct. 13, 2021.
(60) Provisional application No. 63/255,426, filed on Oct. 13, 2021.

(51) Int. Cl. C12N 15/113; A61K 9/51

(52) U.S. Cl. CPC C12N 15/113; A61K 9/5123; C12N 2310/315; C12N 2310/321; C12N 2310/322; C12N 2310/531

(57) ABSTRACT

The invention relates generally to tRNA-based effector molecules having a non-naturally occurring modification and methods relating thereto.

### CROSS-REFERENCE TO RELATED APPLICATIONS

[0001] This application claims priority to U.S. Provisional Application No. 63/255,420, filed on Oct. 13, 2021; U.S. Provisional Application No. 63/255,426, filed on Oct. 13, 2021; U.S. Provisional Application No. 63/284,934, filed on Dec. 1, 2021; and U.S. Provisional Application No. 63/284,946, filed on Dec. 1, 2021; the entire contents of each of the foregoing applications is hereby incorporated by reference.

### BACKGROUND

[0002] Transfer RNAs (tRNAs) are complex, naturally occurring RNA molecules that possess a number of functions including initiation and elongation of proteins.

### SUMMARY

[0003] The present disclosure features modified tRNA-based effector molecules (TREMs, e.g., a TREM or TREM fragment), as well as related compositions and uses thereof. As provided herein, TREMs are complex molecules which can mediate a variety of cellular processes. The TREMs disclosed herein comprise at least one modification (e.g., a non-naturally occurring modification), e.g., on a component nucleotide (e.g., a nucleobase or sugar) or within an internucleotide region, e.g., the TREM backbone. In one aspect, provided herein is a TREM comprising a sequence of Formula A: [L1]-[ASt Domain1]-[L2]-[DH Domain]-[L3]-[ACH Domain]-[VL Domain]-[TH Domain]-[L4]-[ASt Domain2], wherein independently, [L1] and [VL Domain], are optional; and one of [L1], [ASt Domain1], [L2]-[DH Domain], [L3], [ACH Domain], [VL Domain], [TH Domain], [L4], and [ASt Domain2] comprises a nucleotide comprising a non-naturally occurring modification.

[0004] In an embodiment, the TREM: (a) has the ability to: (i) support protein synthesis, (ii) be charged by a synthetase, (iii) be bound by an elongation factor, (iv) introduce an amino acid into a peptide chain, (v) support elongation, or (vi) support initiation; (b) comprises at least X contiguous nucleotides without a non-naturally occurring modification, wherein X is greater than 3, 4, 5, 6, 7, 8, 9, or 10; (c) comprises at least 3, but less than all of the nucleotides of a type (e.g., A. T. C. G or U) comprise the same non-naturally occurring modification; (d) comprises at least X nucleotides of a type (e.g., A. T. C. G or U) that do not comprise a non-naturally occurring modification, wherein X=than 1, 2, 3, 4, 5, 6, 7, 8, 9, 10, 12, 14, 16, 18, 20, 22, 24, 26, 28, 30, 32, 34, 36, 38, 40, 42, 44, 46, 48, 50, 52, 54, 56, 58, 60, 62, 64, 66, 68, 70, 72, 74, 76, 78, or 80; (e) comprises no more than 1, 2, 3, 4, 5, 6, 7, 8, 9, 10, 12, 14, 16, 18, 20, 22, 24, 26, 28, 30, 32, 34, 36, 38, 40, 42, 44, 46, 48, 50, 52, 54, 56, 58, 60, 62, 64, 66, 68, 70, 72, 74, 76, 78, or 80 nucleotides of a type (e.g., A. T. C. G or U) that comprise a non-naturally occurring modification; and/or (f) comprises no more than 1, 2, 3, 4, 5, 6, 7, 8, 9, 10, 12, 14, 16, 18, 20, 22, 24, 26, 28, 30, 32, 34, 36, 38, 40, 42, 44, 46, 48, 50, 52, 54, 56, 58, 60, 62, 64, 66, 68, 70, 72, 74, 76, 78, or 80 nucleotides of a type (e.g., A. T. C. G or U) that do not comprise a non-naturally occurring modification.

[0005] In an embodiment, the TREM comprises feature (a) (i). In an embodiment, the TREM comprises feature (a) (ii). In an embodiment, the TREM comprises feature (a) (iii). In an embodiment, the TREM comprises feature (a) (iv). In an embodiment, the TREM comprises feature (a) (v). In an embodiment, the TREM comprises feature (a) (vi). In an embodiment, the TREM comprises feature (b). In an embodiment, the TREM comprises feature (c). In an embodiment, the TREM comprises feature (d). In an embodiment, the TREM comprises feature (e). In an embodiment, the TREM comprises feature (f). In an embodiment, the TREM comprises all of features (a)-(f) or a combination thereof.

[0006] In an embodiment, the TREM Domain comprising the non-naturally occurring modification has a function, e.g., a domain function described herein.

[0007] In an aspect, provided herein is a TREM core fragment comprising a sequence of Formula B:
[0008] [L1]_{y}-[ASt Domain1]ₓ-[L2]_{y}-[DH Domain]_{y}-[L3]_{y}-[ACH Domain]ₓ-[VL Domain]_{y}-[TH Domain]_{y}-[L4]_{y}-[ASt Domain2]ₓ,
[0009] wherein x=1 and y=0 or 1; and one of [ASt Domain1], [ACH Domain], and [ASt Domain2] comprises a nucleotide having a non-naturally occurring modification.

[0010] In an embodiment, the TREM has the ability to support protein synthesis. In an embodiment, the TREM has the ability to be able to be charged by a synthetase. In an embodiment, the TREM has the ability to be bound by an elongation factor. In an embodiment, the TREM has the ability to introduce an amino acid into a peptide chain. In an embodiment, the TREM has the ability to support elongation. In an embodiment, the TREM has the ability to support initiation.

[0011] In an embodiment, the [ASt Domain 1] and/or [ASt Domain 2] comprising the non-naturally occurring modification has the ability to initiate or elongate a polypeptide chain.

[0012] In an embodiment, the [ACH Domain] comprising the non-naturally occurring modification has the ability to mediate pairing with a codon.

[0013] In an embodiment, y=1 for any one, two, three, four, five, six, all or a combination of [L1], [L2], [DH Domain], [L3], [VL Domain], [TH Domain], [L4].

[0014] In an embodiment, y=0 for any one, two, three, four, five, six, all or a combination of [L1], [L2], [DH Domain], [L3], [VL Domain], [TH Domain], [L4].

[0015] In an embodiment, y=1 for linker [L1], and L1 comprises a nucleotide having a non-naturally occurring modification.

[0016] In an embodiment, y=1 for linker [L2], and L2 comprises a nucleotide having a non-naturally occurring modification.

[0017] In an embodiment, y=1 for [DH Domain (DHD)], and DHD comprises a nucleotide having a non-naturally occurring modification. In an embodiment, the DHD comprising the non-naturally occurring modification has the ability to mediate recognition of aminoacyl-tRNA synthetase.

[0018] In an embodiment, y=1 for linker [L3], and L3 comprises a nucleotide having a non-naturally occurring modification.

[0019] In an embodiment, y=1 for [VL Domain (VLD)], and VLD comprises a nucleotide having a non-naturally occurring modification.

[0020] In an embodiment, y=1 for [TH Domain (THD)], and THD comprises a nucleotide having a non-naturally occurring modification. In an embodiment, the THD comprising the non-naturally occurring modification has the ability to mediate recognition of the ribosome.

[0021] In an embodiment, y=1 for linker [L4], and L4 comprises a nucleotide having a non-naturally occurring modification.

[0022] In another aspect, the disclosure provides a TREM fragment comprising a portion of a TREM, wherein the TREM comprises a sequence of Formula A:
[0023] [L1]-[ASt Domain1]-[L2]-[DH Domain]-[L3]-[ACH Domain]-[VL Domain]-[TH Domain]-[L4]-[ASt Domain2], and wherein the TREM fragment comprises a non-naturally occurring modification.

[0024] In an embodiment, the TREM fragment comprises one, two, three or all or any combination of the following: (a) a TREM half (e.g., from a cleavage in the ACH Domain, e.g., in the anticodon sequence, e.g., a 5′half or a 3′ half); (b) a 5′ fragment (e.g., a fragment comprising the 5′ end, e.g., from a cleavage in a DH Domain or the ACH Domain); (c) a 3′ fragment (e.g., a fragment comprising the 3′ end, e.g., from a cleavage in the TH Domain); or (d) an internal fragment (e.g., from a cleavage in any one of the ACH Domain, DH Domain or TH Domain).

[0025] In an embodiment, the TREM fragment comprise (a) a TREM half which comprises a nucleotide having a non-naturally occurring modification.

[0026] In an embodiment, the TREM fragment comprise (b) a 5′ fragment which comprises a nucleotide having a non-naturally occurring modification.

[0027] In an embodiment, the TREM fragment comprise (c) a 3′ fragment which comprises a nucleotide having a non-naturally occurring modification.

[0028] In an embodiment, the TREM fragment comprise (d) an internal fragment which comprises a nucleotide having a non-naturally occurring modification.

[0029] In an embodiment of any of the TREMs, TREM core fragments, or TREM fragments disclosed herein, the TREM Domain comprises a plurality of nucleotides each having a non-naturally occurring modification. In an embodiment, the non-naturally occurring modification comprises a nucleobase modification, a sugar (e.g., ribose) modification, or a backbone modification. In an embodiment, tbe non-naturally occurring modification is a sugar (e.g., ribose) modification. In an embodiment, tbe non-naturally occurring modification is 2′-ribose modification, e.g., a 2′-OMe, 2′-halo (e.g., 2′-F), 2′-MOE, or 2′-deoxy modification. In an embodiment, tbe non-naturally occurring modification is a backbone modification, e.g., a phosphorothioate modification.

[0030] In an embodiment of any of the TREMs, TREM core fragments, or TREM fragments disclosed herein, the TREM sequence comprises a CCA sequence on a terminus, e.g., the 3′ terminus. In an embodiment, the TREM sequence does not comprise a CCA sequence on a terminus, e.g., the 3′ terminus.

[0031] In an embodiment of any of the TREMs, TREM core fragments, or TREM fragments disclosed herein, the non-naturally occurring modification is a modification in a base or a backbone of a nucleotide, e.g., a modification chosen from any one of Tables 5, 6, 7, 8 or 9.

[0032] In an embodiment of any of the TREMs, TREM core fragments, or TREM fragments disclosed herein, the non-naturally occurring modification is a base modification chosen from a modification listed in Table 5.

[0033] In an embodiment of any of the TREMs, TREM core fragments, or TREM fragments disclosed herein, the non-naturally occurring modification is a base modification chosen from a modification listed in Table 6.

[0034] In an embodiment of any of the TREMs, TREM core fragments, or TREM fragments disclosed herein, the non-naturally occurring modification is a base modification chosen from a modification listed in Table 7.

[0035] In an embodiment of any of the TREMs, TREM core fragments, or TREM fragments disclosed herein, the non-naturally occurring modification is a backbone modification chosen from a modification listed in Table 8.

[0036] In an embodiment of any of the TREMs, TREM core fragments, or TREM fragments disclosed herein, the non-naturally occurring modification is a backbone modification chosen from a modification listed in Table 9.

[0037] In an embodiment of any of the TREMs, TREM core fragments, or TREM fragments disclosed herein, the TREM, TREM core fragment, or TREM fragment is encoded by a sequence provided in Table 1, e.g., any one of SEQ ID NOs 1-451.

[0038] In an embodiment of any of the TREMs, TREM core fragments, or TREM fragments disclosed herein, the TREM, TREM core fragment, or TREM fragment is encoded by a consensus sequence chosen from any one of SEQ ID NOs: 562-621.

[0039] In an embodiment of any of the TREMs, TREM core fragments, or TREM fragments disclosed herein, the TREM, TREM core fragment, or TREM fragment is encoded by a sequence provided in FIG. 2, e.g., any one of SEQ ID NOs: 622-9757. In an embodiment, the TREM, TREM core fragment, or TREM fragment comprises a TREM having at least 70%, 75%, 80%, 85%, 90%, 95%, or 99% sequence identity with a TREM provided in FIG. 2, e.g., any one of SEQ ID NOs: 622-9757. In an embodiment, the TREM, TREM core fragment, or TREM fragment comprises a sequence that differs by no more than 1, 2, 3, 4, 5, 6, 7, 8, 9, or 10 nucleotides from a TREM provided in FIG. 2, e.g., any one of SEQ ID NOs: 622-3284. In an embodiment, the TREM, TREM core fragment, or TREM fragment comprises 1, 2, 3, 4, 5, 6, 7, 8, 9, or 10 additional non-naturally occurring modifications compared with a TREM, TREM core fragment, or TREM fragment provided in FIG. 2 (e.g., 2′-ribose modifications or an internucleotide modification, e.g., 2′OMe, 2′-halo, 2′-MOE, 2′-deoxy, or phosphorothiorate modifications), e.g., any one of SEQ ID NOs: 622-9757.

[0040] In an embodiment of any of the TREMs, TREM core fragments, or TREM fragments disclosed herein, the TREM, TREM core fragment, or TREM fragment is a TREM provided in FIG. 2, e.g., any one of TREM NOs: 1-9757. In an embodiment, the TREM, TREM core fragment, or TREM fragment comprises 1, 2, 3, 4, 5, 6, 7, 8, 9, or 10 additional non-naturally occurring modifications compared with a TREM provided in FIG. 2 (e.g., 2′-ribose modifications or an internucleotide modification, e.g., 2′OMe, 2′-halo, 2′-MOE, 2′-deoxy, or phosphorothiorate modifications), e.g., any one of TREM NOs. 1-2663.

[0041] In another aspect, the disclosure provides a pharmaceutical composition comprising a TREM, a TREM core fragment, or a TREM fragment disclosed herein.

[0042] In another aspect, a TREM or a related composition thereof can be used, inter alia, to modulate a production parameter (e.g., an expression parameter and/or a signaling parameter) of an RNA corresponding to, or a polypeptide encoded by, a nucleic acid sequence comprising an endogenous open reading frame (ORF) having a premature termination codon (PTC).

[0043] In another aspect, provided herein is a method of modulating a production parameter of an mRNA corresponding to, or polypeptide encoded by, an endogenous open reading frame (ORF) in a subject, which ORF comprises a premature termination codon (PTC), contacting the subject with a TREM composition comprising a TREM, a TREM core fragment, or a TREM fragment disclosed herein in an amount and/or for a time sufficient to modulate the production parameter of the mRNA or polypeptide, wherein the TREM, TREM core fragment or TREM fragment has an anticodon that pairs with the codon having the first sequence, thereby modulating the production parameter in the subject. In an embodiment, the production parameter comprises a signaling parameter and/or an expression parameter, e.g., as described herein.

[0044] In another aspect, disclosed herein is a method of modulating expression of a protein in a cell, wherein the protein is encoded by a nucleic acid comprising an endogenous open reading frame (ORF), which ORF comprises a premature termination codon (PTC), comprising contacting the cell with a TREM composition comprising a TREM, a TREM core fragment, or a TREM fragment disclosed herein in an amount and/or for a time sufficient to modulate expression of the encoded protein, wherein the TREM, TREM core fragment or TREM fragment has an anticodon that pairs with the PTC, thereby modulating expression of the protein in the cell. In an embodiment, the PTC comprises UAA, UGA or UAG.

[0045] In another aspect, provided herein is a method of increasing expression of a protein in a subject wherein the protein is encoded by a nucleic acid comprising an endogenous open reading frame (ORF), which ORF comprises a premature termination codon (PTC), comprising contacting the subject, in an amount and/or for a time sufficient to increase expression of the protein, with a TREM composition that (i) has an anticodon that pairs with the PTC, (ii) recognizes an aminoacyl-tRNA synthetase specific for Trp, Tyr, Cys, Glu, Lys, Gln, Ser, Leu, Arg, or Gly, (iii) comprises a sequence of Formula A, or (iv) comprises a non-naturally occurring modification. In an embodiment, the PTC comprises UAA, UGA or UAG. In an embodiment, the TREM composition comprises (i). In an embodiment, the TREM composition comprises (ii).

[0046] In an embodiment, the TREM composition comprises (iii). In an embodiment, the TREM composition comprises (iv). In an embodiment, the TREM composition comprises two of (i)-(iv). In an embodiment, the TREM composition comprises three of (i)-(iv). In an embodiment, the TREM composition comprises each of (i)-(iv).

[0047] In another aspect, the disclosure provides a method of treating a subject having an endogenous open reading frame (ORF) which comprises a premature termination codon (PTC), comprising providing a TREM composition comprising a TREM, a TREM core fragment, or a TREM fragment disclosed herein, wherein the TREM comprises an anticodon that pairs with the PTC in the ORF; contacting the subject with the composition comprising a TREM, TREM core fragment or TREM fragment in an amount and/or for a time sufficient to treat the subject, thereby treating the subject. In an embodiment, the PTC comprises UAA, UGA or UAG.

[0048] In another aspect, the disclosure provides a method of treating a subject having an disease or disorder associated with a premature termination codon (PTC), comprising providing a TREM composition comprising a TREM, a TREM core fragment, or a TREM fragment disclosed herein; contacting the subject with the composition comprising a TREM, TREM core fragment or TREM fragment in an amount and/or for a time sufficient to treat the subject, thereby treating the subject. In an embodiment, the PTC comprises UAA, UGA or UAG. In an embodiment, the disease or disorder associated with a PTC is a disease or disorder described herein, e.g., a cancer or a monogenic disease.

[0049] In an embodiment of any of the methods disclosed herein, the codon having the first sequence comprises a mutation (e.g., a point mutation, e.g., a nonsense mutation), resulting in a premature termination codon (PTC) chosen from UAA, UGA or UAG. In an embodiment, the codon having the first sequence or the PTC comprises a UAA mutation. In an embodiment, the codon having the first sequence or the PTC comprises a UGA mutation. In an embodiment, the codon having the first sequence or the PTC comprises a UAG mutation

[0050] In another aspect, the disclosure provides a method of making a TREM, a TREM core fragment, or a TREM fragment disclosed herein, comprising linking a first nucleotide to a second nucleotide to form the TREM.

[0051] In an embodiment, the TREM, TREM core fragment or TREM fragment is non-naturally occurring (e.g., synthetic).

[0052] In an embodiment, the TREM, TREM core fragment or TREM fragment is made by cell-free solid phase synthesis.

[0053] In another aspect, the disclosure provides a method of modulating a tRNA pool in a cell comprising: providing a TREM, a TREM core fragment, or a TREM fragment disclosed herein, and contacting the cell with the TREM, TREM core fragment or TREM fragment, thereby modulating the tRNA pool in the cell.

[0054] In an aspect, the disclosure provides a method of contacting a cell, tissue, or subject with a TREM, a TREM core fragment, or a TREM fragment disclosed herein, comprising: contacting the cell, tissue or subject with the TREM, TREM core fragment or TREM fragment, thereby contacting the cell, tissue, or subject with the TREM, TREM core fragment or TREM fragment.

[0055] In another aspect, the disclosure provides a method of delivering a TREM, TREM core fragment or TREM fragment to a cell, tissue, or subject, comprising: providing a cell, tissue, or subject, and contacting the cell, tissue, or subject, a TREM, a TREM core fragment, or a TREM fragment disclosed herein.

[0056] In an aspect, the disclosure provides a method of modulating a tRNA pool in a cell comprising an endogenous open reading frame (ORF), which ORF comprises a codon having a first sequence, comprising:
[0057] optionally, acquiring knowledge of the abundance of one or both of (i) and (ii), e.g., acquiring knowledge of the relative amounts of: (i) and (ii) in the cell, wherein (i) is a tRNA moiety having an anticodon that pairs with the codon of the ORF having a first sequence (the first tRNA moiety) and (ii) is an isoacceptor tRNA moiety having an anticodon that pairs with a codon other than the codon having the first sequence (the second tRNA moiety) in the cell;
[0058] contacting the cell with a TREM, a TREM core fragment, or a TREM fragment disclosed herein, wherein the TREM, TREM core fragment or TREM fragment has an anticodon that pairs with: the codon having the first sequence; or the codon other than the codon having the first sequence, in an amount and/or for a time sufficient to modulate the relative amounts of the first IRNA moiety and the second tRNA moiety in the cell,
[0059] thereby modulating the tRNA pool in the cell.

[0060] In another aspect, the disclosure provides a method of modulating a tRNA pool in a subject having an ORF, which ORF comprises a codon having a first sequence, comprising: optionally, acquiring knowledge of the abundance of one or both of (i) and (ii), e.g., acquiring knowledge of the relative amounts of: (i) and (ii) in the subject, wherein (i) is a tRNA moiety having an anticodon that pairs with the codon of the ORF having a first sequence (the first tRNA moiety) and (ii) is an isoacceptor tRNA moiety having an anticodon that pairs with a codon other than the codon having the first sequence (the second tRNA moiety) in the subject;
[0061] contacting the subject with a TREM, a TREM core fragment, or a TREM fragment disclosed herein, wherein the TREM, TREM core fragment or TREM fragment has an anticodon that pairs with: the codon having the first sequence; or the codon other than the codon having the first sequence, in an amount and/or for a time sufficient to modulate the relative amounts of the first tRNA moiety and the second tRNA moiety in the subject.
[0062] thereby modulating the tRNA pool in the subject.

[0063] In an aspect, the disclosure provides a method of modulating a tRNA pool in a subject having an endogenous ORF comprising a codon comprising a synonymous mutation (a synonymous mutation codon or SMC), comprising:
[0064] providing a composition comprising a TREM, a TREM core fragment, or a TREM fragment disclosed herein, wherein the TREM, TREM core fragment or TREM fragment comprises an isoacceptor tRNA moiety comprising an anticodon sequence that pairs with the SMC (the TREM);
[0065] contacting the subject with the composition in an amount and/or for a time sufficient to modulate the tRNA pool in the subject,
[0066] thereby modulating the tRNA pool in the subject.

[0067] In another aspect, the disclosure provides a method of modulating a tRNA pool in a cell comprising an endogenous ORF comprising a codon comprising a SMC, comprising:
[0068] providing a composition comprising a TREM, a TREM core fragment, or a TREM fragment disclosed herein, wherein the TREM, TREM core fragment or TREM fragment comprises an isoacceptor tRNA moiety comprising an anticodon sequence that pairs with the SMC (the TREM);
[0069] contacting the cell with the composition comprising a TREM in an amount and/or for a time sufficient to modulate the tRNA pool in the cell,
[0070] thereby modulating the tRNA pool in the cell.

[0071] In an aspect, the disclosure provides a method of modulating expression of a protein in a cell, wherein the protein is encoded by a nucleic acid comprising an ORF, which ORF comprises a codon having a mutation, comprising:
[0072] contacting the cell with a composition comprising a TREM, a TREM core fragment, or a TREM fragment disclosed herein in an amount and/or for a time sufficient to modulate expression of the encoded protein,
[0073] wherein the TREM, TREM core fragment or TREM fragment has an anticodon that pairs with the codon having the mutation,
[0074] thereby modulating expression of the protein in the cell.

[0075] In another aspect, the disclosure provides a method of modulating expression of a protein in a subject, wherein the protein is encoded by a nucleic acid comprising an endogenous ORF, which ORF comprises a codon having a mutation, comprising:
[0076] contacting the subject with a composition comprising a TREM, a TREM core fragment, or a TREM fragment disclosed herein, in an amount and/or for a time sufficient to modulate expression of the encoded protein,
[0077] wherein the TREM, TREM core fragment or TREM fragment has an anticodon that pairs with the codon having the mutation,
[0078] thereby modulating expression of the protein in the subject.

[0079] In an embodiment of any of the methods disclosed herein, the mutation in the ORF is a nonsense mutation, e.g., resulting in a premature stop codon chosen from UAA, UGA or UAG. In an embodiment, the stop codon is UAA. In an embodiment, the stop codon is UGA. In an embodiment, the stop codon is UAG.

[0080] In an embodiment of any of the methods disclosed herein, the TREM comprises an anticodon that pairs with a stop codon.

[0081] TREMs of the disclosure include TREMs, TREM core fragments and TREM fragments. TREMs, TREM core fragments or TREM fragments can be modified with non-naturally occurring modifications to, e.g., increase the level and/or activity (e.g., stability) of the TREM. Pharmaceutical TREM compositions, e.g., comprising TREMs having a non-naturally occurring modification, can be administered to cells, tissues or subjects to modulate these functions, e.g., in vitro or in vivo. Disclosed herein are TREMs, TREM core fragments or TREM fragments comprising non-naturally occurring modifications, TREM compositions, preparations, methods of making TREM compositions and preparations, and methods of using the same.

[0082] In an embodiment, the TREM, TREM core fragment, and TREM fragments comprise a non-naturally occurring modification that improves stability or enhances activity of the TREM, TREM core fragment, or TREM fragment.

[0083] Additional features of any of the aforesaid TREMs, TREM core fragments, TREM fragments, TREM compositions, preparations, methods of making TREM compositions and preparations, and methods of using TREM compositions and preparations include one or more of the features in the Enumerated Embodiments, Figures, Description, Examples, or Claims.

[0084] Those skilled in the art will recognize or be able to ascertain using no more than routine experimentation, many equivalents to the specific embodiments of the invention described herein. Such equivalents are intended to be encompassed by the following Enumerated Embodiments, Drawings, Description, Examples, or Claims.

### BRIEF DESCRIPTION OF DRAWINGS

[0085] FIG. 1 is a depiction of a representative TREM with a summary of a design guidances (e.g., Design Guidance 1-6) described herein.

[0086] FIG. 2 is a table summarizing exemplary TREMs, TREM core fragments, and TREM fragments described herein. The sequence of each TREM. TREM core fragment, and TREM fragment is provided, and the chemical modification profile is annotated as follows: : r: ribonucleotide; m: 2′-OMe; *: PS linkage; f: 2′-fluoro; moe: 2′-moe; d: deoxyribonucleotide; 5MeC: 5-methylcytosine. Thus, for example, mA represents 2′-O-methyl adenosine, moe5MeC represents 2′-MOE nucleotide with 5-methylcytosine nucleobase, and dA represents an adenosine deoxyribonucleotide. The table also provides mass spectrometric characterization of each TREM, TREM core fragment, and TREM fragment, along with results from the activity screens described in Examples 6 and 7. The results from the activity screens are in the columns titled “A” (described in Example 6), “B,” “C,” and “D” (all three described in Example 7).

[0087] FIG. 3 is an image showing PTC readthrough activity of exemplary TREMs described herein in four cell lines as outlined in both Examples 6 and 7. Activity is shown as log 2 fold change over a control unmodified TREM.

[0088] FIG. 4 is an image showing Western blot analysis of full-length GLA protein rescue in Fabry patient fibroblasts and normal healthy fibroblasts upon administration of exemplary TREMs described herein, as described in Example 11.

[0089] FIGS. 5A-5E depict the results of time course and dose-response studies in Fabry patient fibroblasts and normal healthy fibroblasts upon administration of exemplary TREMs described herein, as described in Example 11.

[0090] FIG. 6 is a graph illustrating the rescue of GLA activity in Fabry patient fibroblasts upon administration of exemplary TREMs described herein, as outlined in Example 11.

[0091] FIG. 7 is a set of graphs illustrating in vivo PTC readthrough and target engagement of a TREM. FIG. 7A is a graph depicting dose-dependent expression of luciferase in the liver from a plasmid following hydrodynamic delivery. FIG. 7B is a graph illustrating rescue of a luciferase gene with a PTC mutation with a plasmid expressing the corresponding TREM.

### ENUMERATED EMBODIMENTS

[0092] 1. A tRNA effector molecule (TREM) comprising a sequence of Formula (I):
[0093] [L1]-[ASt Domain1]-[L2]-[DH Domain]-[L3]-[ACH Domain]-[VL Domain]-[TH Domain]-[L4]-[ASt Domain2] (I),
[0094] wherein:
[0095] independently, [L1] and [VL Domain], are optional; and
[0096] a nucleotide within any one of (i) [L1]-[ASt Domain1]-[L2], (ii) [DH Domain]-[L3]; (iii) [ACH Domain]; (iv) [VL Domain]; (v) [TH Domain]; and [L4]-[ASt Domain2] comprises a nucleotide having a non-naturally occurring modification.

[0097] 2. The TREM of embodiment 1, wherein the non-naturally occurring modification is present on the 2′-position of a nucleotide sugar or within the internucleotide region (e.g., a backbone modification).

[0098] 3. The TREM of any one of the preceding embodiments, wherein the non-naturally occurring modification is selected from a 2′-O-methyl (2-OMe), 2′-halo (e.g., 2′F or 2′Cl), 2′-O-methoxyethyl (2′MOE), or 2′deoxy modification.

[0099] 4. The TREM of any one of the preceding embodiments, wherein the non-naturally occurring modification is a 2′OMe modification.

[0100] 5. The TREM of any one of the preceding embodiments, wherein the non-naturally occurring modification is a 2′halo (e.g., 2′F or 2′Cl) modification.

[0101] 6. The TREM of any one of the preceding embodiments, wherein the non-naturally occurring modification is a 2′MOE modification.

[0102] 7. The TREM of any one of the preceding embodiments, wherein the non-naturally occurring modification is a 2′-deoxy modification.

[0103] 8. The TREM of any one of the preceding embodiments, wherein the non-naturally occurring modification is present in the internucleotide region (e.g., a backbone modification).

[0104] 9. The TREM of embodiment 8, wherein the non-naturally occurring modification is a phosphorothioate modification.

[0105] 11. The TREM of any one of the preceding embodiments, wherein the TREM has a sequence selected from a sequence provided in FIG. 2.

[0106] 12. The TREM of any one of the preceding embodiments, wherein the TREM is a TREM provided in FIG. 2.

[0107] 13. The TREM of any one of the preceding embodiments, wherein the TREM comprises a TREM having at least 70%, 75%, 80%, 85%, 90%, 95%, or 99% sequence identity with a TREM provided in FIG. 2.

[0108] 14. The TREM of any one of the preceding embodiments, wherein the TREM comprises a sequence that differs by no more than 1, 2, 3, 4, 5, 6, 7, 8, 9, or 10 nucleotides from a TREM provided in FIG. 2.

[0109] 15. The TREM of any one of the preceding embodiments, wherein the TREM comprises 1, 2, 3, 4, 5, 6, 7, 8, 9, or 10 additional non-naturally occurring modifications compared with a TREM provided in FIG. 2 (e.g., 2′-ribose modifications or an internucleotide modification, e.g., 2′OMe, 2′-halo, 2′-MOE, 2′-deoxy, or phosphorothiorate modifications).

[0110] 16. The TREM of any one of the preceding embodiments, wherein the TREM is selected from TREM NOs. 1-500, 501-1000, 1001-1500, 1501-2000, 2001-2500, 2501-3000, 3001-3500, 3501-4000, 4001-4500, 4501-5000, 5001-5500, 5501-6000, 6001-6500, 6501-7000, 7001-7500, 7501-8000, 8001-8500, 8501-9000, and 9001-9136 in FIG. 2.

[0111] 17. The TREM of any one of the preceding embodiments, wherein the TREM has at least 70%, 75%, 80%, 85%, 90%, 95%, or 99% sequence identity to one of TREM NOs. 1-500 in FIG. 2.

[0112] 18. The TREM of any one of the preceding embodiments, wherein the TREM has at least 70%, 75%, 80%, 85%, 90%, 95%, or 99% sequence identity to one of TREM NOs. 501-1000 in FIG. 2.

[0113] 19. The TREM of any one of the preceding embodiments, wherein the TREM has at least 70%, 75%, 80%, 85%, 90%, 95%, or 99% sequence identity to one of TREM NOs. 1001-2000 in FIG. 2.

[0114] 20. The TREM of any one of the preceding embodiments, wherein the TREM has at least 70%, 75%, 80%, 85%, 90%, 95%, or 99% sequence identity to one of TREM NOs. 2001-3000 in FIG. 2.

[0115] 21. The TREM of any one of the preceding embodiments, wherein the TREM has at least 70%, 75%, 80%, 85%, 90%, 95%, or 99% sequence identity to one of TREM NOs. 3001-4000 in FIG. 2.

[0116] 22. The TREM of any one of the preceding embodiments, wherein the TREM has at least 70%, 75%, 80%, 85%, 90%, 95%, or 99% sequence identity to one of TREM NOs. 4001-5000 in FIG. 2.

[0117] 23. The TREM of any one of the preceding embodiments, wherein the TREM has at least 70%, 75%, 80%, 85%, 90%, 95%, or 99% sequence identity to one of TREM NOs. 5001-6000 in FIG. 2.

[0118] 24. The TREM of any one of the preceding embodiments, wherein the TREM has at least 70%, 75%, 80%, 85%, 90%, 95%, or 99% sequence identity to one of TREM NOs. 6001-7000 in FIG. 2.

[0119] 25. The TREM of any one of the preceding embodiments, wherein the TREM has at least 70%, 75%, 80%, 85%, 90%, 95%, or 99% sequence identity to one of TREM NOs. 7001-8000 in FIG. 2.

[0120] 26. The TREM of any one of the preceding embodiments, wherein the TREM has at least 70%, 75%, 80%, 85%, 90%, 95%, or 99% sequence identity to one of TREM NOs. 8001-9000 in FIG. 2.

[0121] 27. The TREM of any one of the preceding embodiments, wherein the TREM has at least 70%, 75%, 80%, 85%, 90%, 95%, or 99% sequence identity to one of TREM NOs. 9001-9136 in FIG. 2.

[0122] 28. The TREM of any one of the preceding embodiments, wherein the TREM is selected from TREM NOs. 1-100, 101-200, 201-300, 301-400, 401-500, 501-600, 601-700, 701-800, 801-900, 901-1000, 1001-1100, 1101-1200, 1201-1300, 1301-1400, 1401-1500, 1501-1600, 1601-1700, 1701-1800, 1801-1900, 1901-2000, 2001-2100, 2101-2200, 2201-2300, 2301-2400, 2401-2500, 2501-2600, and 2601-2663 in FIG. 2.

[0123] 29. The TREM of any one of the preceding embodiments, wherein the TREM is selected from SEQ ID NOs. 1-500, 501-1000, 1001-1500, 1501-2000, 2001-2500, 2501-3000, 3001-3500, 3501-4000, 4001-4500, 4501-5000, 5001-5500, 5501-6000, 6001-6500, 6501-7000, 7001-7500, 7501-8000, 8001-8500, 8501-9000, 9001-9500, and 9501-9757.

[0124] 30. The TREM of any one of the preceding embodiments, wherein the TREM has at least 70%, 75%, 80%, 85%, 90%, 95%, or 99% sequence identity to one of SEQ ID NOs. 1-500.

[0125] 31. The TREM of any one of the preceding embodiments, wherein the TREM has at least 70%, 75%, 80%, 85%, 90%, 95%, or 99% sequence identity to one of SEQ ID NOs. 501-1000.

[0126] 32. The TREM of any one of the preceding embodiments, wherein the TREM has at least 70%, 75%, 80%, 85%, 90%, 95%, or 99% sequence identity to one of SEQ ID NOs. 1001-2000.

[0127] 33. The TREM of any one of the preceding embodiments, wherein the TREM has at least 70%, 75%, 80%, 85%, 90%, 95%, or 99% sequence identity to one of SEQ ID NOs. 2001-3000.

[0128] 34. The TREM of any one of the preceding embodiments, wherein the TREM has at least 70%, 75%, 80%, 85%, 90%, 95%, or 99% sequence identity to one of SEQ ID NOs. 3001-4000.

[0129] 35. The TREM of any one of the preceding embodiments, wherein the TREM has at least 70%, 75%, 80%, 85%, 90%, 95%, or 99% sequence identity to one of SEQ ID NOs. 4001-5000.

[0130] 36. The TREM of any one of the preceding embodiments, wherein the TREM has at least 70%, 75%, 80%, 85%, 90%, 95%, or 99% sequence identity to one of SEQ ID NOs. 5001-6000.

[0131] 37. The TREM of any one of the preceding embodiments, wherein the TREM has at least 70%, 75%, 80%, 85%, 90%, 95%, or 99% sequence identity to one of SEQ ID NOs. 6001-7000.

[0132] 38. The TREM of any one of the preceding embodiments, wherein the TREM has at least 70%, 75%, 80%, 85%, 90%, 95%, or 99% sequence identity to one of SEQ ID NOs. 7001-8000.

[0133] 39. The TREM of any one of the preceding embodiments, wherein the TREM has at least 70%, 75%, 80%, 85%, 90%, 95%, or 99% sequence identity to one of SEQ ID NOs. 8001-9000.

[0134] 40. The TREM of any one of the preceding embodiments, wherein the TREM has at least 70%, 75%, 80%, 85%, 90%, 95%, or 99% sequence identity to one of SEQ ID NOs. 9001-9757.

[0135] 41. The TREM of any one of the preceding embodiments, wherein the TREM is selected from SEQ ID NOs. 1-100, 101-200, 201-300, 301-400, 401-500, 501-600, 601-700, 701-800, 801-900, 901-1000, 1001-1100, 1101-1200, 1201-1300, 1301-1400, 1401-1500, 1501-1600, 1601-1700, 1701-1800, 1801-1900, 1901-2000, 2001-2100, 2101-2200, 2201-2300, 2301-2400, 2401-2500, 2501-2600, 2601-2700, 2701-2800, 2801-2900, 2901-3000, 3001-3100, 3101-3200, and 3201-3284.

[0136] 42. The TREM of any one of the preceding embodiments, wherein the non-naturally occurring modification is present at a nucleotide position which corresponds to one or more of the nucleotides of SEQ ID NO: 622.

[0137] 43. The TREM of any one of the preceding embodiments, wherein:
[0138] (i) the non-naturally occurring modification is present at a nucleotide position which corresponds to one or more of the nucleotides of SEQ ID NO: 622; and/or
[0139] (ii) the TREM differs from the nucleotide sequence of SEQ ID NO: 622 by no more than 1, 2, 3, 4, 5, 6, 7, 8, 9, or 10 nucleotides.

[0140] 44. The TREM of any one of the preceding embodiments, wherein:
[0141] (i) the non-naturally occurring modification is present at a nucleotide position which corresponds to one or more of the nucleotides of SEQ ID NO: 622; and/or
[0142] (ii) the TREM comprises the nucleotide sequence of SEQ ID NO: 622.

[0143] 45. The TREM of any one of the preceding embodiments, wherein the TREM comprises SEQ ID NO: 622 and the non-naturally occurring modification is present at a nucleotide position within in the [ASt Domain1] of SEQ ID NO: 622.

[0144] 46. The TREM of any one of the preceding embodiments, wherein the TREM comprises SEQ ID NO: 622, the non-naturally occurring modification is selected from a 2′-O-methyl (2-OMe), 2′-halo (e.g., 2′F or 2′Cl), 2′-O-methoxyethyl (2′MOE), 2′deoxy, or phosphorothioate modification, and the non-naturally occurring modification is present at a nucleotide position within in the [ASt Domain1].

[0145] 47. The TREM of any one of the preceding embodiments, wherein the TREM comprises SEQ ID NO: 622, the non-naturally occurring modification is a 2′-O-methyl (2-OMe) modification, and the non-naturally occurring modification is present at a nucleotide position within in the [ASt Domain1].

[0146] 48. The TREM of any one of the preceding embodiments, wherein the TREM comprises SEQ ID NO: 622 and does not contain a non-naturally occurring modification within in the [ASt Domain1].

[0147] 49. The TREM of any one of the preceding embodiments, wherein the TREM comprises SEQ ID NO: 622 and the non-naturally occurring modification is present at a nucleotide position within in the [DH Domain] of SEQ ID NO: 622.

[0148] 50. The TREM of any one of the preceding embodiments, wherein the TREM comprises SEQ ID NO: 622, the non-naturally occurring modification is selected from a 2′-O-methyl (2-OMe), 2′-halo (e.g., 2′F or 2′Cl), 2′-O-methoxyethyl (2′MOE), 2′deoxy, or phosphorothioate modification, and the non-naturally occurring modification is present at a nucleotide position within in the [DH Domain].

[0149] 51. The TREM of any one of the preceding embodiments, wherein the TREM comprises SEQ ID NO: 622, the non-naturally occurring modification is a 2′-O-methyl (2-OMe) or 2′-halo (e.g., 2′F or 2′Cl) modification, and the non-naturally occurring modification is present at a nucleotide position within in the [DH Domain].

[0150] 52. The TREM of any one of the preceding embodiments, wherein the TREM comprises SEQ ID NO: 622 and does not contain a non-naturally occurring modification within in the [DH Domain].

[0151] 53. The TREM of any one of the preceding embodiments, wherein the TREM comprises SEQ ID NO: 622 and the non-naturally occurring modification is present at a nucleotide position within in the [ACH Domain] of SEQ ID NO: 622.

[0152] 54. The TREM of any one of the preceding embodiments, wherein the TREM comprises SEQ ID NO: 622, the non-naturally occurring modification is selected from a 2′-O-methyl (2-OMe), 2′-halo (e.g., 2′F or 2′Cl), 2′-O-methoxyethyl (2′MOE2′deoxy, or phosphorothioate modification, and the non-naturally occurring modification is present at a nucleotide position within in the [ACH Domain].

[0153] 55. The TREM of any one of the preceding embodiments, wherein the TREM comprises SEQ ID NO: 622, the non-naturally occurring modification is a 2′-O-methyl (2-OMe) or 2′-halo (e.g., 2′F or 2′Cl) modification, and the non-naturally occurring modification is present at a nucleotide position within in the [ACH Domain].

[0154] 56. The TREM of any one of the preceding embodiments, wherein the TREM comprises SEQ ID NO: 622 and does not contain a non-naturally occurring modification within in the [ACH Domain].

[0155] 57. The TREM of any one of the preceding embodiments, wherein the TREM comprises SEQ ID NO: 622 and the non-naturally occurring modification is present at a nucleotide position within in the [VL Domain] of SEQ ID NO: 622.

[0156] 58. The TREM of any one of the preceding embodiments, wherein the TREM comprises SEQ ID NO: 622, the non-naturally occurring modification is selected from a 2′-O-methyl (2-OMe), 2′-halo (e.g., 2′F or 2′Cl), 2′-O-methoxyethyl (2′MOE2′deoxy, or phosphorothioate modification, and the non-naturally occurring modification is present at a nucleotide position within in the [VL Domain].

[0157] 59. The TREM of any one of the preceding embodiments, wherein the TREM comprises SEQ ID NO: 622, the non-naturally occurring modification is a 2′-O-methyl (2-OMe) or 2′-halo (e.g., 2′F or 2′Cl) modification, and the non-naturally occurring modification is present at a nucleotide position within in the [VL Domain].

[0158] 60. The TREM of any one of the preceding embodiments, wherein the TREM comprises SEQ ID NO: 622 and does not contain a non-naturally occurring modification within in the [VL Domain].

[0159] 61. The TREM of any one of the preceding embodiments, wherein the TREM comprises SEQ ID NO: 622 and the non-naturally occurring modification is present at a nucleotide position within in the [TH Domain] of SEQ ID NO: 622.

[0160] 62. The TREM of any one of the preceding embodiments, wherein the TREM comprises SEQ ID NO: 622, the non-naturally occurring modification is selected from a 2′-O-methyl (2-OMe), 2′-halo (e.g., 2′F or 2′Cl), 2′-O-methoxyethyl (2′MOE2′deoxy, or phosphorothioate modification, and the non-naturally occurring modification is present at a nucleotide position within in the [TH Domain].

[0161] 63. The TREM of any one of the preceding embodiments, wherein the TREM comprises SEQ ID NO: 622, the non-naturally occurring modification is a 2′-O-methyl (2-OMe) or 2′-halo (e.g., 2′F or 2′Cl) modification, and the non-naturally occurring modification is present at a nucleotide position within in the [TH Domain].

[0162] 64. The TREM of any one of the preceding embodiments, wherein the TREM comprises SEQ ID NO: 622 and does not contain a non-naturally occurring modification within in the [TH Domain].

[0163] 65. The TREM of any one of the preceding embodiments, wherein the TREM comprises SEQ ID NO: 622 and the non-naturally occurring modification is present at a nucleotide position within in the [ASt Domain2] of SEQ ID NO: 622.

[0164] 66. The TREM of any one of the preceding embodiments, wherein the TREM comprises SEQ ID NO: 622, the non-naturally occurring modification is selected from a 2′-O-methyl (2-OMe), 2′-halo (e.g., 2′F or 2′Cl), 2′-O-methoxyethyl (2′MOE2′deoxy, or phosphorothioate modification, and the non-naturally occurring modification is present at a nucleotide position within in the [ASt Domain2].

[0165] 67. The TREM of any one of the preceding embodiments, wherein the TREM comprises SEQ ID NO: 622, the non-naturally occurring modification is a 2′-O-methyl (2-OMe) or 2′-halo (e.g., 2′F or 2′Cl) modification, and the non-naturally occurring modification is present at a nucleotide position within in the [ASt Domain2].

[0166] 68. The TREM of any one of the preceding embodiments, wherein the TREM comprises SEQ ID NO: 622 and does not contain a non-naturally occurring modification within in the [ASt Domain2].

[0167] 69. The TREM of any one of the preceding embodiments, wherein the non-naturally occurring modification is present at a nucleotide position which corresponds to one or more of the nucleotides of SEQ ID NO: 623.

[0168] 70. The TREM of any one of the preceding embodiments, wherein:
[0169] (i) the non-naturally occurring modification is present at a nucleotide position which corresponds to one or more of the nucleotides of SEQ ID NO: 623; and/or
[0170] (ii) the TREM differs from the nucleotide sequence of SEQ ID NO: 623 by no more than 1, 2, 3, 4, 5, 6, 7, 8, 9, or 10 nucleotides.

[0171] 71. The TREM of any one of the preceding embodiments, wherein:
[0172] (i) the non-naturally occurring modification is present at a nucleotide position which corresponds to one or more of the nucleotides of SEQ ID NO: 623; and/or
[0173] (ii) the TREM comprises the nucleotide sequence of SEQ ID NO: 623.

[0174] 72. The TREM of any one of the preceding embodiments, wherein the TREM comprises SEQ ID NO: 623 and the non-naturally occurring modification is present at a nucleotide position within in the [ASt Domain1] of SEQ ID NO: 623.

[0175] 73. The TREM of any one of the preceding embodiments, wherein the TREM comprises SEQ ID NO: 623, the non-naturally occurring modification is selected from a 2′-O-methyl (2-OMe), 2′-halo (e.g., 2′F or 2′Cl), 2′-O-methoxyethyl (2′MOE), 2′deoxy, or phosphorothioate modification, and the non-naturally occurring modification is present at a nucleotide position within in the [ASt Domain1].

[0176] 74. The TREM of any one of the preceding embodiments, wherein the TREM comprises SEQ ID NO: 623, the non-naturally occurring modification is a 2′-O-methyl (2-OMe) modification, and the non-naturally occurring modification is present at a nucleotide position within in the [ASt Domain1].

[0177] 75. The TREM of any one of the preceding embodiments, wherein the TREM comprises SEQ ID NO: 623 and does not contain a non-naturally occurring modification within in the [ASt Domain1].

[0178] 76. The TREM of any one of the preceding embodiments, wherein the TREM comprises SEQ ID NO: 623 and the non-naturally occurring modification is present at a nucleotide position within in the [DH Domain] of SEQ ID NO: 623.

[0179] 77. The TREM of any one of the preceding embodiments, wherein the TREM comprises SEQ ID NO: 623, the non-naturally occurring modification is selected from a 2′-O-methyl (2-OMe), 2′-halo (e.g., 2′F or 2′Cl), 2′-O-methoxyethyl (2′MOE), 2′deoxy, or phosphorothioate modification, and the non-naturally occurring modification is present at a nucleotide position within in the [DH Domain].

[0180] 78. The TREM of any one of the preceding embodiments, wherein the TREM comprises SEQ ID NO: 623, the non-naturally occurring modification is a 2′-O-methyl (2-OMe) or 2′-halo (e.g., 2′F or 2′Cl) modification, and the non-naturally occurring modification is present at a nucleotide position within in the [DH Domain].

[0181] 79. The TREM of any one of the preceding embodiments, wherein the TREM comprises SEQ ID NO: 623 and does not contain a non-naturally occurring modification within in the [DH Domain].

[0182] 80. The TREM of any one of the preceding embodiments, wherein the TREM comprises SEQ ID NO: 623 and the non-naturally occurring modification is present at a nucleotide position within in the [ACH Domain] of SEQ ID NO: 623.

[0183] 81. The TREM of any one of the preceding embodiments, wherein the TREM comprises SEQ ID NO: 623, the non-naturally occurring modification is selected from a 2′-O-methyl (2-OMe), 2′-halo (e.g., 2′F or 2′Cl), 2′-O-methoxyethyl (2′MOE2′deoxy, or phosphorothioate modification, and the non-naturally occurring modification is present at a nucleotide position within in the [ACH Domain].

[0184] 82. The TREM of any one of the preceding embodiments, wherein the TREM comprises SEQ ID NO: 623, the non-naturally occurring modification is a 2′-O-methyl (2-OMe) or 2′-halo (e.g., 2′F or 2′Cl) modification, and the non-naturally occurring modification is present at a nucleotide position within in the [ACH Domain].

[0185] 83. The TREM of any one of the preceding embodiments, wherein the TREM comprises SEQ ID NO: 623 and does not contain a non-naturally occurring modification within in the [ACH Domain].

[0186] 84. The TREM of any one of the preceding embodiments, wherein the TREM comprises SEQ ID NO: 623 and the non-naturally occurring modification is present at a nucleotide position within in the [VL Domain] of SEQ ID NO: 623.

[0187] 85. The TREM of any one of the preceding embodiments, wherein the TREM comprises SEQ ID NO: 623, the non-naturally occurring modification is selected from a 2′-O-methyl (2-OMe), 2′-halo (e.g., 2′F or 2′Cl), 2′-O-methoxyethyl (2′MOE2′deoxy, or phosphorothioate modification, and the non-naturally occurring modification is present at a nucleotide position within in the [VL Domain].

[0188] 86. The TREM of any one of the preceding embodiments, wherein the TREM comprises SEQ ID NO: 623, the non-naturally occurring modification is a 2′-O-methyl (2-OMe) or 2′-halo (e.g., 2′F or 2′Cl) modification, and the non-naturally occurring modification is present at a nucleotide position within in the [VL Domain].

[0189] 87. The TREM of any one of the preceding embodiments, wherein the TREM comprises SEQ ID NO: 623 and does not contain a non-naturally occurring modification within in the [VL Domain].

[0190] 88. The TREM of any one of the preceding embodiments, wherein the TREM comprises SEQ ID NO: 623 and the non-naturally occurring modification is present at a nucleotide position within in the [TH Domain] of SEQ ID NO: 623.

[0191] 89. The TREM of any one of the preceding embodiments, wherein the TREM comprises SEQ ID NO: 623, the non-naturally occurring modification is selected from a 2′-O-methyl (2-OMe), 2′-halo (e.g., 2′F or 2′Cl), 2′-O-methoxyethyl (2′MOE2′deoxy, or phosphorothioate modification, and the non-naturally occurring modification is present at a nucleotide position within in the [TH Domain].

[0192] 90. The TREM of any one of the preceding embodiments, wherein the TREM comprises SEQ ID NO: 623, the non-naturally occurring modification is a 2′-O-methyl (2-OMe) or 2′-halo (e.g., 2′F or 2′Cl) modification, and the non-naturally occurring modification is present at a nucleotide position within in the [TH Domain].

[0193] 91. The TREM of any one of the preceding embodiments, wherein the TREM comprises SEQ ID NO: 623 and does not contain a non-naturally occurring modification within in the [TH Domain].

[0194] 92. The TREM of any one of the preceding embodiments, wherein the TREM comprises SEQ ID NO: 623 and the non-naturally occurring modification is present at a nucleotide position within in the [ASt Domain2] of SEQ ID NO: 623.

[0195] 93. The TREM of any one of the preceding embodiments, wherein the TREM comprises SEQ ID NO: 623, the non-naturally occurring modification is selected from a 2′-O-methyl (2-modification, and the non-naturally occurring modification is present at a nucleotide position within in the [ASt Domain2].

[0196] 94. The TREM of any one of the preceding embodiments, wherein the TREM comprises SEQ ID NO: 623, the non-naturally occurring modification is a 2′-O-methyl (2-OMe) or 2′-halo (e.g., 2′F or 2′Cl) modification, and the non-naturally occurring modification is present at a nucleotide position within in the [ASt Domain2].

[0197] 95. The TREM of any one of the preceding embodiments, wherein the TREM comprises SEQ ID NO: 623 and does not contain a non-naturally occurring modification within in the [ASt Domain2].

[0198] 96. The TREM of any one of the preceding embodiments, wherein the non-naturally occurring modification is present at a nucleotide position which corresponds to one or more of the nucleotides of SEQ ID NO: 624.

[0199] 97. The TREM of any one of the preceding embodiments, wherein:
[0200] (i) the non-naturally occurring modification is present at a nucleotide position which corresponds to one or more of the nucleotides of SEQ ID NO: 624; and/or
[0201] (ii) the TREM differs from the nucleotide sequence of SEQ ID NO: 624 by no more than 1, 2, 3, 4, 5, 6, 7, 8, 9, or 10 nucleotides.

[0202] 98. The TREM of any one of the preceding embodiments, wherein:
[0203] (i) the non-naturally occurring modification is present at a nucleotide position which corresponds to one or more of the nucleotides of SEQ ID NO: 624; and/or
[0204] (ii) the TREM comprises the nucleotide sequence of SEQ ID NO: 624.

[0205] 99. The TREM of any one of the preceding embodiments, wherein the TREM comprises SEQ ID NO: 624 and the non-naturally occurring modification is present at a nucleotide position within in the [ASt Domain1] of SEQ ID NO: 624.

[0206] 100. The TREM of any one of the preceding embodiments, wherein the TREM comprises SEQ ID NO: 624, the non-naturally occurring modification is selected from a 2′-O-methyl (2-OMe), 2′-halo (e.g., 2′F or 2′Cl), 2′-O-methoxyethyl (2′MOE), 2′deoxy, or phosphorothioate modification, and the non-naturally occurring modification is present at a nucleotide position within in the [ASt Domain1].

[0207] 101. The TREM of any one of the preceding embodiments, wherein the TREM comprises SEQ ID NO: 624, the non-naturally occurring modification is a 2′-O-methyl (2-OMe) modification, and the non-naturally occurring modification is present at a nucleotide position within in the [ASt Domain1].

[0208] 102. The TREM of any one of the preceding embodiments, wherein the TREM comprises SEQ ID NO: 624 and does not contain a non-naturally occurring modification within in the [ASt Domain1].

[0209] 103. The TREM of any one of the preceding embodiments, wherein the TREM comprises SEQ ID NO: 624 and the non-naturally occurring modification is present at a nucleotide position within in the [DH Domain] of SEQ ID NO: 624.

[0210] 104. The TREM of any one of the preceding embodiments, wherein the TREM comprises SEQ ID NO: 624, the non-naturally occurring modification is selected from a 2′-O-methyl (2-OMe), 2′-halo (e.g., 2′F or 2′Cl), 2′-O-methoxyethyl (2′MOE), 2′deoxy, or phosphorothioate modification, and the non-naturally occurring modification is present at a nucleotide position within in the [DH Domain].

[0211] 105. The TREM of any one of the preceding embodiments, wherein the TREM comprises SEQ ID NO: 624, the non-naturally occurring modification is a 2′-O-methyl (2-OMe) or 2′-halo (e.g., 2′F or 2′Cl) modification, and the non-naturally occurring modification is present at a nucleotide position within in the [DH Domain].

[0212] 106. The TREM of any one of the preceding embodiments, wherein the TREM comprises SEQ ID NO: 624 and does not contain a non-naturally occurring modification within in the [DH Domain].

[0213] 107. The TREM of any one of the preceding embodiments, wherein the TREM comprises SEQ ID NO: 624 and the non-naturally occurring modification is present at a nucleotide position within in the [ACH Domain] of SEQ ID NO: 624.

[0214] 108. The TREM of any one of the preceding embodiments, wherein the TREM comprises SEQ ID NO: 624, the non-naturally occurring modification is selected from a 2′-O-methyl (2-OMe), 2′-halo (e.g., 2′F or 2′Cl), 2′-O-methoxyethyl (2′MOE2′deoxy, or phosphorothioate modification, and the non-naturally occurring modification is present at a nucleotide position within in the [ACH Domain].

[0215] 109. The TREM of any one of the preceding embodiments, wherein the TREM comprises SEQ ID NO: 624, the non-naturally occurring modification is a 2′-O-methyl (2-OMe) or 2′-halo (e.g., 2′F or 2′Cl) modification, and the non-naturally occurring modification is present at a nucleotide position within in the [ACH Domain].

[0216] 110. The TREM of any one of the preceding embodiments, wherein the TREM comprises SEQ ID NO: 624 and does not contain a non-naturally occurring modification within in the [ACH Domain].

[0217] 111. The TREM of any one of the preceding embodiments, wherein the TREM comprises SEQ ID NO: 624 and the non-naturally occurring modification is present at a nucleotide position within in the [VL Domain] of SEQ ID NO: 624.

[0218] 112. The TREM of any one of the preceding embodiments, wherein the TREM comprises SEQ ID NO: 624, the non-naturally occurring modification is selected from a 2′-O-methyl (2-modification, and the non-naturally occurring modification is present at a nucleotide position within in the [VL Domain].

[0219] 113. The TREM of any one of the preceding embodiments, wherein the TREM comprises SEQ ID NO: 624, the non-naturally occurring modification is a 2′-O-methyl (2-OMe) or 2′-halo (e.g., 2′F or 2′Cl) modification, and the non-naturally occurring modification is present at a nucleotide position within in the [VL Domain].

[0220] 114. The TREM of any one of the preceding embodiments, wherein the TREM comprises SEQ ID NO: 624 and does not contain a non-naturally occurring modification within in the [VL Domain].

[0221] 115. The TREM of any one of the preceding embodiments, wherein the TREM comprises SEQ ID NO: 624 and the non-naturally occurring modification is present at a nucleotide position within in the [TH Domain] of SEQ ID NO: 624.

[0222] 116. The TREM of any one of the preceding embodiments, wherein the TREM comprises SEQ ID NO: 624, the non-naturally occurring modification is selected from a 2′-O-methyl (2-OMe), 2′-halo (e.g., 2′F or 2′Cl), 2′-O-methoxyethyl (2′MOE2′deoxy, or phosphorothioate modification, and the non-naturally occurring modification is present at a nucleotide position within in the [TH Domain].

[0223] 117. The TREM of any one of the preceding embodiments, wherein the TREM comprises SEQ ID NO: 624, the non-naturally occurring modification is a 2′-O-methyl (2-OMe) or 2′-halo (e.g., 2′F or 2′Cl) modification, and the non-naturally occurring modification is present at a nucleotide position within in the [TH Domain].

[0224] 118. The TREM of any one of the preceding embodiments, wherein the TREM comprises SEQ ID NO: 624 and does not contain a non-naturally occurring modification within in the [TH Domain].

[0225] 119. The TREM of any one of the preceding embodiments, wherein the TREM comprises SEQ ID NO: 624 and the non-naturally occurring modification is present at a nucleotide position within in the [ASt Domain2] of SEQ ID NO: 624.

[0226] 120. The TREM of any one of the preceding embodiments, wherein the TREM comprises SEQ ID NO: 624, the non-naturally occurring modification is selected from a 2′-O-methyl (2-OMe), 2′-halo (e.g., 2′F or 2′Cl), 2′-O-methoxyethyl (2′MOE2′deoxy, or phosphorothioate modification, and the non-naturally occurring modification is present at a nucleotide position within in the [ASt Domain2].

[0227] 121. The TREM of any one of the preceding embodiments, wherein the TREM comprises SEQ ID NO: 624, the non-naturally occurring modification is a 2′-O-methyl (2-OMe) or 2′-halo (e.g., 2′F or 2′Cl) modification, and the non-naturally occurring modification is present at a nucleotide position within in the [ASt Domain2].

[0228] 122. The TREM of any one of the preceding embodiments, wherein the TREM comprises SEQ ID NO: 624 and does not contain a non-naturally occurring modification within in the [ASt Domain2].

[0229] 123. The TREM of any one of the preceding embodiments, wherein the non-naturally occurring modification is present at a nucleotide position which corresponds to one or more of the nucleotides of SEQ ID NO: 6967.

[0230] 124. The TREM of any one of the preceding embodiments, wherein:
[0231] (i) the non-naturally occurring modification is present at a nucleotide position which corresponds to one or more of the nucleotides of SEQ ID NO: 6967; and/or
[0232] (ii) the TREM differs from the nucleotide sequence of SEQ ID NO: 6967 by no more than 1, 2, 3, 4, 5, 6, 7, 8, 9, or 10 nucleotides.

[0233] 125. The TREM of any one of the preceding embodiments, wherein:
[0234] (i) the non-naturally occurring modification is present at a nucleotide position which corresponds to one or more of the nucleotides of SEQ ID NO: 6967; and/or
[0235] (ii) the TREM comprises the nucleotide sequence of SEQ ID NO: 6967.

[0236] 126. The TREM of any one of the preceding embodiments, wherein the TREM comprises SEQ ID NO: 6967 and the non-naturally occurring modification is present at a nucleotide position within in the [ASt Domain1] of SEQ ID NO: 6967.

[0237] 127. The TREM of any one of the preceding embodiments, wherein the TREM comprises SEQ ID NO: 6967, the non-naturally occurring modification is selected from a 2′-O-methyl (2-OMe), 2′-halo (e.g., 2′F or 2′Cl), 2′-O-methoxyethyl (2′MOE), 2′deoxy, or phosphorothioate modification, and the non-naturally occurring modification is present at a nucleotide position within in the [ASt Domain1].

[0238] 128. The TREM of any one of the preceding embodiments, wherein the TREM comprises SEQ ID NO: 6967, the non-naturally occurring modification is a 2′-O-methyl (2-OMe) modification, and the non-naturally occurring modification is present at a nucleotide position within in the [ASt Domain1].

[0239] 129. The TREM of any one of the preceding embodiments, wherein the TREM comprises SEQ ID NO: 6967 and does not contain a non-naturally occurring modification within in the [ASt Domain1].

[0240] 130. The TREM of any one of the preceding embodiments, wherein the TREM comprises SEQ ID NO: 6967 and the non-naturally occurring modification is present at a nucleotide position within in the [DH Domain] of SEQ ID NO: 6967.

[0241] 131. The TREM of any one of the preceding embodiments, wherein the TREM comprises SEQ ID NO: 6967, the non-naturally occurring modification is selected from a 2′-O-methyl (2-OMe), 2′-halo (e.g., 2′F or 2′Cl), 2′-O-methoxyethyl (2′MOE), 2′deoxy, or phosphorothioate modification, and the non-naturally occurring modification is present at a nucleotide position within in the [DH Domain].

[0242] 132. The TREM of any one of the preceding embodiments, wherein the TREM comprises SEQ ID NO: 6967, the non-naturally occurring modification is a 2′-O-methyl (2-OMe) or 2′-halo (e.g., 2′F or 2′Cl) modification, and the non-naturally occurring modification is present at a nucleotide position within in the [DH Domain].

[0243] 133. The TREM of any one of the preceding embodiments, wherein the TREM comprises SEQ ID NO: 6967 and does not contain a non-naturally occurring modification within in the [DH Domain].

[0244] 134. The TREM of any one of the preceding embodiments, wherein the TREM comprises SEQ ID NO: 6967 and the non-naturally occurring modification is present at a nucleotide position within in the [ACH Domain] of SEQ ID NO: 6967.

[0245] 135. The TREM of any one of the preceding embodiments, wherein the TREM comprises SEQ ID NO: 6967, the non-naturally occurring modification is selected from a 2′-O-methyl (2-OMe), 2′-halo (e.g., 2′F or 2′Cl), 2′-O-methoxyethyl (2′MOE2′deoxy, or phosphorothioate modification, and the non-naturally occurring modification is present at a nucleotide position within in the [ACH Domain].

[0246] 136. The TREM of any one of the preceding embodiments, wherein the TREM comprises SEQ ID NO: 6967, the non-naturally occurring modification is a 2′-O-methyl (2-OMe) or 2′-halo (e.g., 2′F or 2′Cl) modification, and the non-naturally occurring modification is present at a nucleotide position within in the [ACH Domain].

[0247] 137. The TREM of any one of the preceding embodiments, wherein the TREM comprises SEQ ID NO: 6967 and does not contain a non-naturally occurring modification within in the [ACH Domain].

[0248] 138. The TREM of any one of the preceding embodiments, wherein the TREM comprises SEQ ID NO: 6967 and the non-naturally occurring modification is present at a nucleotide position within in the [VL Domain] of SEQ ID NO: 6967.

[0249] 139. The TREM of any one of the preceding embodiments, wherein the TREM comprises SEQ ID NO: 6967, the non-naturally occurring modification is selected from a 2′-O-methyl (2-OMe), 2′-halo (e.g., 2′F or 2′Cl), 2′-O-methoxyethyl (2′MOE2′deoxy, or phosphorothioate modification, and the non-naturally occurring modification is present at a nucleotide position within in the [VL Domain].

[0250] 140. The TREM of any one of the preceding embodiments, wherein the TREM comprises SEQ ID NO: 6967, the non-naturally occurring modification is a 2′-O-methyl (2-OMe) or 2′-halo (e.g., 2′F or 2′Cl) modification, and the non-naturally occurring modification is present at a nucleotide position within in the [VL Domain].

[0251] 141. The TREM of any one of the preceding embodiments, wherein the TREM comprises SEQ ID NO: 6967 and does not contain a non-naturally occurring modification within in the [VL Domain].

[0252] 142. The TREM of any one of the preceding embodiments, wherein the TREM comprises SEQ ID NO: 6967 and the non-naturally occurring modification is present at a nucleotide position within in the [TH Domain] of SEQ ID NO: 6967.

[0253] 143. The TREM of any one of the preceding embodiments, wherein the TREM comprises SEQ ID NO: 6967, the non-naturally occurring modification is selected from a 2′-O-methyl (2-OMe), 2′-halo (e.g., 2′F or 2′Cl), 2′-O-methoxyethyl (2′MOE2′deoxy, or phosphorothioate modification, and the non-naturally occurring modification is present at a nucleotide position within in the [TH Domain].

[0254] 144. The TREM of any one of the preceding embodiments, wherein the TREM comprises SEQ ID NO: 6967, the non-naturally occurring modification is a 2′-O-methyl (2-OMe) or 2′-halo (e.g., 2′F or 2′Cl) modification, and the non-naturally occurring modification is present at a nucleotide position within in the [TH Domain].

[0255] 145. The TREM of any one of the preceding embodiments, wherein the TREM comprises SEQ ID NO: 6967 and does not contain a non-naturally occurring modification within in the [TH Domain].

[0256] 146. The TREM of any one of the preceding embodiments, wherein the TREM comprises SEQ ID NO: 6967 and the non-naturally occurring modification is present at a nucleotide position within in the [ASt Domain2] of SEQ ID NO: 6967.

[0257] 147. The TREM of any one of the preceding embodiments, wherein the TREM comprises SEQ ID NO: 6967, the non-naturally occurring modification is selected from a 2′-O-methyl (2-OMe), 2′-halo (e.g., 2′F or 2′Cl), 2′-O-methoxyethyl (2′MOE2′deoxy, or phosphorothioate modification, and the non-naturally occurring modification is present at a nucleotide position within in the [ASt Domain2].

[0258] 148. The TREM of any one of the preceding embodiments, wherein the TREM comprises SEQ ID NO: 6967, the non-naturally occurring modification is a 2′-O-methyl (2-OMe) or 2′-halo (e.g., 2′F or 2′Cl) modification, and the non-naturally occurring modification is present at a nucleotide position within in the [ASt Domain2].

[0259] 149. The TREM of any one of the preceding embodiments, wherein the TREM comprises SEQ ID NO: 6967 and does not contain a non-naturally occurring modification within in the [ASt Domain2].

[0260] 150. The TREM of any one of the preceding embodiments, wherein the non-naturally occurring modification is present at a nucleotide position which corresponds to one or more of the nucleotides of SEQ ID NO: 4386.

[0261] 151. The TREM of any one of the preceding embodiments, wherein:
[0262] (i) the non-naturally occurring modification is present at a nucleotide position which corresponds to one or more of the nucleotides of SEQ ID NO: 4386; and/or
[0263] (ii) the TREM differs from the nucleotide sequence of SEQ ID NO: 4386 by no more than 1, 2, 3, 4, 5, 6, 7, 8, 9, or 10 nucleotides.

[0264] 152. The TREM of any one of the preceding embodiments, wherein:
[0265] (i) the non-naturally occurring modification is present at a nucleotide position which corresponds to one or more of the nucleotides of SEQ ID NO: 4386; and/or
[0266] (ii) the TREM comprises the nucleotide sequence of SEQ ID NO: 4386.

[0267] 153. The TREM of any one of the preceding embodiments, wherein the TREM comprises SEQ ID NO: 4386 and the non-naturally occurring modification is present at a nucleotide position within in the [ASt Domain1] of SEQ ID NO: 4386.

[0268] 154. The TREM of any one of the preceding embodiments, wherein the TREM comprises SEQ ID NO: 4386, the non-naturally occurring modification is selected from a 2′-O-methyl (2-OMe), 2′-halo (e.g., 2′F or 2′Cl), 2′-O-methoxyethyl (2′MOE), 2′deoxy, or phosphorothioate modification, and the non-naturally occurring modification is present at a nucleotide position within in the [ASt Domain1].

[0269] 155. The TREM of any one of the preceding embodiments, wherein the TREM comprises SEQ ID NO: 4386, the non-naturally occurring modification is a 2′-O-methyl (2-OMe) modification, and the non-naturally occurring modification is present at a nucleotide position within in the [ASt Domain1].

[0270] 166. The TREM of any one of the preceding embodiments, wherein the TREM comprises SEQ ID NO: 4386 and does not contain a non-naturally occurring modification within in the [ASt Domain1].

[0271] 167. The TREM of any one of the preceding embodiments, wherein the TREM comprises SEQ ID NO: 4386 and the non-naturally occurring modification is present at a nucleotide position within in the [DH Domain] of SEQ ID NO: 4386.

[0272] 168. The TREM of any one of the preceding embodiments, wherein the TREM comprises SEQ ID NO: 4386, the non-naturally occurring modification is selected from a 2′-O-methyl (2-OMe), 2′-halo (e.g., 2′F or 2′Cl), 2′-O-methoxyethyl (2′MOE), 2′deoxy, or phosphorothioate modification, and the non-naturally occurring modification is present at a nucleotide position within in the [DH Domain].

[0273] 169. The TREM of any one of the preceding embodiments, wherein the TREM comprises SEQ ID NO: 4386, the non-naturally occurring modification is a 2′-O-methyl (2-OMe) or 2′-halo (e.g., 2′F or 2′Cl) modification, and the non-naturally occurring modification is present at a nucleotide position within in the [DH Domain].

[0274] 170. The TREM of any one of the preceding embodiments, wherein the TREM comprises SEQ ID NO: 4386 and does not contain a non-naturally occurring modification within in the [DH Domain].

[0275] 171. The TREM of any one of the preceding embodiments, wherein the TREM comprises SEQ ID NO: 4386 and the non-naturally occurring modification is present at a nucleotide position within in the [ACH Domain] of SEQ ID NO: 4386.

[0276] 172. The TREM of any one of the preceding embodiments, wherein the TREM comprises SEQ ID NO: 4386, the non-naturally occurring modification is selected from a 2′-O-methyl (2-OMe), 2′-halo (e.g., 2′F or 2′Cl), 2′-O-methoxyethyl (2′MOE2′deoxy, or phosphorothioate modification, and the non-naturally occurring modification is present at a nucleotide position within in the [ACH Domain].

[0277] 173. The TREM of any one of the preceding embodiments, wherein the TREM comprises SEQ ID NO: 4386, the non-naturally occurring modification is a 2′-O-methyl (2-OMe) or 2′-halo (e.g., 2′F or 2′Cl) modification, and the non-naturally occurring modification is present at a nucleotide position within in the [ACH Domain].

[0278] 174. The TREM of any one of the preceding embodiments, wherein the TREM comprises SEQ ID NO: 4386 and does not contain a non-naturally occurring modification within in the [ACH Domain].

[0279] 175. The TREM of any one of the preceding embodiments, wherein the TREM comprises SEQ ID NO: 4386 and the non-naturally occurring modification is present at a nucleotide position within in the [VL Domain] of SEQ ID NO: 4386.

[0280] 176. The TREM of any one of the preceding embodiments, wherein the TREM comprises SEQ ID NO: 4386, the non-naturally occurring modification is selected from a 2′-O-methyl (2-OMe), 2′-halo (e.g., 2′F or 2′Cl), 2′-O-methoxyethyl (2′MOE2′deoxy, or phosphorothioate modification, and the non-naturally occurring modification is present at a nucleotide position within in the [VL Domain].

[0281] 177. The TREM of any one of the preceding embodiments, wherein the TREM comprises SEQ ID NO: 4386, the non-naturally occurring modification is a 2′-O-methyl (2-OMe) or 2′-halo (e.g., 2′F or 2′Cl) modification, and the non-naturally occurring modification is present at a nucleotide position within in the [VL Domain].

[0282] 178. The TREM of any one of the preceding embodiments, wherein the TREM comprises SEQ ID NO: 4386 and does not contain a non-naturally occurring modification within in the [VL Domain].

[0283] 179. The TREM of any one of the preceding embodiments, wherein the TREM comprises SEQ ID NO: 4386 and the non-naturally occurring modification is present at a nucleotide position within in the [TH Domain] of SEQ ID NO: 4386.

[0284] 180. The TREM of any one of the preceding embodiments, wherein the TREM comprises SEQ ID NO: 4386, the non-naturally occurring modification is selected from a 2′-O-methyl (2-OMe), 2′-halo (e.g., 2′F or 2′Cl), 2′-O-methoxyethyl (2′MOE2′deoxy, or phosphorothioate modification, and the non-naturally occurring modification is present at a nucleotide position within in the [TH Domain].

[0285] 181. The TREM of any one of the preceding embodiments, wherein the TREM comprises SEQ ID NO: 4386, the non-naturally occurring modification is a 2′-O-methyl (2-OMe) or 2′-halo (e.g., 2′F or 2′Cl) modification, and the non-naturally occurring modification is present at a nucleotide position within in the [TH Domain].

[0286] 182. The TREM of any one of the preceding embodiments, wherein the TREM comprises SEQ ID NO: 4386 and does not contain a non-naturally occurring modification within in the [TH Domain].

[0287] 183. The TREM of any one of the preceding embodiments, wherein the TREM comprises SEQ ID NO: 4386 and the non-naturally occurring modification is present at a nucleotide position within in the [ASt Domain2] of SEQ ID NO: 4386.

[0288] 184. The TREM of any one of the preceding embodiments, wherein the TREM comprises SEQ ID NO: 4386, the non-naturally occurring modification is selected from a 2′-O-methyl (2-OMe), 2′-halo (e.g., 2′F or 2′Cl), 2′-O-methoxyethyl (2′MOE2′deoxy, or phosphorothioate modification, and the non-naturally occurring modification is present at a nucleotide position within in the [ASt Domain2].

[0289] 185. The TREM of any one of the preceding embodiments, wherein the TREM comprises SEQ ID NO: 4386, the non-naturally occurring modification is a 2′-O-methyl (2-OMe) or 2′-halo (e.g., 2′F or 2′Cl) modification, and the non-naturally occurring modification is present at a nucleotide position within in the [ASt Domain].

[0290] 186. The TREM of any one of the preceding embodiments, wherein the TREM comprises SEQ ID NO: 4386 and does not contain a non-naturally occurring modification within in the [ASt Domain2].

[0291] 187. The TREM of any one of the preceding embodiments, wherein the non-naturally occurring modification is present at a nucleotide position which corresponds to one or more of the nucleotides of SEQ ID NO: 4834.

[0292] 188. The TREM of any one of the preceding embodiments, wherein:
[0293] (i) the non-naturally occurring modification is present at a nucleotide position which corresponds to one or more of the nucleotides of SEQ ID NO: 4834; and/or
[0294] (ii) the TREM differs from the nucleotide sequence of SEQ ID NO: 4834 by no more than 1, 2, 3, 4, 5, 6, 7, 8, 9, or 10 nucleotides.

[0295] 189. The TREM of any one of the preceding embodiments, wherein:
[0296] (i) the non-naturally occurring modification is present at a nucleotide position which corresponds to one or more of the nucleotides of SEQ ID NO: 4386; and/or
[0297] (ii) the TREM comprises the nucleotide sequence of SEQ ID NO: 4386.

[0298] 190. The TREM of any one of the preceding embodiments, wherein the TREM comprises SEQ ID NO: 4834 and the non-naturally occurring modification is present at a nucleotide position within in the [ASt Domain1] of SEQ ID NO: 4834.

[0299] 191. The TREM of any one of the preceding embodiments, wherein the TREM comprises SEQ ID NO: 4834, the non-naturally occurring modification is selected from a 2′-O-methyl (2-OMe), 2′-halo (e.g., 2′F or 2′Cl), 2′-O-methoxyethyl (2′MOE), 2′deoxy, or phosphorothioate modification, and the non-naturally occurring modification is present at a nucleotide position within in the [ASt Domain1].

[0300] 192. The TREM of any one of the preceding embodiments, wherein the TREM comprises SEQ ID NO: 4834, the non-naturally occurring modification is a 2′-O-methyl (2-OMe) modification, and the non-naturally occurring modification is present at a nucleotide position within in the [ASt Domain1].

[0301] 193. The TREM of any one of the preceding embodiments, wherein the TREM comprises SEQ ID NO: 4834 and does not contain a non-naturally occurring modification within in the [ASt Domain1].

[0302] 194. The TREM of any one of the preceding embodiments, wherein the TREM comprises SEQ ID NO: 4834 and the non-naturally occurring modification is present at a nucleotide position within in the [DH Domain] of SEQ ID NO: 4834.

[0303] 195. The TREM of any one of the preceding embodiments, wherein the TREM comprises SEQ ID NO: 4834, the non-naturally occurring modification is selected from a 2′-O-methyl (2-OMe), 2′-halo (e.g., 2′F or 2′Cl), 2′-O-methoxyethyl (2′MOE), 2′deoxy, or phosphorothioate modification, and the non-naturally occurring modification is present at a nucleotide position within in the [DH Domain].

[0304] 196. The TREM of any one of the preceding embodiments, wherein the TREM comprises SEQ ID NO: 4834, the non-naturally occurring modification is a 2′-O-methyl (2-OMe) or 2′-halo (e.g., 2′F or 2′Cl) modification, and the non-naturally occurring modification is present at a nucleotide position within in the [DH Domain].

[0305] 197. The TREM of any one of the preceding embodiments, wherein the TREM comprises SEQ ID NO: 4834 and does not contain a non-naturally occurring modification within in the [DH Domain].

[0306] 198. The TREM of any one of the preceding embodiments, wherein the TREM comprises SEQ ID NO: 4834 and the non-naturally occurring modification is present at a nucleotide position within in the [ACH Domain] of SEQ ID NO: 4834.

[0307] 199. The TREM of any one of the preceding embodiments, wherein the TREM comprises SEQ ID NO: 4834, the non-naturally occurring modification is selected from a 2′-O-methyl (2-OMe), 2′-halo (e.g., 2′F or 2′Cl), 2′-O-methoxyethyl (2′MOE2′deoxy, or phosphorothioate modification, and the non-naturally occurring modification is present at a nucleotide position within in the [ACH Domain].

[0308] 200. The TREM of any one of the preceding embodiments, wherein the TREM comprises SEQ ID NO: 4834, the non-naturally occurring modification is a 2′-O-methyl (2-OMe) or 2′-halo (e.g., 2′F or 2′Cl) modification, and the non-naturally occurring modification is present at a nucleotide position within in the [ACH Domain].

[0309] 201. The TREM of any one of the preceding embodiments, wherein the TREM comprises SEQ ID NO: 4834 and does not contain a non-naturally occurring modification within in the [ACH Domain].

[0310] 202. The TREM of any one of the preceding embodiments, wherein the TREM comprises SEQ ID NO: 4834 and the non-naturally occurring modification is present at a nucleotide position within in the [VL Domain] of SEQ ID NO: 4834.

[0311] 203. The TREM of any one of the preceding embodiments, wherein the TREM comprises SEQ ID NO: 4834, the non-naturally occurring modification is selected from a 2′-O-methyl (2-OMe), 2′-halo (e.g., 2′F or 2′Cl), 2′-O-methoxyethyl (2′MOE2′deoxy, or phosphorothioate modification, and the non-naturally occurring modification is present at a nucleotide position within in the [VL Domain].

[0312] 204. The TREM of any one of the preceding embodiments, wherein the TREM comprises SEQ ID NO: 4834, the non-naturally occurring modification is a 2′-O-methyl (2-OMe) or 2′-halo (e.g., 2′F or 2′Cl) modification, and the non-naturally occurring modification is present at a nucleotide position within in the [VL Domain].

[0313] 205. The TREM of any one of the preceding embodiments, wherein the TREM comprises SEQ ID NO: 4834 and does not contain a non-naturally occurring modification within in the [VL Domain].

[0314] 206. The TREM of any one of the preceding embodiments, wherein the TREM comprises SEQ ID NO: 4834 and the non-naturally occurring modification is present at a nucleotide position within in the [TH Domain] of SEQ ID NO: 4834.

[0315] 207. The TREM of any one of the preceding embodiments, wherein the TREM comprises SEQ ID NO: 4386, the non-naturally occurring modification is selected from a 2′-O-methyl (2-OMe), 2′-halo (e.g., 2′F or 2′Cl), 2′-O-methoxyethyl (2′MOE2′deoxy, or phosphorothioate modification, and the non-naturally occurring modification is present at a nucleotide position within in the [TH Domain].

[0316] 208. The TREM of any one of the preceding embodiments, wherein the TREM comprises SEQ ID NO: 4834, the non-naturally occurring modification is a 2′-O-methyl (2-OMe) or 2′-halo (e.g., 2′F or 2′Cl) modification, and the non-naturally occurring modification is present at a nucleotide position within in the [TH Domain].

[0317] 209. The TREM of any one of the preceding embodiments, wherein the TREM comprises SEQ ID NO: 4834 and does not contain a non-naturally occurring modification within in the [TH Domain].

[0318] 210. The TREM of any one of the preceding embodiments, wherein the TREM comprises SEQ ID NO: 4834 and the non-naturally occurring modification is present at a nucleotide position within in the [ASt Domain2] of SEQ ID NO: 4834.

[0319] 211. The TREM of any one of the preceding embodiments, wherein the TREM comprises SEQ ID NO: 4834, the non-naturally occurring modification is selected from a 2′-O-methyl (2-modification, and the non-naturally occurring modification is present at a nucleotide position within in the [ASt Domain2].

[0320] 212. The TREM of any one of the preceding embodiments, wherein the TREM comprises SEQ ID NO: 4834, the non-naturally occurring modification is a 2′-O-methyl (2-OMe) or 2′-halo (e.g., 2′F or 2′Cl) modification, and the non-naturally occurring modification is present at a nucleotide position within in the [ASt Domain2].

[0321] 213. The TREM of any one of the preceding embodiments, wherein the TREM comprises SEQ ID NO: 4834 and does not contain a non-naturally occurring modification within in the [ASt Domain2].

[0322] 214. The TREM of any one of the preceding embodiments, wherein the non-naturally occurring modification is present at a nucleotide position which corresponds to one or more of the nucleotides of SEQ ID NO: 6749.

[0323] 215. The TREM of any one of the preceding embodiments, wherein:
[0324] (i) the non-naturally occurring modification is present at a nucleotide position which corresponds to one or more of the nucleotides of SEQ ID NO: 6749; and/or
[0325] (ii) the TREM differs from the nucleotide sequence of SEQ ID NO: 6749 by no more than 1, 2, 3, 4, 5, 6, 7, 8, 9, or 10 nucleotides.

[0326] 216. The TREM of any one of the preceding embodiments, wherein:
[0327] (i) the non-naturally occurring modification is present at a nucleotide position which corresponds to one or more of the nucleotides of SEQ ID NO: 6749; and/or
[0328] (ii) the TREM comprises the nucleotide sequence of SEQ ID NO: 6749.

[0329] 217. The TREM of any one of the preceding embodiments, wherein the TREM comprises SEQ ID NO: 6749 and the non-naturally occurring modification is present at a nucleotide position within in the [ASt Domain1] of SEQ ID NO: 6749.

[0330] 218. The TREM of any one of the preceding embodiments, wherein the TREM comprises SEQ ID NO: 6749, the non-naturally occurring modification is selected from a 2′-O-methyl (2-OMe), 2′-halo (e.g., 2′F or 2′Cl), 2′-O-methoxyethyl (2′MOE), 2′deoxy, or phosphorothioate modification, and the non-naturally occurring modification is present at a nucleotide position within in the [ASt Domain1].

[0331] 219. The TREM of any one of the preceding embodiments, wherein the TREM comprises SEQ ID NO: 6749, the non-naturally occurring modification is a 2′-O-methyl (2-OMe) modification, and the non-naturally occurring modification is present at a nucleotide position within in the [ASt Domain1].

[0332] 220. The TREM of any one of the preceding embodiments, wherein the TREM comprises SEQ ID NO: 6749 and does not contain a non-naturally occurring modification within in the [ASt Domain1].

[0333] 221. The TREM of any one of the preceding embodiments, wherein the TREM comprises SEQ ID NO: 6749 and the non-naturally occurring modification is present at a nucleotide position within in the [DH Domain] of SEQ ID NO: 6749.

[0334] 222. The TREM of any one of the preceding embodiments, wherein the TREM comprises SEQ ID NO: 6749, the non-naturally occurring modification is selected from a 2′-O-methyl (2-OMe), 2′-halo (e.g., 2′F or 2′Cl), 2′-O-methoxyethyl (2′MOE), 2′deoxy, or phosphorothioate modification, and the non-naturally occurring modification is present at a nucleotide position within in the [DH Domain].

[0335] 223. The TREM of any one of the preceding embodiments, wherein the TREM comprises SEQ ID NO: 6749, the non-naturally occurring modification is a 2′-O-methyl (2-OMe) or 2′-halo (e.g., 2′F or 2′Cl) modification, and the non-naturally occurring modification is present at a nucleotide position within in the [DH Domain].

[0336] 224. The TREM of any one of the preceding embodiments, wherein the TREM comprises SEQ ID NO: 6749 and does not contain a non-naturally occurring modification within in the [DH Domain].

[0337] 225. The TREM of any one of the preceding embodiments, wherein the TREM comprises SEQ ID NO: 6749 and the non-naturally occurring modification is present at a nucleotide position within in the [ACH Domain] of SEQ ID NO: 6749.

[0338] 226. The TREM of any one of the preceding embodiments, wherein the TREM comprises SEQ ID NO: 6749, the non-naturally occurring modification is selected from a 2′-O-methyl (2-OMe), 2′-halo (e.g., 2′F or 2′Cl), 2′-O-methoxyethyl (2′MOE2′deoxy, or phosphorothioate modification, and the non-naturally occurring modification is present at a nucleotide position within in the [ACH Domain].

[0339] 227. The TREM of any one of the preceding embodiments, wherein the TREM comprises SEQ ID NO: 6749, the non-naturally occurring modification is a 2′-O-methyl (2-OMe) or 2′-halo (e.g., 2′F or 2′Cl) modification, and the non-naturally occurring modification is present at a nucleotide position within in the [ACH Domain].

[0340] 228. The TREM of any one of the preceding embodiments, wherein the TREM comprises SEQ ID NO: 6749 and does not contain a non-naturally occurring modification within in the [ACH Domain].

[0341] 229. The TREM of any one of the preceding embodiments, wherein the TREM comprises SEQ ID NO: 6749 and the non-naturally occurring modification is present at a nucleotide position within in the [VL Domain] of SEQ ID NO: 6749.

[0342] 230. The TREM of any one of the preceding embodiments, wherein the TREM comprises SEQ ID NO: 6749, the non-naturally occurring modification is selected from a 2′-O-methyl (2-modification, and the non-naturally occurring modification is present at a nucleotide position within in the [VL Domain].

[0343] 231. The TREM of any one of the preceding embodiments, wherein the TREM comprises SEQ ID NO: 6749, the non-naturally occurring modification is a 2′-O-methyl (2-OMe) or 2′-halo (e.g., 2′F or 2′Cl) modification, and the non-naturally occurring modification is present at a nucleotide position within in the [VL Domain].

[0344] 232. The TREM of any one of the preceding embodiments, wherein the TREM comprises SEQ ID NO: 6749 and does not contain a non-naturally occurring modification within in the [VL Domain].

[0345] 233. The TREM of any one of the preceding embodiments, wherein the TREM comprises SEQ ID NO: 6749 and the non-naturally occurring modification is present at a nucleotide position within in the [TH Domain] of SEQ ID NO: 6749.

[0346] 234. The TREM of any one of the preceding embodiments, wherein the TREM comprises SEQ ID NO: 6749, the non-naturally occurring modification is selected from a 2′-O-methyl (2-OMe), 2′-halo (e.g., 2′F or 2′Cl), 2′-O-methoxyethyl (2′MOE2′deoxy, or phosphorothioate modification, and the non-naturally occurring modification is present at a nucleotide position within in the [TH Domain].

[0347] 235. The TREM of any one of the preceding embodiments, wherein the TREM comprises SEQ ID NO: 6749, the non-naturally occurring modification is a 2′-O-methyl (2-OMe) or 2′-halo (e.g., 2′F or 2′Cl) modification, and the non-naturally occurring modification is present at a nucleotide position within in the [TH Domain].

[0348] 236. The TREM of any one of the preceding embodiments, wherein the TREM comprises SEQ ID NO: 6749 and does not contain a non-naturally occurring modification within in the [TH Domain].

[0349] 237. The TREM of any one of the preceding embodiments, wherein the TREM comprises SEQ ID NO: 6749 and the non-naturally occurring modification is present at a nucleotide position within in the [ASt Domain2] of SEQ ID NO: 6749.

[0350] 238. The TREM of any one of the preceding embodiments, wherein the TREM comprises SEQ ID NO: 6749, the non-naturally occurring modification is selected from a 2′-O-methyl (2-OMe), 2′-halo (e.g., 2′F or 2′Cl), 2′-O-methoxyethyl (2′MOE2′deoxy, or phosphorothioate modification, and the non-naturally occurring modification is present at a nucleotide position within in the [ASt Domain2].

[0351] 239. The TREM of any one of the preceding embodiments, wherein the TREM comprises SEQ ID NO: 6749, the non-naturally occurring modification is a 2′-O-methyl (2-OMe) or 2′-halo (e.g., 2′F or 2′Cl) modification, and the non-naturally occurring modification is present at a nucleotide position within in the [ASt Domain2].

[0352] 240. The TREM of any one of the preceding embodiments, wherein the TREM comprises SEQ ID NO: 6749 and does not contain a non-naturally occurring modification within in the [ASt Domain2].

[0353] 241. The TREM of any one of the preceding embodiments, wherein the non-naturally occurring modification is present at a nucleotide position which corresponds to one or more of the nucleotides of SEQ ID NO: 8051.

[0354] 242. The TREM of any one of the preceding embodiments, wherein:
[0355] (i) the non-naturally occurring modification is present at a nucleotide position which corresponds to one or more of the nucleotides of SEQ ID NO: 8051; and/or
[0356] (ii) the TREM differs from the nucleotide sequence of SEQ ID NO: 8051 by no more than 1, 2, 3, 4, 5, 6, 7, 8, 9, or 10 nucleotides.

[0357] 243. The TREM of any one of the preceding embodiments, wherein:
[0358] (i) the non-naturally occurring modification is present at a nucleotide position which corresponds to one or more of the nucleotides of SEQ ID NO: 8051; and/or
[0359] (ii) the TREM comprises the nucleotide sequence of SEQ ID NO: 8051.

[0360] 244. The TREM of any one of the preceding embodiments, wherein the TREM comprises SEQ ID NO: 8051 and the non-naturally occurring modification is present at a nucleotide position within in the [ASt Domain1] of SEQ ID NO: 8051.

[0361] 245. The TREM of any one of the preceding embodiments, wherein the TREM comprises SEQ ID NO: 8051, the non-naturally occurring modification is selected from a 2′-O-methyl (2-OMe), 2′-halo (e.g., 2′F or 2′Cl), 2′-O-methoxyethyl (2′MOE), 2′deoxy, or phosphorothioate modification, and the non-naturally occurring modification is present at a nucleotide position within in the [ASt Domain1].

[0362] 246. The TREM of any one of the preceding embodiments, wherein the TREM comprises SEQ ID NO: 8051, the non-naturally occurring modification is a 2′-O-methyl (2-OMe) modification, and the non-naturally occurring modification is present at a nucleotide position within in the [ASt Domain1].

[0363] 247. The TREM of any one of the preceding embodiments, wherein the TREM comprises SEQ ID NO: 8051 and does not contain a non-naturally occurring modification within in the [ASt Domain1].

[0364] 248. The TREM of any one of the preceding embodiments, wherein the TREM comprises SEQ ID NO: 6749 and the non-naturally occurring modification is present at a nucleotide position within in the [DH Domain] of SEQ ID NO: 8051.

[0365] 249. The TREM of any one of the preceding embodiments, wherein the TREM comprises SEQ ID NO: 8051, the non-naturally occurring modification is selected from a 2′-O-methyl (2-OMe), 2′-halo (e.g., 2′F or 2′Cl), 2′-O-methoxyethyl (2′MOE), 2′deoxy, or phosphorothioate modification, and the non-naturally occurring modification is present at a nucleotide position within in the [DH Domain].

[0366] 250. The TREM of any one of the preceding embodiments, wherein the TREM comprises SEQ ID NO: 8051, the non-naturally occurring modification is a 2′-O-methyl (2-OMe) or 2′-halo (e.g., 2′F or 2′Cl) modification, and the non-naturally occurring modification is present at a nucleotide position within in the [DH Domain].

[0367] 251. The TREM of any one of the preceding embodiments, wherein the TREM comprises SEQ ID NO: 8051 and does not contain a non-naturally occurring modification within in the [DH Domain].

[0368] 252. The TREM of any one of the preceding embodiments, wherein the TREM comprises SEQ ID NO: 8051 and the non-naturally occurring modification is present at a nucleotide position within in the [ACH Domain] of SEQ ID NO: 8051.

[0369] 253. The TREM of any one of the preceding embodiments, wherein the TREM comprises SEQ ID NO: 8051, the non-naturally occurring modification is selected from a 2′-O-methyl (2-OMe), 2′-halo (e.g., 2′F or 2′Cl), 2′-O-methoxyethyl (2′MOE2′deoxy, or phosphorothioate modification, and the non-naturally occurring modification is present at a nucleotide position within in the [ACH Domain].

[0370] 254. The TREM of any one of the preceding embodiments, wherein the TREM comprises SEQ ID NO: 8051, the non-naturally occurring modification is a 2′-O-methyl (2-OMe) or 2′-halo (e.g., 2′F or 2′Cl) modification, and the non-naturally occurring modification is present at a nucleotide position within in the [ACH Domain].

[0371] 255. The TREM of any one of the preceding embodiments, wherein the TREM comprises SEQ ID NO: 8051 and does not contain a non-naturally occurring modification within in the [ACH Domain].

[0372] 256. The TREM of any one of the preceding embodiments, wherein the TREM comprises SEQ ID NO: 8051 and the non-naturally occurring modification is present at a nucleotide position within in the [VL Domain] of SEQ ID NO: 8051.

[0373] 257. The TREM of any one of the preceding embodiments, wherein the TREM comprises SEQ ID NO: 8051, the non-naturally occurring modification is selected from a 2′-O-methyl (2-OMe), 2′-halo (e.g., 2′F or 2′Cl), 2′-O-methoxyethyl (2′MOE2′deoxy, or phosphorothioate modification, and the non-naturally occurring modification is present at a nucleotide position within in the [VL Domain].

[0374] 258. The TREM of any one of the preceding embodiments, wherein the TREM comprises SEQ ID NO: 8051, the non-naturally occurring modification is a 2′-O-methyl (2-OMe) or 2′-halo (e.g., 2′F or 2′Cl) modification, and the non-naturally occurring modification is present at a nucleotide position within in the [VL Domain].

[0375] 259. The TREM of any one of the preceding embodiments, wherein the TREM comprises SEQ ID NO: 8051 and does not contain a non-naturally occurring modification within in the [VL Domain].

[0376] 260. The TREM of any one of the preceding embodiments, wherein the TREM comprises SEQ ID NO: 8051 and the non-naturally occurring modification is present at a nucleotide position within in the [TH Domain] of SEQ ID NO: 8051.

[0377] 261. The TREM of any one of the preceding embodiments, wherein the TREM comprises SEQ ID NO: 8051, the non-naturally occurring modification is selected from a 2′-O-methyl (2-OMe), 2′-halo (e.g., 2′F or 2′Cl), 2′-O-methoxyethyl (2′MOE2′deoxy, or phosphorothioate modification, and the non-naturally occurring modification is present at a nucleotide position within in the [TH Domain].

[0378] 262. The TREM of any one of the preceding embodiments, wherein the TREM comprises SEQ ID NO: 8051, the non-naturally occurring modification is a 2′-O-methyl (2-OMe) or 2′-halo (e.g., 2′F or 2′Cl) modification, and the non-naturally occurring modification is present at a nucleotide position within in the [TH Domain].

[0379] 263. The TREM of any one of the preceding embodiments, wherein the TREM comprises SEQ ID NO: 8051 and does not contain a non-naturally occurring modification within in the [TH Domain].

[0380] 264. The TREM of any one of the preceding embodiments, wherein the TREM comprises SEQ ID NO: 8051 and the non-naturally occurring modification is present at a nucleotide position within in the [ASt Domain2] of SEQ ID NO: 8051.

[0381] 265. The TREM of any one of the preceding embodiments, wherein the TREM comprises SEQ ID NO: 8051, the non-naturally occurring modification is selected from a 2′-O-methyl (2-OMe), 2′-halo (e.g., 2′F or 2′Cl), 2′-O-methoxyethyl (2′MOE2′deoxy, or phosphorothioate modification, and the non-naturally occurring modification is present at a nucleotide position within in the [ASt Domain2].

[0382] 266. The TREM of any one of the preceding embodiments, wherein the TREM comprises SEQ ID NO: 8051, the non-naturally occurring modification is a 2′-O-methyl (2-OMe) or 2′-halo (e.g., 2′F or 2′Cl) modification, and the non-naturally occurring modification is present at a nucleotide position within in the [ASt Domain2].

[0383] 267. The TREM of any one of the preceding embodiments, wherein the TREM comprises SEQ ID NO: 8051 and does not contain a non-naturally occurring modification within in the [ASt Domain2].

[0384] 268. The TREM of any one of the preceding embodiments, wherein the non-naturally occurring modification is present at a nucleotide position which corresponds to one or more of the nucleotides of SEQ ID NO: 6707.

[0385] 269. The TREM of any one of the preceding embodiments, wherein:
[0386] (i) the non-naturally occurring modification is present at a nucleotide position which corresponds to one or more of the nucleotides of SEQ ID NO: 6707; and/or
[0387] (ii) the TREM differs from the nucleotide sequence of SEQ ID NO: 6707 by no more than 1, 2, 3, 4, 5, 6, 7, 8, 9, or 10 nucleotides.

[0388] 270. The TREM of any one of the preceding embodiments, wherein:
[0389] (i) the non-naturally occurring modification is present at a nucleotide position which corresponds to one or more of the nucleotides of SEQ ID NO: 6707; and/or
[0390] (ii) the TREM comprises the nucleotide sequence of SEQ ID NO: 6707.

[0391] 271. The TREM of any one of the preceding embodiments, wherein the TREM comprises SEQ ID NO: 6707 and the non-naturally occurring modification is present at a nucleotide position within in the [ASt Domain1] of SEQ ID NO: 6707.

[0392] 272. The TREM of any one of the preceding embodiments, wherein the TREM comprises SEQ ID NO: 6707, the non-naturally occurring modification is selected from a 2′-O-methyl (2-OMe), 2′-halo (e.g., 2′F or 2′Cl), 2′-O-methoxyethyl (2′MOE), 2′deoxy, or phosphorothioate modification, and the non-naturally occurring modification is present at a nucleotide position within in the [ASt Domain1].

[0393] 273. The TREM of any one of the preceding embodiments, wherein the TREM comprises SEQ ID NO: 6707, the non-naturally occurring modification is a 2′-O-methyl (2-OMe) modification, and the non-naturally occurring modification is present at a nucleotide position within in the [ASt Domain1].

[0394] 274. The TREM of any one of the preceding embodiments, wherein the TREM comprises SEQ ID NO: 6707 and does not contain a non-naturally occurring modification within in the [ASt Domain1].

[0395] 275. The TREM of any one of the preceding embodiments, wherein the TREM comprises SEQ ID NO: 6707 and the non-naturally occurring modification is present at a nucleotide position within in the [DH Domain] of SEQ ID NO: 6707.

[0396] 276. The TREM of any one of the preceding embodiments, wherein the TREM comprises SEQ ID NO: 6707, the non-naturally occurring modification is selected from a 2′-O-methyl (2-OMe), 2′-halo (e.g., 2′F or 2′Cl), 2′-O-methoxyethyl (2′MOE), 2′deoxy, or phosphorothioate modification, and the non-naturally occurring modification is present at a nucleotide position within in the [DH Domain].

[0397] 277. The TREM of any one of the preceding embodiments, wherein the TREM comprises SEQ ID NO: 6707, the non-naturally occurring modification is a 2′-O-methyl (2-OMe) or 2′-halo (e.g., 2′F or 2′Cl) modification, and the non-naturally occurring modification is present at a nucleotide position within in the [DH Domain].

[0398] 278. The TREM of any one of the preceding embodiments, wherein the TREM comprises SEQ ID NO: 6707 and does not contain a non-naturally occurring modification within in the [DH Domain].

[0399] 279. The TREM of any one of the preceding embodiments, wherein the TREM comprises SEQ ID NO: 6707 and the non-naturally occurring modification is present at a nucleotide position within in the [ACH Domain] of SEQ ID NO: 6707.

[0400] 280. The TREM of any one of the preceding embodiments, wherein the TREM comprises SEQ ID NO: 6707, the non-naturally occurring modification is selected from a 2′-O-methyl (2-OMe), 2′-halo (e.g., 2′F or 2′Cl), 2′-O-methoxyethyl (2′MOE2′deoxy, or phosphorothioate modification, and the non-naturally occurring modification is present at a nucleotide position within in the [ACH Domain].

[0401] 281. The TREM of any one of the preceding embodiments, wherein the TREM comprises SEQ ID NO: 6707, the non-naturally occurring modification is a 2′-O-methyl (2-OMe) or 2′-halo (e.g., 2′F or 2′Cl) modification, and the non-naturally occurring modification is present at a nucleotide position within in the [ACH Domain].

[0402] 282. The TREM of any one of the preceding embodiments, wherein the TREM comprises SEQ ID NO: 6707 and does not contain a non-naturally occurring modification within in the [ACH Domain].

[0403] 283. The TREM of any one of the preceding embodiments, wherein the TREM comprises SEQ ID NO: 6707 and the non-naturally occurring modification is present at a nucleotide position within in the [VL Domain] of SEQ ID NO: 6707.

[0404] 284. The TREM of any one of the preceding embodiments, wherein the TREM comprises SEQ ID NO: 6707, the non-naturally occurring modification is selected from a 2′-O-methyl (2-OMe), 2′-halo (e.g., 2′F or 2′Cl), 2′-O-methoxyethyl (2′MOE2′deoxy, or phosphorothioate modification, and the non-naturally occurring modification is present at a nucleotide position within in the [VL Domain].

[0405] 285. The TREM of any one of the preceding embodiments, wherein the TREM comprises SEQ ID NO: 6707, the non-naturally occurring modification is a 2′-O-methyl (2-OMe) or 2′-halo (e.g., 2′F or 2′Cl) modification, and the non-naturally occurring modification is present at a nucleotide position within in the [VL Domain].

[0406] 286. The TREM of any one of the preceding embodiments, wherein the TREM comprises SEQ ID NO: 6707 and does not contain a non-naturally occurring modification within in the [VL Domain].

[0407] 287. The TREM of any one of the preceding embodiments, wherein the TREM comprises SEQ ID NO: 6707 and the non-naturally occurring modification is present at a nucleotide position within in the [TH Domain] of SEQ ID NO: 6707.

[0408] 288. The TREM of any one of the preceding embodiments, wherein the TREM comprises SEQ ID NO: 6707, the non-naturally occurring modification is selected from a 2′-O-methyl (2-OMe), 2′-halo (e.g., 2′F or 2′Cl), 2′-O-methoxyethyl (2′MOE2′deoxy, or phosphorothioate modification, and the non-naturally occurring modification is present at a nucleotide position within in the [TH Domain].

[0409] 289. The TREM of any one of the preceding embodiments, wherein the TREM comprises SEQ ID NO: 6707, the non-naturally occurring modification is a 2′-O-methyl (2-OMe) or 2′-halo (e.g., 2′F or 2′Cl) modification, and the non-naturally occurring modification is present at a nucleotide position within in the [TH Domain].

[0410] 290. The TREM of any one of the preceding embodiments, wherein the TREM comprises SEQ ID NO: 6707 and does not contain a non-naturally occurring modification within in the [TH Domain].

[0411] 291. The TREM of any one of the preceding embodiments, wherein the TREM comprises SEQ ID NO: 6707 and the non-naturally occurring modification is present at a nucleotide position within in the [ASt Domain2] of SEQ ID NO: 6707.

[0412] 292. The TREM of any one of the preceding embodiments, wherein the TREM comprises SEQ ID NO: 6707, the non-naturally occurring modification is selected from a 2′-O-methyl (2-OMe), 2′-halo (e.g., 2′F or 2′Cl), 2′-O-methoxyethyl (2′MOE2′deoxy, or phosphorothioate modification, and the non-naturally occurring modification is present at a nucleotide position within in the [ASt Domain2].

[0413] 293. The TREM of any one of the preceding embodiments, wherein the TREM comprises SEQ ID NO: 6707, the non-naturally occurring modification is a 2′-O-methyl (2-OMe) or 2′-halo (e.g., 2′F or 2′Cl) modification, and the non-naturally occurring modification is present at a nucleotide position within in the [ASt Domain2].

[0414] 294. The TREM of any one of the preceding embodiments, wherein the TREM comprises SEQ ID NO: 6707 and does not contain a non-naturally occurring modification within in the [ASt Domain2].

[0415] 295. The TREM of any one of the preceding embodiments, wherein the non-naturally occurring modification is present at a nucleotide position which corresponds to one or more of the nucleotides of SEQ ID NO: 5630.

[0416] 296. The TREM of any one of the preceding embodiments, wherein:
[0417] (i) the non-naturally occurring modification is present at a nucleotide position which corresponds to one or more of the nucleotides of SEQ ID NO: 5630; and/or
[0418] (ii) the TREM differs from the nucleotide sequence of SEQ ID NO: 5630 by no more than 1, 2, 3, 4, 5, 6, 7, 8, 9, or 10 nucleotides.

[0419] 297. The TREM of any one of the preceding embodiments, wherein:
[0420] (i) the non-naturally occurring modification is present at a nucleotide position which corresponds to one or more of the nucleotides of SEQ ID NO: 5630; and/or
[0421] (ii) the TREM comprises the nucleotide sequence of SEQ ID NO: 5630.

[0422] 298. The TREM of any one of the preceding embodiments, wherein the TREM comprises SEQ ID NO: 5630 and the non-naturally occurring modification is present at a nucleotide position within in the [ASt Domain1] of SEQ ID NO: 5630.

[0423] 299. The TREM of any one of the preceding embodiments, wherein the TREM comprises SEQ ID NO: 5630, the non-naturally occurring modification is selected from a 2′-O-methyl (2-OMe), 2′-halo (e.g., 2′F or 2′Cl), 2′-O-methoxyethyl (2′MOE), 2′deoxy, or phosphorothioate modification, and the non-naturally occurring modification is present at a nucleotide position within in the [ASt Domain1].

[0424] 300. The TREM of any one of the preceding embodiments, wherein the TREM comprises SEQ ID NO: 5630, the non-naturally occurring modification is a 2′-O-methyl (2-OMe) modification, and the non-naturally occurring modification is present at a nucleotide position within in the [ASt Domain1].

[0425] 301. The TREM of any one of the preceding embodiments, wherein the TREM comprises SEQ ID NO: 5630 and does not contain a non-naturally occurring modification within in the [ASt Domain1].

[0426] 302. The TREM of any one of the preceding embodiments, wherein the TREM comprises SEQ ID NO: 5630 and the non-naturally occurring modification is present at a nucleotide position within in the [DH Domain] of SEQ ID NO: 5630.

[0427] 303. The TREM of any one of the preceding embodiments, wherein the TREM comprises SEQ ID NO: 5630, the non-naturally occurring modification is selected from a 2′-O-methyl (2-OMe), 2′-halo (e.g., 2′F or 2′Cl), 2′-O-methoxyethyl (2′MOE), 2′deoxy, or phosphorothioate modification, and the non-naturally occurring modification is present at a nucleotide position within in the [DH Domain].

[0428] 304. The TREM of any one of the preceding embodiments, wherein the TREM comprises SEQ ID NO: 5630, the non-naturally occurring modification is a 2′-O-methyl (2-OMe) or 2′-halo (e.g., 2′F or 2′Cl) modification, and the non-naturally occurring modification is present at a nucleotide position within in the [DH Domain].

[0429] 305. The TREM of any one of the preceding embodiments, wherein the TREM comprises SEQ ID NO: 5630 and does not contain a non-naturally occurring modification within in the [DH Domain].

[0430] 306. The TREM of any one of the preceding embodiments, wherein the TREM comprises SEQ ID NO: 5630 and the non-naturally occurring modification is present at a nucleotide position within in the [ACH Domain] of SEQ ID NO: 5630.

[0431] 307. The TREM of any one of the preceding embodiments, wherein the TREM comprises SEQ ID NO: 5630, the non-naturally occurring modification is selected from a 2′-O-methyl (2-OMe), 2′-halo (e.g., 2′F or 2′Cl), 2′-O-methoxyethyl (2′MOE2′deoxy, or phosphorothioate modification, and the non-naturally occurring modification is present at a nucleotide position within in the [ACH Domain].

[0432] 308. The TREM of any one of the preceding embodiments, wherein the TREM comprises SEQ ID NO: 5630, the non-naturally occurring modification is a 2′-O-methyl (2-OMe) or 2′-halo (e.g., 2′F or 2′Cl) modification, and the non-naturally occurring modification is present at a nucleotide position within in the [ACH Domain].

[0433] 309. The TREM of any one of the preceding embodiments, wherein the TREM comprises SEQ ID NO: 5630 and does not contain a non-naturally occurring modification within in the [ACH Domain].

[0434] 310. The TREM of any one of the preceding embodiments, wherein the TREM comprises SEQ ID NO: 5630 and the non-naturally occurring modification is present at a nucleotide position within in the [VL Domain] of SEQ ID NO: 5630.

[0435] 311. The TREM of any one of the preceding embodiments, wherein the TREM comprises SEQ ID NO: 5630, the non-naturally occurring modification is selected from a 2′-O-methyl (2-OMe), 2′-halo (e.g., 2′F or 2′Cl), 2′-O-methoxyethyl (2′MOE2′deoxy, or phosphorothioate modification, and the non-naturally occurring modification is present at a nucleotide position within in the [VL Domain].

[0436] 312. The TREM of any one of the preceding embodiments, wherein the TREM comprises SEQ ID NO: 5630, the non-naturally occurring modification is a 2′-O-methyl (2-OMe) or 2′-halo (e.g., 2′F or 2′Cl) modification, and the non-naturally occurring modification is present at a nucleotide position within in the [VL Domain].

[0437] 313. The TREM of any one of the preceding embodiments, wherein the TREM comprises SEQ ID NO: 5630 and does not contain a non-naturally occurring modification within in the [VL Domain].

[0438] 314. The TREM of any one of the preceding embodiments, wherein the TREM comprises SEQ ID NO: 5630 and the non-naturally occurring modification is present at a nucleotide position within in the [TH Domain] of SEQ ID NO: 5630.

[0439] 315. The TREM of any one of the preceding embodiments, wherein the TREM comprises SEQ ID NO: 5630, the non-naturally occurring modification is selected from a 2′-O-methyl (2-OMe), 2′-halo (e.g., 2′F or 2′Cl), 2′-O-methoxyethyl (2′MOE2′deoxy, or phosphorothioate modification, and the non-naturally occurring modification is present at a nucleotide position within in the [TH Domain].

[0440] 316. The TREM of any one of the preceding embodiments, wherein the TREM comprises SEQ ID NO: 5630, the non-naturally occurring modification is a 2′-O-methyl (2-OMe) or 2′-halo (e.g., 2′F or 2′Cl) modification, and the non-naturally occurring modification is present at a nucleotide position within in the [TH Domain].

[0441] 317. The TREM of any one of the preceding embodiments, wherein the TREM comprises SEQ ID NO: 5630 and does not contain a non-naturally occurring modification within in the [TH Domain].

[0442] 318. The TREM of any one of the preceding embodiments, wherein the TREM comprises SEQ ID NO: 5630 and the non-naturally occurring modification is present at a nucleotide position within in the [ASt Domain2] of SEQ ID NO: 5630.

[0443] 319. The TREM of any one of the preceding embodiments, wherein the TREM comprises SEQ ID NO: 5630, the non-naturally occurring modification is selected from a 2′-O-methyl (2-modification, and the non-naturally occurring modification is present at a nucleotide position within in the [ASt Domain2].

[0444] 320. The TREM of any one of the preceding embodiments, wherein the TREM comprises SEQ ID NO: 5630, the non-naturally occurring modification is a 2′-O-methyl (2-OMe) or 2′-halo (e.g., 2′F or 2′Cl) modification, and the non-naturally occurring modification is present at a nucleotide position within in the [ASt Domain2].

[0445] 321. The TREM of any one of the preceding embodiments, wherein the TREM comprises SEQ ID NO: 5630 and does not contain a non-naturally occurring modification within in the [ASt Domain2].

[0446] 322. The TREM of any one of the preceding embodiments, wherein the non-naturally occurring modification is present at a nucleotide position which corresponds to one or more of the nucleotides of SEQ ID NO: 4249.

[0447] 323. The TREM of any one of the preceding embodiments, wherein:
[0448] (i) the non-naturally occurring modification is present at a nucleotide position which corresponds to one or more of the nucleotides of SEQ ID NO: 4249; and/or
[0449] (ii) the TREM differs from the nucleotide sequence of SEQ ID NO: 4249 by no more than 1, 2, 3, 4, 5, 6, 7, 8, 9, or 10 nucleotides.

[0450] 324. The TREM of any one of the preceding embodiments, wherein:
[0451] (i) the non-naturally occurring modification is present at a nucleotide position which corresponds to one or more of the nucleotides of SEQ ID NO: 4249; and/or
[0452] (ii) the TREM comprises the nucleotide sequence of SEQ ID NO: 4249.

[0453] 325. The TREM of any one of the preceding embodiments, wherein the TREM comprises SEQ ID NO: 4249 and the non-naturally occurring modification is present at a nucleotide position within in the [ASt Domain1] of SEQ ID NO: 4249.

[0454] 326. The TREM of any one of the preceding embodiments, wherein the TREM comprises SEQ ID NO: 4249, the non-naturally occurring modification is selected from a 2′-O-methyl (2-OMe), 2′-halo (e.g., 2′F or 2′Cl), 2′-O-methoxyethyl (2′MOE), 2′deoxy, or phosphorothioate modification, and the non-naturally occurring modification is present at a nucleotide position within in the [ASt Domain1].

[0455] 327. The TREM of any one of the preceding embodiments, wherein the TREM comprises SEQ ID NO: 4249, the non-naturally occurring modification is a 2′-O-methyl (2-OMe) modification, and the non-naturally occurring modification is present at a nucleotide position within in the [ASt Domain1].

[0456] 328. The TREM of any one of the preceding embodiments, wherein the TREM comprises SEQ ID NO: 4249 and does not contain a non-naturally occurring modification within in the [ASt Domain1].

[0457] 329. The TREM of any one of the preceding embodiments, wherein the TREM comprises SEQ ID NO: 4249 and the non-naturally occurring modification is present at a nucleotide position within in the [DH Domain] of SEQ ID NO: 4249.

[0458] 330. The TREM of any one of the preceding embodiments, wherein the TREM comprises SEQ ID NO: 4249, the non-naturally occurring modification is selected from a 2′-O-methyl (2-OMe), 2′-halo (e.g., 2′F or 2′Cl), 2′-O-methoxyethyl (2′MOE), 2′deoxy, or phosphorothioate modification, and the non-naturally occurring modification is present at a nucleotide position within in the [DH Domain].

[0459] 331. The TREM of any one of the preceding embodiments, wherein the TREM comprises SEQ ID NO: 4249, the non-naturally occurring modification is a 2′-O-methyl (2-OMe) or 2′-halo (e.g., 2′F or 2′Cl) modification, and the non-naturally occurring modification is present at a nucleotide position within in the [DH Domain].

[0460] 332. The TREM of any one of the preceding embodiments, wherein the TREM comprises SEQ ID NO: 4249 and does not contain a non-naturally occurring modification within in the [DH Domain].

[0461] 333. The TREM of any one of the preceding embodiments, wherein the TREM comprises SEQ ID NO: 4249 and the non-naturally occurring modification is present at a nucleotide position within in the [ACH Domain] of SEQ ID NO: 4249.

[0462] 334. The TREM of any one of the preceding embodiments, wherein the TREM comprises SEQ ID NO: 4249, the non-naturally occurring modification is selected from a 2′-O-methyl (2-OMe), 2′-halo (e.g., 2′F or 2′Cl), 2′-O-methoxyethyl (2′MOE2′deoxy, or phosphorothioate modification, and the non-naturally occurring modification is present at a nucleotide position within in the [ACH Domain].

[0463] 335. The TREM of any one of the preceding embodiments, wherein the TREM comprises SEQ ID NO: 4249, the non-naturally occurring modification is a 2′-O-methyl (2-OMe) or 2′-halo (e.g., 2′F or 2′Cl) modification, and the non-naturally occurring modification is present at a nucleotide position within in the [ACH Domain].

[0464] 336. The TREM of any one of the preceding embodiments, wherein the TREM comprises SEQ ID NO: 4249 and does not contain a non-naturally occurring modification within in the [ACH Domain].

[0465] 337. The TREM of any one of the preceding embodiments, wherein the TREM comprises SEQ ID NO: 4249 and the non-naturally occurring modification is present at a nucleotide position within in the [VL Domain] of SEQ ID NO: 4249.

[0466] 338. The TREM of any one of the preceding embodiments, wherein the TREM comprises SEQ ID NO: 4249, the non-naturally occurring modification is selected from a 2′-O-methyl (2-modification, and the non-naturally occurring modification is present at a nucleotide position within in the [VL Domain].

[0467] 339. The TREM of any one of the preceding embodiments, wherein the TREM comprises SEQ ID NO: 4249, the non-naturally occurring modification is a 2′-O-methyl (2-OMe) or 2′-halo (e.g., 2′F or 2′Cl) modification, and the non-naturally occurring modification is present at a nucleotide position within in the [VL Domain].

[0468] 340. The TREM of any one of the preceding embodiments, wherein the TREM comprises SEQ ID NO: 4249 and does not contain a non-naturally occurring modification within in the [VL Domain].

[0469] 341. The TREM of any one of the preceding embodiments, wherein the TREM comprises SEQ ID NO: 4249 and the non-naturally occurring modification is present at a nucleotide position within in the [TH Domain] of SEQ ID NO: 4249.

[0470] 342. The TREM of any one of the preceding embodiments, wherein the TREM comprises SEQ ID NO: 4249, the non-naturally occurring modification is selected from a 2′-O-methyl (2-OMe), 2′-halo (e.g., 2′F or 2′Cl), 2′-O-methoxyethyl (2′MOE2′deoxy, or phosphorothioate modification, and the non-naturally occurring modification is present at a nucleotide position within in the [TH Domain].

[0471] 343. The TREM of any one of the preceding embodiments, wherein the TREM comprises SEQ ID NO: 4249, the non-naturally occurring modification is a 2′-O-methyl (2-OMe) or 2′-halo (e.g., 2′F or 2′Cl) modification, and the non-naturally occurring modification is present at a nucleotide position within in the [TH Domain].

[0472] 344. The TREM of any one of the preceding embodiments, wherein the TREM comprises SEQ ID NO: 4249 and does not contain a non-naturally occurring modification within in the [TH Domain].

[0473] 345. The TREM of any one of the preceding embodiments, wherein the TREM comprises SEQ ID NO: 4249 and the non-naturally occurring modification is present at a nucleotide position within in the [ASt Domain2] of SEQ ID NO: 4249.

[0474] 346. The TREM of any one of the preceding embodiments, wherein the TREM comprises SEQ ID NO: 4249, the non-naturally occurring modification is selected from a 2′-O-methyl (2-OMe), 2′-halo (e.g., 2′F or 2′Cl), 2′-O-methoxyethyl (2′MOE2′deoxy, or phosphorothioate modification, and the non-naturally occurring modification is present at a nucleotide position within in the [ASt Domain2].

[0475] 347. The TREM of any one of the preceding embodiments, wherein the TREM comprises SEQ ID NO: 4249, the non-naturally occurring modification is a 2′-O-methyl (2-OMe) or 2′-halo (e.g., 2′F or 2′Cl) modification, and the non-naturally occurring modification is present at a nucleotide position within in the [ASt Domain2].

[0476] 348. The TREM of any one of the preceding embodiments, wherein the TREM comprises SEQ ID NO: 4249 and does not contain a non-naturally occurring modification within in the [ASt Domain2].

[0477] 349. The TREM of any one of the preceding embodiments, wherein the TREM comprises the sequence of Formula I_{ALA} (SEQ ID NO: 562):
[0478] R₀-R₁-R₂-R₃-R₄-R₅-R₆-R₇-R₈-R₉-R₁₀-R₁₁-R₁₂-R₁₃-R₁₄-R₁₅-R₁₆-R₁₇-R₁₈-R₁₉-R₂₀-R₂₁-R₂₂-R₂₃-R₂₄-R₂₅-R₂₆-R₂₇-R₂₈-R₂₉-R₃₀-R₃₁-R₃₂-R₃₃-R₃₄-R₃₅-R₃₆-R₃₇-R₃₈-R₃₉-R₄₀-R₄₁-R₄₂-R₄₃-R₄₄-R₄₅-R₄₆-[R₄₇]ₓ-R₄₈-R₄₉-R₅₀-R₅₁-R₅₂-R₅₃-R₅₄-R₅₅-R₅₆-R₅₇-R₅₈-R₅₉-R₆₀-R₆₁-R₆₂-R₆₃-R₆₄-R₆₅-R₆₆-R₆₇-R₆₈-R₆₉-R₇₀-R₇₁-R₇₂, wherein R is a ribonucleotide residue and the consensus for Ala is: R₀=absent; R₁₄, R₅₇=are independently A or absent; R₂₆=A, C, G or absent; R₅, R₆, R₁₅, R₁₆, R₂₁, R₃₀, R₃₁, R₃₂, R₃₄, R₃₇, R₄₁, R₄₂, R₄₃, R₄₄, R₄₅, R₄₈, R₄₉, R₅₀, R₅₈, R₅₉, R₆₃, R₆₄, R₆₆, R₆₇=are independently N or absent; R₁, R₃₅, R₆₅=are independently A, C, U or absent; R₁, R₉, R₂₀, R₃₈, R₄₀, R₅₁, R₅₂, R₅₆=are independently A, G or absent; R₇, R₂₂, R₂₅, R₂₇, R₂₉, R₄₆, R₅₃, R₇₂=are independently A, G, U or absent; R₂₄, R₆₉=are independently A, U or absent; R₇₀, R₇₁=are independently C or absent; R₃, R₄=are independently C, G or absent; R₁₂, R₃₃, R₃₆, R₆₂, R₆₈=are independently C, G, U or absent; R₁₃, R₁₇, R₂₈, R₃₉, R₅₅, R₆₀, R₆₁=are independently C, U or absent; R₁₀, R₁₉, R₂₃=are independently G or absent; R₂=G, U or absent; R₈, R₁₈, R₅₄=are independently U or absent; [R₄₇]ₓ=N or absent; wherein, e.g., x=1-271 (e.g., x=1-250, x=1-225, x=1-200, x=1-175, x=1-150, x=1-125, x=1-100, x=1-75, x=1-50, x=1-40, x=1-30, x=1-29, x=1-28, x=1-27, x=1-26, x=1-25, x=1-24, x=1-23, x=1-22, x=1-21, x=1-20, x=1-19, x=1-18, x=1-17, x=1-16, x=1-15, x=1-14, x=1-13, x=1-12, x=1-11, x=1-10, x=10-271, x=20-271, x=30-271, x=40-271, x=50-271, x=60-271, x=70-271, x=80-271, x=100-271, x=125-271, x=150-271, x=175-271, x=200-271, x=225-271, x=1, x=2, x=3, x=4, x=5, x=6, x=7, x=8, x=9, x=10, x=11, x=12, x=13, x=14, x=15, x=16, x=17, x=18, x=19, x=20, x=21, x=22, x=23, x=24, x=25, x=26, x=27, x=28, x=29, x=30, x=40, x=50, x=60, x=70, x=80, x=90, x=100, x=110, x=125, x=150, x=175, x=200, x=225, x=250, or x=271), provided that the TREM has one or both of the following properties: no more than 15% of the residues are N; or no more than 20 residues are absent.

[0479] 350. The TREM of embodiment 349, wherein the TREM comprises a non-naturally occurring modification present at a nucleotide position within one of the [ASt Domain1], [DH Domain], [ACH Domain], [VL Domain], [TH Domain], or [ASt Domain2].

[0480] 351. The TREM of embodiment 350, wherein the non-naturally occurring modification is selected from a 2′-O-methyl (2-OMe), 2′-halo (e.g., 2′F or 2′Cl), 2′-O-methoxyethyl (2′MOE), 2′deoxy, or phosphorothioate modification.

[0481] 352. The TREM of any one of the preceding embodiments, wherein the TREM comprises the sequence of Formula II_{ALA} (SEQ ID NO: 563),
[0482] R₀-R₁-R₂-R₃-R₄-R₅-R₆-R₇-R₈-R₉-R₁₀-R₁₁-R₁₂-R₁₃-R₁₄-R₁₅-R₁₆-R₁₇-R₁₈-R₁₉-R₂₀-R₂₁-R₂₂-R₂₃-R₂₄-R₂₅-R₂₆-R₂₇-R₂₈-R₂₉-R₃₀-R₃₁-R₃₂-R₃₃-R₃₄-R₃₅-R₃₆-R₃₇-R₃₈-R₃₉-R₄₀-R₄₁-R₄₂-R₄₃-R₄₄-R₄₅-R₄₆-[R₄₇]ₓ-R₄₈-R₄₉-R₅₀-R₅₁-R₅₂-R₅₃-R₅₄-R₅₅-R₅₆-R₅₇-R₅₈-R₅₉-R₆₀-R₆₁-R₆₂-R₆₃-R₆₄-R₆₅-R₆₆-R₆₇-R₆₈-R₆₉-R₇₀-R₇₁-R₇₂ wherein R is a ribonucleotide residue and the consensus for Ala is:
[0483] R₀, R₁₈=are absent;
[0484] R₁₄, R₂₄, R₅₇=are independently A or absent;
[0485] R₁₅, R₂₆, R₆₄=are independently A, C, G or absent;
[0486] R₁₆, R₃₁, R₅₀, R₅₉=are independently N or absent;
[0487] R₁₁, R₃₂, R₃₇, R₄₁, R₄₃, R₄₅, R₄₉, R₆₅, R₆₆=are independently A, C, U or absent;
[0488] R₁, R₅, R₉, R₂₅, R₂₇, R₃₈, R₄₀, R₄₆, R₅₁, R₅₆=are independently A, G or absent;
[0489] R₇, R₂₂, R₂₉, R₄₂, R₄₄, R₅₃, R₆₃, R₇₂=are independently A, G, U or absent;
[0490] R₆, R₃₅, R₆₉=are independently A, U or absent;
[0491] R₅₅, R₆₀, R₇₀, R₇₁=are independently C or absent;
[0492] R₃=C, G or absent;
[0493] R₁₂, R₃₆, R₄₈=are independently C, G, U or absent;
[0494] R₁₃, R₁₇, R₂₈, R₃₀, R₃₄, R₃₉, R₅₅, R₆₁, R₆₂, R₆₇, R₆₈=are independently C, U or absent;
[0495] R₄, R₁₀, R₁₉, R₂₀, R₂₃, R₅₂=are independently G or absent;
[0496] R₂, R₈, R₃₃=are independently G, U or absent;
[0497] R₂₁, R₅₄=are independently U or absent;
[0498] [R₄₇]ₓ=N or absent;
[0499] wherein, e.g., x=1-271 (e.g., x=1-250, x=1-225, x=1-200, x=1-175, x=1-150, x=1-125, x=1-100, x=1-75, x=1-50, x=1-40, x=1-30, x=1-29, x=1-28, x=1-27, x=1-26, x=1-25, x=1-24, x=1-23, x=1-22, x=1-21, x=1-20, x=1-19, x=1-18, x=1-17, x=1-16, x=1-15, x=1-14, x=1-13, x=1-12, x=1-11, x=1-10, x=10-271, x=20-271, x=30-271, x=40-271, x=50-271, x=60-271, x=70-271, x=80-271, x=100-271, x=125-271, x=150-271, x=175-271, x=200-271, x=225-271, x=1, x=2, x=3, x=4, x=5, x=6, x=7, x=8, x=9, x=10, x=11, x=12, x=13, x=14, x=15, x=16, x=17, x=18, x=19, x=20, x=21, x=22, x=23, x=24, x=25, x=26, x=27, x=28, x=29, x=30, x=40, x=50, x=60, x=70, x=80, x=90, x=100, x=110, x=125, x=150, x=175, x=200, x=225, x=250, or x=271), provided that the TREM has one or both of the following properties: no more than 15% of the residues are N; or no more than 20 residues are absent.

[0500] 353. The TREM of embodiment 352, wherein the TREM comprises a non-naturally occurring modification present at a nucleotide position within one of the [ASt Domain1], [DH Domain], [ACH Domain], [VL Domain], [TH Domain], or [ASt Domain2].

[0501] 354. The TREM of embodiment 353, wherein the non-naturally occurring modification is selected from a 2′-O-methyl (2-OMe), 2′-halo (e.g., 2′F or 2′Cl), 2′-O-methoxyethyl (2′MOE), 2′deoxy, or phosphorothioate modification.

[0502] 355. The TREM of any one of the preceding embodiments, wherein the TREM comprises the sequence of Formula III_{ALA} (SEQ ID NO: 564),
[0503] R₀-R₁-R₂-R₃-R₄-R₅-R₆-R₇-R₈-R₉-R₁₀-R₁₁-R₁₂-R₁₃-R₁₄-R₁₅-R₁₆-R₁₇-R₁₈-R₁₉-R₂₀-R₂₁-R₂₂-R₂₃-R₂₄-R₂₅-R₂₆-R₂₇-R₂₈-R₂₉-R₃₀-R₃₁-R₃₂-R₃₃-R₃₄-R₃₅-R₃₆-R₃₇-R₃₈-R₃₉-R₄₀-R₄₁-R₄₂-R₄₃-R₄₄-R₄₅-R₄₆-[R₄₇]ₓ-R₄₈-R₄₉-R₅₀-R₅₁-R₅₂-R₅₃-R₅₄-R₅₅-R₅₆-R₅₇-R₅₈-R₅₉-R₆₀-R₆₁-R₆₂-R₆₃-R₆₄-R₆₅-R₆₆-R₆₇-R₆₈-R₆₉-R₇₀-R₇₁-R₇₂

[0504] wherein R is a ribonucleotide residue and the consensus for Ala is:
[0505] R₀, R₁₈=are absent;
[0506] R₁₄, R₂₄, R₅₇, R₇₂=are independently A or absent;
[0507] R₁₅, R₂₆, R₆₄=are independently A, C, G or absent;
[0508] R₁₆, R₃₁, R₅₀=are independently N or absent;
[0509] R₁₁, R₃₂, R₃₇, R₄₁, R₄₃, R₄₅, R₄₉, R₆₅, R₆₆=are independently A, C, U or absent;
[0510] R₅, R₉, R₂₅, R₂₇, R₃₈, R₄₀, R₄₆, R₅₁, R₅₆=are independently A, G or absent;
[0511] R₇, R₂₂, R₂₉, R₄₂, R₄₄, R₅₃, R₆₃=are independently A, G, U or absent;
[0512] R₆, R₃₅=are independently A, U or absent;
[0513] R₅₅, R₆₀, R₆₁, R₇₀, R₇₁=are independently C or absent;
[0514] R₁₂, R₄₈, R₅₉=are independently C, G, U or absent;
[0515] R₁₃, R₁₇, R₂₈, R₃₀, R₃₄, R₃₉, R₅₈, R₆₂, R₆₇, R₆₈=are independently C, U or absent;
[0516] R₁, R₂, R₃, R₄, R₁₀, R₁₉, R₂₀, R₂₃, R₅₂=are independently G or absent;
[0517] R₃₃, R₃₆=are independently G, U or absent;
[0518] R₈, R₂₁, R₅₄, R₆₉=are independently U or absent;
[0519] [R₄₇]ₓ=N or absent;
[0520] wherein, e.g., x=1-271 (e.g., x=1-250, x=1-225, x=1-200, x=1-175, x=1-150, x=1-125, x=1-100, x=1-75, x=1-50, x=1-40, x=1-30, x=1-29, x=1-28, x=1-27, x=1-26, x=1-25, x=1-24, x=1-23, x=1-22, x=1-21, x=1-20, x=1-19, x=1-18, x=1-17, x=1-16, x=1-15, x=1-14, x=1-13, x=1-12, x=1-11, x=1-10, x=10-271, x=20-271, x=30-271, x=40-271, x=50-271, x=60-271, x=70-271, x=80-271, x=100-271, x=125-271, x=150-271, x=175-271, x=200-271, x=225-271, x=1, x=2, x=3, x=4, x=5, x=6, x=7, x=8, x=9, x=10, x=11, x=12, x=13, x=14, x=15, x=16, x=17, x=18, x=19, x=20, x=21, x=22, x=23, x=24, x=25, x=26, x=27, x=28, x=29, x=30, x=40, x=50, x=60, x=70, x=80, x=90, x=100, x=110, x=125, x=150, x=175, x=200, x=225, x=250, or x=271), provided that the TREM has one or both of the following properties: no more than 15% of the residues are N; or no more than 20 residues are absent.

[0521] 356. The TREM of embodiment 355, wherein the TREM comprises a non-naturally occurring modification present at a nucleotide position within one of the [ASt Domain1], [DH Domain], [ACH Domain], [VL Domain], [TH Domain], or [ASt Domain2].

[0522] 357. The TREM of embodiment 356, wherein the non-naturally occurring modification is selected from a 2′-O-methyl (2-OMe), 2′-halo (e.g., 2′F or 2′Cl), 2′-O-methoxyethyl (2′MOE), 2′deoxy, or phosphorothioate modification.

[0523] 358. The TREM of any one of the preceding embodiments, wherein the TREM comprises the sequence of Formula I ARG (SEQ ID NO: 565),
[0524] R₀-R₁-R₂-R₃-R₄-R₅-R₆-R₇-R₈-R₉-R₁₀-R₁₁-R₁₂-R₁₃-R₁₄-R₁₅-R₁₆-R₁₇-R₁₈-R₁₉-R₂₀-R₂₁-R₂₂-R₂₃-R₂₄-R₂₅-R₂₆-R₂₇-R₂₈-R₂₉-R₃₀-R₃₁-R₃₂-R₃₃-R₃₄-R₃₅-R₃₆-R₃₇-R₃₈-R₃₉-R₄₀-R₄₁-R₄₂-R₄₃-R₄₄-R₄₅-R₄₆-[R₄₇]ₓ-R₄₈-R₄₉-R₅₀-R₅₁-R₅₂-R₅₃-R₅₄-R₅₅-R₅₆-R₅₇-R₅₈-R₅₉-R₆₀-R₆₁-R₆₂-R₆₃-R₆₄-R₆₅-R₆₆-R₆₇-R₆₈-R₆₉-R₇₀-R₇₁-R₇₂

[0525] wherein R is a ribonucleotide residue and the consensus for Arg is:
[0526] R₅₇=A or absent;
[0527] R₀, R₂₇=are independently A, C, G or absent;
[0528] R₁, R₂, R₃, R₄, R₅, R₆, R₇, R₁₁, R₁₂, R₁₆, R₂₁, R₂₂, R₂₃, R₂₅, R₂₆, R₂₉, R₃₀, R₃₁, R₃₂, R₃₃, R₃₄, R₃₇, R₄₂, R₄₄, R₄₅,
[0529] R₄₆, R₄₈, R₄₉, R₅₀, R₅₁, R₅₈, R₆₂, R₆₃, R₆₄, R₆₅, R₆₆, R₆₇, R₆₈, R₆₉, R₇₀, R₇₁=are independently N or absent;
[0530] R₁₃, R₁₇, R₄₁=are independently A, C, U or absent;
[0531] R₁₉, R₂₀, R₂₄, R₄₀, R₅₆=are independently A, G or absent;
[0532] R₁₄, R₁₅, R₇₂=are independently A, G, U or absent;
[0533] R₁₈=A, U or absent;
[0534] R₃₈=C or absent;
[0535] R₃₅, R₄₃, R₆₁=are independently C, G, U or absent;
[0536] R₂₈, R₅₅, R₅₉, R₆₀=are independently C, U or absent;
[0537] R₀, R₁₀, R₅₂=are independently G or absent;
[0538] R₈, R₃₉=are independently G, U or absent;
[0539] R₃₆, R₅₃, R₅₄=are independently U or absent;
[0540] [R₄₇]ₓ=N or absent;
[0541] wherein, e.g., x=1-271 (e.g., x=1-250, x=1-225, x=1-200, x=1-175, x=1-150, x=1-125, x=1-100, x=1-75, x=1-50, x=1-40, x=1-30, x=1-29, x=1-28, x=1-27, x=1-26, x=1-25, x=1-24, x=1-23, x=1-22, x=1-21, x=1-20, x=1-19, x=1-18, x=1-17, x=1-16, x=1-15, x=1-14, x=1-13, x=1-12, x=1-11, x=1-10, x=10-271, x=20-271, x=30-271, x=40-271, x=50-271, x=60-271, x=70-271, x=80-271, x=100-271, x=125-271, x=150-271, x=175-271, x=200-271, x=225-271, x=1, x=2, x=3, x=4, x=5, x=6, x=7, x=8, x=9, x=10, x=11, x=12, x=13, x=14, x=15, x=16, x=17, x=18, x=19, x=20, x=21, x=22, x=23, x=24, x=25, x=26, x=27, x=28, x=29, x=30, x=40, x=50, x=60, x=70, x=80, x=90, x=100, x=110, x=125, x=150, x=175, x=200, x=225, x=250, or x=271), provided that the TREM has one or both of the following properties: no more than 15% of the residues are N; or no more than 20 residues are absent.

[0542] 359. The TREM of embodiment 358, wherein the TREM comprises a non-naturally occurring modification present at a nucleotide position within one of the [ASt Domain1], [DH Domain], [ACH Domain], [VL Domain], [TH Domain], or [ASt Domain2].

[0543] 360. The TREM of embodiment 359, wherein the non-naturally occurring modification is selected from a 2′-O-methyl (2-OMe), 2′-halo (e.g., 2′F or 2′Cl), 2′-O-methoxyethyl (2′MOE), 2′deoxy, or phosphorothioate modification.

[0544] 361. The TREM of any one of the preceding embodiments, wherein the TREM comprises the sequence of Formula II ARG (SEQ ID NO: 566),
[0545] R₀-R₁-R₂-R₃-R₄-R₅-R₆-R₇-R₈-R₉-R₁₀-R₁₁-R₁₂-R₁₃-R₁₄-R₁₅-R₁₆-R₁₇-R₁₈-R₁₉-R₂₀-R₂₁-R₂₂-R₂₃-R₂₄-R₂₅-R₂₆-R₂₇-R₂₈-R₂₉-R₃₀-R₃₁-R₃₂-R₃₃-R₃₄-R₃₅-R₃₆-R₃₇-R₃₈-R₃₉-R₄₀-R₄₁-R₄₂-R₄₃-R₄₄-R₄₅-R₄₆-[R₄₇]ₓ-R₄₈-R₄₉-R₅₀-R₅₁-R₅₂-R₅₃-R₅₄-R₅₅-R₅₆-R₅₇-R₅₈-R₅₉-R₆₀-R₆₁-R₆₂-R₆₃-R₆₄-R₆₅-R₆₆-R₆₇-R₆₈-R₆₉-R₇₀-R₇₁-R₇₂
[0546] wherein R is a ribonucleotide residue and the consensus for Arg is:
[0547] R₁₈=absent;
[0548] R₂₄, R₅₇=are independently A or absent;
[0549] R₄₁=A, C or absent;
[0550] R₃, R₇, R₃₄, R₅₀=are independently A, C, G or absent;
[0551] R₂, R₅, R₆, R₁₂, R₂₆, R₃₂, R₃₇, R₄₄, R₅₈, R₆₆, R₆₇, R₆₈, R₇₀=are independently N or absent;
[0552] R₄₉, R₇₁=are independently A, C, U or absent;
[0553] R₁, R₁₅, R₁₉, R₂₅, R₂₇, R₄₀, R₄₅, R₄₆, R₅₆, R₇₂=are independently A, G or absent;
[0554] R₁₄, R₂₉, R₆₃=are independently A, G, U or absent;
[0555] R₁₆, R₂₁=are independently A, U or absent;
[0556] R₃₈, R₆₁=are independently C or absent;
[0557] R₃₃, R₄₈=are independently C, G or absent;
[0558] R₄, R₉, R₁₁, R₄₃, R₆₂, R₆₄, R₆₉=are independently C, G, U or absent;
[0559] R₁₃, R₂₂, R₂₈, R₃₀, R₃₁, R₃₅, R₅₅, R₆₀, R₆₅=are independently C, U or absent;
[0560] R₀, R₁₀, R₂₀, R₂₃, R₅₁, R₅₂=are independently G or absent;
[0561] R₈, R₃₉, R₄₂=are independently G, U or absent;
[0562] R₁₇, R₃₆, R₅₃, R₅₄, R₅₉=are independently U or absent;
[0563] [R₄₇]ₓ=N or absent;
[0564] wherein, e.g., x=1-271 (e.g., x=1-250, x=1-225, x=1-200, x=1-175, x=1-150, x=1-125, x=1-100, x=1-75, x=1-50, x=1-40, x=1-30, x=1-29, x=1-28, x=1-27, x=1-26, x=1-25, x=1-24, x=1-23, x=1-22, x=1-21, x=1-20, x=1-19, x=1-18, x=1-17, x=1-16, x=1-15, x=1-14, x=1-13, x=1-12, x=1-11, x=1-10, x=10-271, x=20-271, x=30-271, x=40-271, x=50-271, x=60-271, x=70-271, x=80-271, x=100-271, x=125-271, x=150-271, x=175-271, x=200-271, x=225-271, x=1, x=2, x=3, x=4, x=5, x=6, x=7, x=8, x=9, x=10, x=11, x=12, x=13, x=14, x=15, x=16, x=17, x=18, x=19, x=20, x=21, x=22, x=23, x=24, x=25, x=26, x=27, x=28, x=29, x=30, x=40, x=50, x=60, x=70, x=80, x=90, x=100, x=110, x=125, x=150, x=175, x=200, x=225, x=250, or x=271), provided that the TREM has one or both of the following properties: no more than 15% of the residues are N; or no more than 20 residues are absent.

[0565] 362. The TREM of embodiment 361, wherein the TREM comprises a non-naturally occurring modification present at a nucleotide position within one of the [ASt Domain1], [DH Domain], [ACH Domain], [VL Domain], [TH Domain], or [ASt Domain2].

[0566] 363. The TREM of embodiment 362, wherein the non-naturally occurring modification is selected from a 2′-O-methyl (2-OMe), 2′-halo (e.g., 2′F or 2′Cl), 2′-O-methoxyethyl (2′MOE), 2′deoxy, or phosphorothioate modification.

[0567] 364. The TREM of any one of the preceding embodiments, wherein the TREM comprises the sequence of Formula III ARG (SEQ ID NO: 567),
[0568] R₀-R₁-R₂-R₃-R₄-R₅-R₆-R₇-R₈-R₉-R₁₀-R₁₁-R₁₂-R₁₃-R₁₄-R₁₅-R₁₆-R₁₇-R₁₈-R₁₉-R₂₀-R₂₁-R₂₂-R₂₃-R₂₄-R₂₅-R₂₆-R₂₇-R₂₈-R₂₉-R₃₀-R₃₁-R₃₂-R₃₃-R₃₄-R₃₅-R₃₆-R₃₇-R₃₈-R₃₉-R₄₀-R₄₁-R₄₂-R₄₃-R₄₄-R₄₅-R₄₆-[R₄₇]ₓ-R₄₈-R₄₉-R₅₀-R₅₁-R₅₂-R₅₃-R₅₄-R₅₅-R₅₆-R₅₇-R₅₈-R₅₉-R₆₀-R₆₁-R₆₂-R₆₃-R₆₄-R₆₅-R₆₆-R₆₇-R₆₈-R₆₉-R₇₀-R₇₁-R₇₂

[0569] wherein R is a ribonucleotide residue and the consensus for Arg is:
[0570] R₁₈=is absent;
[0571] R₁₅, R₂₁, R₂₄, R₄₁, R₅₇=are independently A or absent;
[0572] R₃₄, R₄₄=are independently A, C or absent;
[0573] R₃, R₅, R₅₅=are independently A, C, G or absent;
[0574] R₂, R₆, R₆₆, R₇₀=are independently N or absent;
[0575] R₃₇, R₄₉=are independently A, C, U or absent;
[0576] R₁, R₂₅, R₂₉, R₄₀, R₄₅, R₄₆, R₅₀=are independently A, G or absent;
[0577] R₁₄, R₆₃, R₆₈=are independently A, G, U or absent;
[0578] R₁₆=A, U or absent;
[0579] R₃₈, R₆₁=are independently C or absent;
[0580] R₇, R₁₁, R₁₂, R₂₆, R₄₈=are independently C, G or absent;
[0581] R₆₄, R₆₇, R₆₉=are independently C, G, U or absent;
[0582] R₄, R₁₃, R₂₂, R₂₈, R₃₀, R₃₁, R₃₅, R₄₃, R₅₅, R₆₀, R₆₂, R₆₅, R₇₁=are independently C, U or absent;
[0583] R₀, R₁₀, R₁₉, R₂₀, R₂₃, R₂₇, R₃₃, R₅₁, R₅₂, R₅₆, R₇₂=are independently G or absent;
[0584] R₈, R₉, R₃₂, R₃₉, R₄₂=are independently G, U or absent;
[0585] R₁₇, R₃₆, R₅₃, R₅₄, R₅₉=are independently U or absent;
[0586] [R₄₇]ₓ=N or absent;
[0587] wherein, e.g., x=1-271 (e.g., x=1-250, x=1-225, x=1-200, x=1-175, x=1-150, x=1-125, x=1-100, x=1-75, x=1-50, x=1-40, x=1-30, x=1-29, x=1-28, x=1-27, x=1-26, x=1-25, x=1-24, x=1-23, x=1-22, x=1-21, x=1-20, x=1-19, x=1-18, x=1-17, x=1-16, x=1-15, x=1-14, x=1-13, x=1-12, x=1-11, x=1-10, x=10-271, x=20-271, x=30-271, x=40-271, x=50-271, x=60-271, x=70-271, x=80-271, x=100-271, x=125-271, x=150-271, x=175-271, x=200-271, x=225-271, x=1, x=2, x=3, x=4, x=5, x=6, x=7, x=8, x=9, x=10, x=11, x=12, x=13, x=14, x=15, x=16, x=17, x=18, x=19, x=20, x=21, x=22, x=23, x=24, x=25, x=26, x=27, x=28, x=29, x=30, x=40, x=50, x=60, x=70, x=80, x=90, x=100, x=110, x=125, x=150, x=175, x=200, x=225, x=250, or x=271), provided that the TREM has one or both of the following properties: no more than 15% of the residues are N; or no more than 20 residues are absent.

[0588] 365. The TREM of embodiment 364, wherein the TREM comprises a non-naturally occurring modification present at a nucleotide position within one of the [ASt Domain1], [DH Domain], [ACH Domain], [VL Domain], [TH Domain], or [ASt Domain2].

[0589] 366. The TREM of embodiment 365, wherein the non-naturally occurring modification is selected from a 2′-O-methyl (2-OMe), 2′-halo (e.g., 2′F or 2′Cl), 2′-O-methoxyethyl (2′MOE), 2′deoxy, or phosphorothioate modification.

[0590] 367. The TREM of any one of the preceding embodiments, wherein the TREM comprises the sequence of Formula I ASN (SEQ ID NO: 568),
[0591] R₀-R₁-R₂-R₃-R₄-R₅-R₆-R₇-R₈-R₉-R₁₀-R₁₁-R₁₂-R₁₃-R₁₄-R₁₅-R₁₆-R₁₇-R₁₈-R₁₉-R₂₀-R₂₁-R₂₂-R₂₃-R₂₄-R₂₅-R₂₆-R₂₇-R₂₈-R₂₉-R₃₀-R₃₁-R₃₂-R₃₃-R₃₄-R₃₅-R₃₆-R₃₇-R₃₈-R₃₉-R₄₀-R₄₁-R₄₂-R₄₃-R₄₄-R₄₅-R₄₆-[R₄₇]ₓ-R₄₈-R₄₉-R₅₀-R₅₁-R₅₂-R₅₃-R₅₄-R₅₅-R₅₆-R₅₇-R₅₈-R₅₉-R₆₀-R₆₁-R₆₂-R₆₃-R₆₄-R₆₅-R₆₆-R₆₇-R₆₈-R₆₉-R₇₀-R₇₁-R₇₂

[0592] wherein R is a ribonucleotide residue and the consensus for Asn is:
[0593] R₀, R₁₈=are absent;
[0594] R₄₁=A or absent;
[0595] R₁₄, R₄₈, R₅₆=are independently A, C, G or absent;
[0596] R₂, R₄, R₅, R₆, R₁₂, R₁₇, R₂₆, R₂₉, R₃₀, R₃₁, R₄₄, R₄₅, R₄₆, R₄₉, R₅₀, R₅₈, R₆₂, R₆₃, R₆₅, R₆₆, R₆₇, R₆₈, R₇₀, R₇₁=are independently N or absent;
[0597] R₁₁, R₁₃, R₂₂, R₄₂, R₅₅, R₅₉=are independently A, C, U or absent;
[0598] R₉, R₁₅, R₂₄, R₂₇, R₃₄, R₃₇, R₅₁, R₇₂=are independently A, G or absent;
[0599] R₁, R₇, R₂₅, R₆₉=are independently A, G, U or absent;
[0600] R₄₀, R₅₇=are independently A, U or absent;
[0601] R₆₀=C or absent;
[0602] R₃₃=C, G or absent;
[0603] R₂₁, R₃₂, R₄₃, R₆₄=are independently C, G, U or absent;
[0604] R₃, R₁₆, R₂₈, R₃₅, R₃₆, R₆₁=are independently C, U or absent;
[0605] R₁₀, R₁₉, R₂₀, R₅₂=are independently G or absent;
[0606] R₅₄=G, U or absent;
[0607] R₈, R₂₃, R₃₈, R₃₉, R₅₃=are independently U or absent;
[0608] [R₄₇]ₓ=N or absent;
[0609] wherein, e.g., x=1-271 (e.g., x=1-250, x=1-225, x=1-200, x=1-175, x=1-150, x=1-125, x=1-100, x=1-75, x=1-50, x=1-40, x=1-30, x=1-29, x=1-28, x=1-27, x=1-26, x=1-25, x=1-24, x=1-23, x=1-22, x=1-21, x=1-20, x=1-19, x=1-18, x=1-17, x=1-16, x=1-15, x=1-14, x=1-13, x=1-12, x=1-11, x=1-10, x=10-271, x=20-271, x=30-271, x=40-271, x=50-271, x=60-271, x=70-271, x=80-271, x=100-271, x=125-271, x=150-271, x=175-271, x=200-271, x=225-271, x=1, x=2, x=3, x=4, x=5, x=6, x=7, x=8, x=9, x=10, x=11, x=12, x=13, x=14, x=15, x=16, x=17, x=18, x=19, x=20, x=21, x=22, x=23, x=24, x=25, x=26, x=27, x=28, x=29, x=30, x=40, x=50, x=60, x=70, x=80, x=90, x=100, x=110, x=125, x=150, x=175, x=200, x=225, x=250, or x=271), provided that the TREM has one or both of the following properties: no more than 15% of the residues are N; or no more than 20 residues are absent.

[0610] 368. The TREM of embodiment 367, wherein the TREM comprises a non-naturally occurring modification present at a nucleotide position within one of the [ASt Domain1], [DH Domain], [ACH Domain], [VL Domain], [TH Domain], or [ASt Domain2].

[0611] 369. The TREM of embodiment 368, wherein the non-naturally occurring modification is selected from a 2′-O-methyl (2-OMe), 2′-halo (e.g., 2′F or 2′Cl), 2′-O-methoxyethyl (2′MOE), 2′deoxy, or phosphorothioate modification.

[0612] 370. The TREM of any one of the preceding embodiments, wherein the TREM comprises the sequence of Formula II ASN (SEQ ID NO: 569),
[0613] R₀-R₁-R₂-R₃-R₄-R₅-R₆-R₇-R₈-R₉-R₁₀-R₁₁-R₁₂-R₁₃-R₁₄-R₁₅-R₁₆-R₁₇-R₁₈-R₁₉-R₂₀-R₂₁-R₂₂-R₂₃-R₂₄-R₂₅-R₂₆-R₂₇-R₂₈-R₂₉-R₃₀-R₃₁-R₃₂-R₃₃-R₃₄-R₃₅-R₃₆-R₃₇-R₃₈-R₃₉-R₄₀-R₄₁-R₄₂-R₄₃-R₄₄-R₄₅-R₄₆-[R₄₇]ₓ-R₄₈-R₄₉-R₅₀-R₅₁-R₅₂-R₅₃-R₅₄-R₅₅-R₅₆-R₅₇-R₅₈-R₅₉-R₆₀-R₆₁-R₆₂-R₆₃-R₆₄-R₆₅-R₆₆-R₆₇-R₆₈-R₆₉-R₇₀-R₇₁-R₇₂
[0614] wherein R is a ribonucleotide residue and the consensus for Asn is:
[0615] R₀, R₁₈=are absent
[0616] R₂₄, R₄₁, R₄₆, R₆₂=are independently A or absent;
[0617] R₅₉=A, C or absent;
[0618] R₁₄, R₅₆, R₆₆=are independently A, C, G or absent;
[0619] R₁₇, R₂₉=are independently N or absent;
[0620] R₁₁, R₂₆, R₄₂, R₅₅=are independently A, C, U or absent;
[0621] R₁, R₉, R₁₂, R₁₅, R₂₅, R₃₄, R₃₇, R₄₈, R$1, R₆₇, R₆₈, R₆₉, R₇₀, R₇₂=are independently A, G or absent;
[0622] R₄₄, R₄₅, R₅₅=are independently A, G, U or absent;
[0623] R₄₀, R₅₇=are independently A, U or absent;
[0624] R₅, R₂₈, R₆₀=are independently C or absent;
[0625] R₃₃, R₆₅=are independently C, G or absent;
[0626] R₂₁, R₄₃, R₇₁=are independently C, G, U or absent;
[0627] R₃, R₆, R₁₃, R₂₂, R₃₂, R₃₅, R₃₆, R₆₁, R₆₃, R₆₄=are independently C, U or absent;
[0628] R₇, R₁₀, R₁₉, R₂₀, R₂₇, R₄₉, R₅₂=are independently G or absent;
[0629] R₅₄=G, U or absent;
[0630] R₂, R₄, R₈, R₁₆, R₂₃, R₃₀, R₃₁, R₃₈, R₃₉, R₅₀, R₅₃=are independently U or absent;
[0631] [R₄₇]ₓ=N or absent;
[0632] wherein, e.g., x=1-271 (e.g., x=1-250, x=1-225, x=1-200, x=1-175, x=1-150, x=1-125, x=1-100, x=1-75, x=1-50, x=1-40, x=1-30, x=1-29, x=1-28, x=1-27, x=1-26, x=1-25, x=1-24, x=1-23, x=1-22, x=1-21, x=1-20, x=1-19, x=1-18, x=1-17, x=1-16, x=1-15, x=1-14, x=1-13, x=1-12, x=1-11, x=1-10, x=10-271, x=20-271, x=30-271, x=40-271, x=50-271, x=60-271, x=70-271, x=80-271, x=100-271, x=125-271, x=150-271, x=175-271, x=200-271, x=225-271, x=1, x=2, x=3, x=4, x=5, x=6, x=7, x=8, x=9, x=10, x=11, x=12, x=13, x=14, x=15, x=16, x=17, x=18, x=19, x=20, x=21, x=22, x=23, x=24, x=25, x=26, x=27, x=28, x=29, x=30, x=40, x=50, x=60, x=70, x=80, x=90, x=100, x=110, x=125, x=150, x=175, x=200, x=225, x=250, or x=271), provided that the TREM has one or both of the following properties: no more than 15% of the residues are N; or no more than 20 residues are absent.

[0633] 371. The TREM of embodiment 370, wherein the TREM comprises a non-naturally occurring modification present at a nucleotide position within one of the [ASt Domain1], [DH Domain], [ACH Domain], [VL Domain], [TH Domain], or [ASt Domain2].

[0634] 372. The TREM of embodiment 371, wherein the non-naturally occurring modification is selected from a 2′-O-methyl (2-OMe), 2′-halo (e.g., 2′F or 2′Cl), 2′-O-methoxyethyl (2′MOE), 2′deoxy, or phosphorothioate modification.

[0635] 373. The TREM of any one of the preceding embodiments, wherein the TREM comprises the sequence of Formula III ASN (SEQ ID NO: 570),
[0636] R₀-R₁-R₂-R₃-R₄-R₅-R₆-R₇-R₈-R₉-R₁₀-R₁₁-R₁₂-R₁₃-R₁₄-R₁₅-R₁₆-R₁₇-R₁₈-R₁₉-R₂₀-R₂₁-R₂₂-R₂₃-R₂₄-R₂₅-R₂₆-R₂₇-R₂₈-R₂₉-R₃₀-R₃₁-R₃₂-R₃₃-R₃₄-R₃₅-R₃₆-R₃₇-R₃₈-R₃₉-R₄₀-R₄₁-R₄₂-R₄₃-R₄₄-R₄₅-R₄₆-[R₄₇]ₓ-R₄₈-R₄₉-R₅₀-R₅₁-R₅₂-R₅₃-R₅₄-R₅₅-R₅₆-R₅₇-R₅₈-R₅₉-R₆₀-R₆₁-R₆₂-R₆₃-R₆₄-R₆₅-R₆₆-R₆₇-R₆₈-R₆₉-R₇₀-R₇₁-R₇₂
[0637] wherein R is a ribonucleotide residue and the consensus for Asn is:
[0638] R₀, R₁₈=are absent
[0639] R₂₄, R₄₀, R₄₁, R₄₆, R₆₂=are independently A or absent;
[0640] R₅₉=A, C or absent;
[0641] R₁₄, R₅₆, R₆₆=are independently A, C, G or absent;
[0642] R₁₁, R₂₆, R₄₂, R₅₅=are independently A, C, U or absent;
[0643] R₁, R₉, R₁₂, R₁₅, R₃₄, R₃₇, R₄₈, R₅₁, R₆₇, R₆₈, R₆₉, R₇₀=are independently A, G or absent;
[0644] R₄₄, R₄₅, R₅₅=are independently A, G, U or absent;
[0645] R₅₇=A, U or absent;
[0646] R₅, R₂₈, R₆₀=are independently C or absent;
[0647] R₃₃, R₆₅=are independently C, G or absent;
[0648] R₁₇, R₂₁, R₂₉=are independently C, G, U or absent;
[0649] R₃, R₆, R₁₃, R₂₂, R₃₂, R₃₅, R₃₆, R₄₃, R₆₁, R₆₃, R₆₄, R₇₁=are independently C, U or absent;
[0650] R₇, R₁₀, R₁₉, R₂₀, R₂₅, R₂₇, R₄₉, R₅₂, R₇₂=are independently G or absent;
[0651] R₅₄=G, U or absent;
[0652] R₂, R₄, R₈, R₁₆, R₂₃, R₃₀, R₃₁, R₃₈, R₃₉, R so, R₅₃=are independently U or absent;
[0653] [R₄₇]ₓ=N or absent;
[0654] wherein, e.g., x=1-271 (e.g., x=1-250, x=1-225, x=1-200, x=1-175, x=1-150, x=1-125, x=1-100, x=1-75, x=1-50, x=1-40, x=1-30, x=1-29, x=1-28, x=1-27, x=1-26, x=1-25, x=1-24, x=1-23, x=1-22, x=1-21, x=1-20, x=1-19, x=1-18, x=1-17, x=1-16, x=1-15, x=1-14, x=1-13, x=1-12, x=1-11, x=1-10, x=10-271, x=20-271, x=30-271, x=40-271, x=50-271, x=60-271, x=70-271, x=80-271, x=100-271, x=125-271, x=150-271, x=175-271, x=200-271, x=225-271, x=1, x=2, x=3, x=4, x=5, x=6, x=7, x=8, x=9, x=10, x=11, x=12, x=13, x=14, x=15, x=16, x=17, x=18, x=19, x=20, x=21, x=22, x=23, x=24, x=25, x=26, x=27, x=28, x=29, x=30, x=40, x=50, x=60, x=70, x=80, x=90, x=100, x=110, x=125, x=150, x=175, x=200, x=225, x=250, or x=271), provided that the TREM has one or both of the following properties: no more than 15% of the residues are N; or no more than 20 residues are absent.

[0655] 374. The TREM of embodiment 373, wherein the TREM comprises a non-naturally occurring modification present at a nucleotide position within one of the [ASt Domain1], [DH Domain], [ACH Domain], [VL Domain], [TH Domain], or [ASt Domain2].

[0656] 375. The TREM of embodiment 374, wherein the non-naturally occurring modification is selected from a 2′-O-methyl (2-OMe), 2′-halo (e.g., 2′F or 2′Cl), 2′-O-methoxyethyl (2′MOE), 2′deoxy, or phosphorothioate modification.

[0657] 376. The TREM of any one of the preceding embodiments, wherein the TREM comprises the sequence of Formula I ASP (SEQ ID NO: 571),
[0658] R₀-R₁-R₂-R₃-R₄-R₅-R₆-R₇-R₈-R₉-R₁₀-R₁₁-R₁₂-R₁₃-R₁₄-R₁₅-R₁₆-R₁₇-R₁₈-R₁₉-R₂₀-R₂₁-R₂₂-R₂₃-R₂₄-R₂₅-R₂₆-R₂₇-R₂₈-R₂₉-R₃₀-R₃₁-R₃₂-R₃₃-R₃₄-R₃₅-R₃₆-R₃₇-R₃₈-R₃₉-R₄₀-R₄₁-R₄₂-R₄₃-R₄₄-R₄₅-R₄₆-[R₄₇]ₓ-R₄₈-R₄₉-R₅₀-R₅₁-R₅₂-R₅₃-R₅₄-R₅₅-R₅₆-R₅₇-R₅₈-R₅₉-R₆₀-R₆₁-R₆₂-R₆₃-R₆₄-R₆₅-R₆₆-R₆₇-R₆₈-R₆₉-R₇₀-R₇₁-R₇₂

[0659] wherein R is a ribonucleotide residue and the consensus for Asp is:
[0660] R₀=absent
[0661] R₂₄, R₇₁=are independently A, C or absent;
[0662] R₃₃, R₄₆=are independently A, C, G or absent;
[0663] R₂, R₃, R₄, R₅, R₆, R₁₂, R₁₆, R₂₂, R₂₆, R₂₉, R₃₁, R₃₂, R₄₄, R₄₈, R₄₉, R₅₈, R₆₃, R₆₄, R₆₆, R₆₇, R₆₈, R₆₉=are
[0664] independently N or absent;
[0665] R₁₃, R₂₁, R₃₄, R₄₁, R₅₇, R₆₅=are independently A, C, U or absent;
[0666] R₉, R₁₀, R₁₄, R₁₅, R₂₀, R₂₇, R₃₇, R₄₀, R$1, R₅₆, R₇₂=are independently A, G or absent;
[0667] R₇, R₂₅, R₄₂=are independently A, G, U or absent;
[0668] R₃₉=C or absent;
[0669] R₅₀, R₆₂=are independently C, G or absent;
[0670] R₃₀, R₄₃, R₄₅, R₅₅, R₇₀=are independently C, G, U or absent;
[0671] R₈, R₁₁, R₁₇, R₁₈, R₂₈, R₃₅, R₅₃, R₅₉, R₆₀, R₆₁=are independently C, U or absent;
[0672] R₁₉, R₅₂=are independently G or absent;
[0673] R₁=G, U or absent;
[0674] R₂₃, R₃₆, R₃₈, R₅₄=are independently U or absent;
[0675] [R₄₇]ₓ=N or absent;
[0676] wherein, e.g., x=1-271 (e.g., x=1-250, x=1-225, x=1-200, x=1-175, x=1-150, x=1-125, x=1-100, x=1-75, x=1-50, x=1-40, x=1-30, x=1-29, x=1-28, x=1-27, x=1-26, x=1-25, x=1-24, x=1-23, x=1-22, x=1-21, x=1-20, x=1-19, x=1-18, x=1-17, x=1-16, x=1-15, x=1-14, x=1-13, x=1-12, x=1-11, x=1-10, x=10-271, x=20-271, x=30-271, x=40-271, x=50-271, x=60-271, x=70-271, x=80-271, x=100-271, x=125-271, x=150-271, x=175-271, x=200-271, x=225-271, x=1, x=2, x=3, x=4, x=5, x=6, x=7, x=8, x=9, x=10, x=11, x=12, x=13, x=14, x=15, x=16, x=17, x=18, x=19, x=20, x=21, x=22, x=23, x=24, x=25, x=26, x=27, x=28, x=29, x=30, x=40, x=50, x=60, x=70, x=80, x=90, x=100, x=110, x=125, x=150, x=175, x=200, x=225, x=250, or x=271), provided that the TREM has one or both of the following properties: no more than 15% of the residues are N; or no more than 20 residues are absent.

[0677] 377. The TREM of embodiment 376, wherein the TREM comprises a non-naturally occurring modification present at a nucleotide position within one of the [ASt Domain1], [DH Domain], [ACH Domain], [VL Domain], [TH Domain], or [ASt Domain2].

[0678] 378. The TREM of embodiment 377, wherein the non-naturally occurring modification is selected from a 2′-O-methyl (2-OMe), 2′-halo (e.g., 2′F or 2′Cl), 2′-O-methoxyethyl (2′MOE), 2′deoxy, or phosphorothioate modification.

[0679] 379. The TREM of any one of the preceding embodiments, wherein the TREM comprises the sequence of Formula II ASP (SEQ ID NO: 572),
[0680] R₀-R₁-R₂-R₃-R₄-R₅-R₆-R₇-R₈-R₉-R₁₀-R₁₁-R₁₂-R₁₃-R₁₄-R₁₅-R₁₆-R₁₇-R₁₈-R₁₉-R₂₀-R₂₁-R₂₂-R₂₃-R₂₄-R₂₅-R₂₆-R₂₇-R₂₈-R₂₉-R₃₀-R₃₁-R₃₂-R₃₃-R₃₄-R₃₅-R₃₆-R₃₇-R₃₈-R₃₉-R₄₀-R₄₁-R₄₂-R₄₃-R₄₄-R₄₅-R₄₆-[R₄₇]ₓ-R₄₈-R₄₉-R₅₀-R₅₁-R₅₂-R₅₃-R₅₄-R₅₅-R₅₆-R₅₇-R₅₈-R₅₉-R₆₀-R₆₁-R₆₂-R₆₃-R₆₄-R₆₅-R₆₆-R₆₇-R₆₈-R₆₉-R₇₀-R₇₁-R₇₂

[0681] wherein R is a ribonucleotide residue and the consensus for Asp is:
[0682] R₀, R₁₇, R₁₈, R₂₃=are independently absent;
[0683] R₀, R₄₀=are independently A or absent;
[0684] R₂₄, R₇₁=are independently A, C or absent;
[0685] R₆₇, R₆₈=are independently A, C, G or absent;
[0686] R₂, R₆, R₆₆=are independently N or absent;
[0687] R₅₇, R₆₃=are independently A, C, U or absent;
[0688] R₁₀, R₁₄, R₂₇, R₃₃, R₃₇, R₄₄, R₄₆, R₅₁, R₅₆, R₆₄, R₇₂=are independently A, G or absent;
[0689] R₇, R₁₂, R₂₆, R₆₅=are independently A, U or absent;
[0690] R₃₉, R₆₁, R₆₂=are independently C or absent;
[0691] R₃, R₃₁, R₄₅, R₇₀=are independently C, G or absent;
[0692] R₄, R₅, R₂₉, R₄₃, R₅₅=are independently C, G, U or absent;
[0693] R₈, R₁₁, R₁₃, R₃₀, R₃₂, R₃₄, R₃₅, R₄₁, R₄₈, R₅₃, R₅₉, R₆₀=are independently C, U or absent;
[0694] R₁₅, R₁₉, R₂₀, R₂₅, R₄₂, R₅₀, R₅₂=are independently G or absent;
[0695] R₁, R₂₂, R₄₉, R₅₈, R₆₉=are independently G, U or absent;
[0696] R₁₆, R₂₁, R₂₈, R₃₆, R₃₈, R₅₄=are independently U or absent;
[0697] [R₄₇]ₓ=N or absent;
[0698] wherein, e.g., x=1-271 (e.g., x=1-250, x=1-225, x=1-200, x=1-175, x=1-150, x=1-125, x=1-100, x=1-75, x=1-50, x=1-40, x=1-30, x=1-29, x=1-28, x=1-27, x=1-26, x=1-25, x=1-24, x=1-23, x=1-22, x=1-21, x=1-20, x=1-19, x=1-18, x=1-17, x=1-16, x=1-15, x=1-14, x=1-13, x=1-12, x=1-11, x=1-10, x=10-271, x=20-271, x=30-271, x=40-271, x=50-271, x=60-271, x=70-271, x=80-271, x=100-271, x=125-271, x=150-271, x=175-271, x=200-271, x=225-271, x=1, x=2, x=3, x=4, x=5, x=6, x=7, x=8, x=9, x=10, x=11, x=12, x=13, x=14, x=15, x=16, x=17, x=18, x=19, x=20, x=21, x=22, x=23, x=24, x=25, x=26, x=27, x=28, x=29, x=30, x=40, x=50, x=60, x=70, x=80, x=90, x=100, x=110, x=125, x=150, x=175, x=200, x=225, x=250, or x=271), provided that the TREM has one or both of the following properties: no more than 15% of the residues are N; or no more than 20 residues are absent.

[0699] 380. The TREM of embodiment 379, wherein the TREM comprises a non-naturally occurring modification present at a nucleotide position within one of the [ASt Domain1], [DH Domain], [ACH Domain], [VL Domain], [TH Domain], or [ASt Domain2].

[0700] 381. The TREM of embodiment 380, wherein the non-naturally occurring modification is selected from a 2′-O-methyl (2-OMe), 2′-halo (e.g., 2′F or 2′Cl), 2′-O-methoxyethyl (2′MOE), 2′deoxy, or phosphorothioate modification.

[0701] 382. The TREM of any one of the preceding embodiments, wherein the TREM comprises the sequence of Formula III ASP (SEQ ID NO: 573),
[0702] R₀-R₁-R₂-R₃-R₄-R₅-R₆-R₇-R₈-R₉-R₁₀-R₁₁-R₁₂-R₁₃-R₁₄-R₁₅-R₁₆-R₁₇-R₁₈-R₁₉-R₂₀-R₂₁-R₂₂-R₂₃-R₂₄-R₂₅-R₂₆-R₂₇-R₂₈-R₂₉-R₃₀-R₃₁-R₃₂-R₃₃-R₃₄-R₃₅-R₃₆-R₃₇-R₃₈-R₃₉-R₄₀-R₄₁-R₄₂-R₄₃-R₄₄-R₄₅-R₄₆-[R₄₇]ₓ-R₄₈-R₄₉-R₅₀-R₅₁-R₅₂-R₅₃-R₅₄-R₅₅-R₅₆-R₅₇-R₅₈-R₅₉-R₆₀-R₆₁-R₆₂-R₆₃-R₆₄-R₆₅-R₆₆-R₆₇-R₆₈-R₆₉-R₇₀-R₇₁-R₇₂

[0703] wherein R is a ribonucleotide residue and the consensus for Asp is:
[0704] R₀, R₁₇, R₁₈, R₂₃=are absent
[0705] R₉, R₁₂, R₄₀, R₆₅, R₇₁=are independently A or absent;
[0706] R₂, R₂₄, R₅₇=are independently A, C or absent;
[0707] R₆, R₁₄, R₂₇, R₄₆, R₅₁, R₅₆, R₆₄, R₆₇, R₆₈=are independently A, G or absent;
[0708] R₃, R₃₁, R₃₅, R₃₉, R₆₁, R₆₂=are independently C or absent;
[0709] R₆₆=C, G or absent;
[0710] R₅, R₈, R₂₉, R₃₀, R₃₂, R₃₄, R₄₁, R₄₃, R₄₈, R₅₅, R₅₉, R₆₀, R₆₃=are independently C, U or absent;
[0711] R₁₀, R₁₅, R₁₉, R₂₀, R₂₅, R₃₃, R₃₇, R₄₂, R₄₄, R₄₅, R₄₉, R so, R $2, R₆₉, R₇₀, R₇₂=are independently G or absent;
[0712] R₂₂, R₅₅=are independently G, U or absent;
[0713] R₁, R₄, R₇, R₁₁, R₁₃, R₁₆, R₂₁, R₂₆, R₂₈, R₃₆, R₃₈, R₅₃, R₅₄=are independently U or absent;
[0714] [R₄₇]ₓ=N or absent;
[0715] wherein, e.g., x=1-271 (e.g., x=1-250, x=1-225, x=1-200, x=1-175, x=1-150, x=1-125, x=1-100, x=1-75, x=1-50, x=1-40, x=1-30, x=1-29, x=1-28, x=1-27, x=1-26, x=1-25, x=1-24, x=1-23, x=1-22, x=1-21, x=1-20, x=1-19, x=1-18, x=1-17, x=1-16, x=1-15, x=1-14, x=1-13, x=1-12, x=1-11, x=1-10, x=10-271, x=20-271, x=30-271, x=40-271, x=50-271, x=60-271, x=70-271, x=80-271, x=100-271, x=125-271, x=150-271, x=175-271, x=200-271, x=225-271, x=1, x=2, x=3, x=4, x=5, x=6, x=7, x=8, x=9, x=10, x=11, x=12, x=13, x=14, x=15, x=16, x=17, x=18, x=19, x=20, x=21, x=22, x=23, x=24, x=25, x=26, x=27, x=28, x=29, x=30, x=40, x=50, x=60, x=70, x=80, x=90, x=100, x=110, x=125, x=150, x=175, x=200, x=225, x=250, or x=271), provided that the TREM has one or both of the following properties: no more than 15% of the residues are N; or no more than 20 residues are absent.

[0716] 383. The TREM of embodiment 382, wherein the TREM comprises a non-naturally occurring modification present at a nucleotide position within one of the [ASt Domain1], [DH Domain], [ACH Domain], [VL Domain], [TH Domain], or [ASt Domain2].

[0717] 384. The TREM of embodiment 383, wherein the non-naturally occurring modification is selected from a 2′-O-methyl (2-OMe), 2′-halo (e.g., 2′F or 2′Cl), 2′-O-methoxyethyl (2′MOE), 2′deoxy, or phosphorothioate modification.

[0718] 385. The TREM of any one of the preceding embodiments, wherein:
[0719] (i) the TREM comprises the nucleotide sequence of SEQ ID NO: 701; and/or
[0720] (ii) the TREM differs from the nucleotide sequence of SEQ ID NO: 701 by no more than 1, 2, 3, 4, 5, 6, 7, 8, 9, or 10 nucleotides; and/or
[0721] (iii) the TREM comprises the sequence of TREM NO.: 80; and/or
[0722] (iv) the TREM differs from the sequence of TREM NO: 80 by no more than 1, 2, 3, 4, 5, 6, 7, 8, 9, or 10 non-naturally occurring modifications, e.g., a non-naturally occurring modification selected from a 2′-O-methyl (2-OMe), 2′-halo (e.g., 2′F or 2′Cl), 2′-O-methoxyethyl (2′MOE2′deoxy, or phosphorothioate modification.

[0723] 386. The TREM of any one of the preceding embodiments, wherein:
[0724] (i) the non-naturally occurring modification is present at a nucleotide position which corresponds to one or more of the nucleotides of SEQ ID NO: 701; and/or
[0725] (ii) the TREM comprises the nucleotide sequence of SEQ ID NO: 701.

[0726] 387. The TREM of any one of the preceding embodiment, having the sequence of SEQ ID NO: 701.

[0727] 388. The TREM of any one of the preceding embodiments, wherein:
[0728] (i) the TREM comprises the nucleotide sequence of SEQ ID NO: 2951; and/or
[0729] (ii) the TREM differs from the nucleotide sequence of SEQ ID NO: 2951 by no more than 1, 2, 3, 4, 5, 6, 7, 8, 9, or 10 nucleotides; and/or
[0730] (iii) the TREM comprises the sequence of TREM NO.: 2330; and/or
[0731] (iv) the TREM differs from the sequence of TREM NO: 2330 by no more than 1, 2, 3, 4, 5, 6, 7, 8, 9, or 10 non-naturally occurring modifications, e.g., a non-naturally occurring modification selected from a 2′-O-methyl (2-OMe), 2′-halo (e.g., 2′F or 2′Cl), 2′-O-methoxyethyl (2′MOE2′deoxy, or phosphorothioate modification.

[0732] 388. The TREM of any one of the preceding embodiments, wherein:
[0733] (i) the non-naturally occurring modification is present at a nucleotide position which corresponds to one or more of the nucleotides of SEQ ID NO: 2951; and/or
[0734] (ii) the TREM comprises the nucleotide sequence of SEQ ID NO: 2951.

[0735] 389. The TREM of any one of the preceding embodiment, having the sequence of SEQ ID NO: 2951.

[0736] 390. The TREM of any one of the preceding embodiments, wherein:
[0737] (i) the TREM comprises the nucleotide sequence of SEQ ID NO: 6047; and/or
[0738] (ii) the TREM differs from the nucleotide sequence of SEQ ID NO: 6047 by no more than 1, 2, 3, 4, 5, 6, 7, 8, 9, or 10 nucleotides; and/or
[0739] (iii) the TREM comprises the sequence of TREM NO.: 5426; and/or
[0740] (iv) the TREM differs from the sequence of TREM NO: 5426 by no more than 1, 2, 3, 4, 5, 6, 7, 8, 9, or 10 non-naturally occurring modifications, e.g., a non-naturally occurring modification selected from a 2′-O-methyl (2-OMe), 2′-halo (e.g., 2′F or 2′Cl), 2′-O-methoxyethyl (2′MOE2′deoxy, or phosphorothioate modification.

[0741] 391. The TREM of any one of the preceding embodiments, wherein:
[0742] (i) the non-naturally occurring modification is present at a nucleotide position which corresponds to one or more of the nucleotides of SEQ ID NO: 6047; and/or
[0743] (ii) the TREM comprises the nucleotide sequence of SEQ ID NO: 6047.

[0744] 392. The TREM of any one of the preceding embodiment, having the sequence of SEQ ID NO: 6047.

[0745] 393. The TREM of any one of the preceding embodiments, wherein:
[0746] (i) the TREM comprises the nucleotide sequence of SEQ ID NO: 9364; and/or
[0747] (ii) the TREM differs from the nucleotide sequence of SEQ ID NO: 9364 by no more than 1, 2, 3, 4, 5, 6, 7, 8, 9, or 10 nucleotides; and/or
[0748] (iii) the TREM comprises the sequence of TREM NO.: 8743; and/or
[0749] (iv) the TREM differs from the sequence of TREM NO: 8743 by no more than 1, 2, 3, 4, 5, 6, 7, 8, 9, or 10 non-naturally occurring modifications, e.g., a non-naturally occurring modification selected from a 2′-O-methyl (2-OMe), 2′-halo (e.g., 2′F or 2′Cl), 2′-O-methoxyethyl (2′MOE2′deoxy, or phosphorothioate modification.

[0750] 394. The TREM of any one of the preceding embodiments, wherein:
[0751] (i) the non-naturally occurring modification is present at a nucleotide position which corresponds to one or more of the nucleotides of SEQ ID NO: 9364; and/or
[0752] (ii) the TREM comprises the nucleotide sequence of SEQ ID NO: 9364.

[0753] 395. The TREM of any one of the preceding embodiment, having the sequence of SEQ ID NO: 9364.

[0754] 396. The TREM of any one of the preceding embodiments, wherein:
[0755] (i) the TREM comprises the nucleotide sequence of SEQ ID NO: 3795; and/or
[0756] (ii) the TREM differs from the nucleotide sequence of SEQ ID NO: 3795 by no more than 1, 2, 3, 4, 5, 6, 7, 8, 9, or 10 nucleotides; and/or
[0757] (iii) the TREM comprises the sequence of TREM NO.: 3174; and/or
[0758] (iv) the TREM differs from the sequence of TREM NO: 3174 by no more than 1, 2, 3, 4, 5, 6, 7, 8, 9, or 10 non-naturally occurring modifications, e.g., a non-naturally occurring modification selected from a 2′-O-methyl (2-OMe), 2′-halo (e.g., 2′F or 2′Cl), 2′-O-methoxyethyl (2′MOE2′deoxy, or phosphorothioate modification.

[0759] 397. The TREM of any one of the preceding embodiments, wherein:
[0760] (i) the non-naturally occurring modification is present at a nucleotide position which corresponds to one or more of the nucleotides of SEQ ID NO: 3795; and/or
[0761] (ii) the TREM comprises the nucleotide sequence of SEQ ID NO: 3795.

[0762] 398. The TREM of any one of the preceding embodiment, having the sequence of SEQ ID NO: 3795.

[0763] 399. The TREM of any one of the preceding embodiments, wherein:
[0764] (i) the TREM comprises the nucleotide sequence of SEQ ID NO: 8524; and/or
[0765] (ii) the TREM differs from the nucleotide sequence of SEQ ID NO: 8524 by no more than 1, 2, 3, 4, 5, 6, 7, 8, 9, or 10 nucleotides; and/or
[0766] (iii) the TREM comprises the sequence of TREM NO.: 7903; and/or
[0767] (iv) the TREM differs from the sequence of TREM NO: 7903 by no more than 1, 2, 3, 4, 5, 6, 7, 8, 9, or 10 non-naturally occurring modifications, e.g., a non-naturally occurring modification selected from a 2′-O-methyl (2-OMe), 2′-halo (e.g., 2′F or 2′Cl), 2′-O-methoxyethyl (2′MOE2′deoxy, or phosphorothioate modification.

[0768] 400. The TREM of any one of the preceding embodiments, wherein:
[0769] (i) the non-naturally occurring modification is present at a nucleotide position which corresponds to one or more of the nucleotides of SEQ ID NO: 8524; and/or
[0770] (ii) the TREM comprises the nucleotide sequence of SEQ ID NO: 8524.

[0771] 401. The TREM of any one of the preceding embodiment, having the sequence of SEQ ID NO: 8524.

[0772] 402. The TREM of any one of the preceding embodiments, wherein:
[0773] (i) the TREM comprises the nucleotide sequence of SEQ ID NO: 6725; and/or
[0774] (ii) the TREM differs from the nucleotide sequence of SEQ ID NO: 6725 by no more than 1, 2, 3, 4, 5, 6, 7, 8, 9, or 10 nucleotides; and/or
[0775] (iii) the TREM comprises the sequence of TREM NO.: 6104; and/or
[0776] (iv) the TREM differs from the sequence of TREM NO: 6104 by no more than 1, 2, 3, 4, 5, 6, 7, 8, 9, or 10 non-naturally occurring modifications, e.g., a non-naturally occurring modification selected from a 2′-O-methyl (2-OMe), 2′-halo (e.g., 2′F or 2′Cl), 2′-O-methoxyethyl (2′MOE2′deoxy, or phosphorothioate modification.

[0777] 403. The TREM of any one of the preceding embodiments, wherein:
[0778] (i) the non-naturally occurring modification is present at a nucleotide position which corresponds to one or more of the nucleotides of SEQ ID NO: 6725; and/or
[0779] (ii) the TREM comprises the nucleotide sequence of SEQ ID NO: 6725.

[0780] 404. The TREM of any one of the preceding embodiment, having the sequence of SEQ ID NO: 6725.

[0781] 405. The TREM of any one of the preceding embodiments, wherein:
[0782] (i) the TREM comprises the nucleotide sequence of SEQ ID NO: 8712; and/or
[0783] (ii) the TREM differs from the nucleotide sequence of SEQ ID NO: 8712 by no more than 1, 2, 3, 4, 5, 6, 7, 8, 9, or 10 nucleotides; and/or
[0784] (iii) the TREM comprises the sequence of TREM NO.: 8091; and/or
[0785] (iv) the TREM differs from the sequence of TREM NO: 8091 by no more than 1, 2, 3, 4, 5, 6, 7, 8, 9, or 10 non-naturally occurring modifications, e.g., a non-naturally occurring modification selected from a 2′-O-methyl (2-OMe), 2′-halo (e.g., 2′F or 2′Cl), 2′-O-methoxyethyl (2′MOE2′deoxy, or phosphorothioate modification.

[0786] 406. The TREM of any one of the preceding embodiments, wherein:
[0787] (i) the non-naturally occurring modification is present at a nucleotide position which corresponds to one or more of the nucleotides of SEQ ID NO: 8712; and/or
[0788] (ii) the TREM comprises the nucleotide sequence of SEQ ID NO: 8712.

[0789] 407. The TREM of any one of the preceding embodiment, having the sequence of SEQ ID NO: 8712.

[0790] 408. The TREM of any one of the preceding embodiments, wherein:
[0791] (i) the TREM comprises the nucleotide sequence of SEQ ID NO: 9488; and/or
[0792] (ii) the TREM differs from the nucleotide sequence of SEQ ID NO: 9488 by no more than 1, 2, 3, 4, 5, 6, 7, 8, 9, or 10 nucleotides; and/or
[0793] (iii) the TREM comprises the sequence of TREM NO.: 8867; and/or
[0794] (iv) the TREM differs from the sequence of TREM NO: 8867 by no more than 1, 2, 3, 4, 5, 6, 7, 8, 9, or 10 non-naturally occurring modifications, e.g., a non-naturally occurring modification selected from a 2′-O-methyl (2-OMe), 2′-halo (e.g., 2′F or 2′Cl), 2′-O-methoxyethyl (2′MOE2′deoxy, or phosphorothioate modification.

[0795] 409. The TREM of any one of the preceding embodiments, wherein:
[0796] (i) the non-naturally occurring modification is present at a nucleotide position which corresponds to one or more of the nucleotides of SEQ ID NO: 9488; and/or
[0797] (ii) the TREM comprises the nucleotide sequence of SEQ ID NO: 9488.

[0798] 410. 9488 TREM of any one of the preceding embodiment, having the sequence of SEQ ID NO: 8712.

[0799] 411. The TREM of any one of the preceding embodiments, wherein:
[0800] (i) the TREM comprises the nucleotide sequence of SEQ ID NO: 5397; and/or
[0801] (ii) the TREM differs from the nucleotide sequence of SEQ ID NO: 5397 by no more than 1, 2, 3, 4, 5, 6, 7, 8, 9, or 10 nucleotides; and/or
[0802] (iii) the TREM comprises the sequence of TREM NO.: 4776; and/or
[0803] (iv) the TREM differs from the sequence of TREM NO: 4776 by no more than 1, 2, 3, 4, 5, 6, 7, 8, 9, or 10 non-naturally occurring modifications, e.g., a non-naturally occurring modification selected from a 2′-O-methyl (2-OMe), 2′-halo (e.g., 2′F or 2′Cl), 2′-O-methoxyethyl (2′MOE2′deoxy, or phosphorothioate modification.

[0804] 412. The TREM of any one of the preceding embodiments, wherein:
[0805] (i) the non-naturally occurring modification is present at a nucleotide position which corresponds to one or more of the nucleotides of SEQ ID NO: 5397; and/or
[0806] (ii) the TREM comprises the nucleotide sequence of SEQ ID NO: 5397.

[0807] 413. 9488 TREM of any one of the preceding embodiment, having the sequence of SEQ ID NO: 8712.

[0808] 414. The TREM of any one of the preceding embodiments, wherein the non-naturally occurring modification is present at a nucleotide position which corresponds to one or more of nucleotides according to the CtNS.

[0809] 415. A pharmaceutical composition comprising a TREM of embodiments 1-414.

[0810] 416. The pharmaceutical composition of embodiment 415, comprising a pharmaceutically acceptable component, e.g., an excipient.

[0811] 417. A lipid nanoparticle formulation comprising a TREM of embodiments 1-414.

[0812] 418. A method of making a TREM of embodiments 1-414, comprising linking a first nucleotide to a second nucleotide to form the TREM.

[0813] 419. The method of embodiment 418, wherein the TREM, TREM core fragment or TREM fragment is synthetic (e.g., non-naturally occurring).

[0814] 420. The method of embodiment 418-419, wherein the synthesis is performed in vitro.

[0815] 421. The method of embodiment 419, wherein the TREM, TREM core fragment or TREM fragment is made by cell-free solid phase synthesis.

[0816] 422. A cell comprising a TREM of embodiments 1-414.

[0817] 423. A cell comprising a TREM, TREM core fragment or TREM fragment made according to the method of embodiment 418.

[0818] 424 . . . . A method of modulating a tRNA pool in a cell comprising:
[0819] providing a TREM of embodiments 1-414, and
[0820] contacting the cell with the TREM,
[0821] thereby modulating the tRNA pool in the cell.

[0822] 425. A method of contacting a cell, tissue, or subject with a TREM of embodiments 1-414, comprising contacting the cell, tissue or subject with the TREM, thereby contacting the cell, tissue, or subject with the TREM.

[0823] 426. A method of presenting a TREM, comprising contacting the cell, tissue or subject with a TREM of embodiments 1-414, thereby presenting the TREM to a cell, tissue, or subject.

[0824] 427. A method of forming a TREM-contacted cell, tissue, or subject, comprising contacting the cell, tissue or subject with a TREM of embodiments 1-414, thereby forming a TREM-contacted cell, tissue, or subject.

[0825] 428. A method of using a TREM comprising, contacting the cell, tissue or subject with a TREM of embodiments 1-414, thereby using the TREM.

[0826] 429. A method of applying a TREM to a cell, tissue, or subject, comprising contacting the cell, tissue or subject with a TREM of embodiments 1-414, thereby applying a TREM to a cell, tissue, or subject.

[0827] 430. A method of exposing a cell, tissue, or subject to a TREM, comprising contacting the cell, tissue or subject with a TREM of embodiments 1-414, thereby exposing a cell, tissue, or subject to a TREM.

[0828] 431. A method of forming an admixture of a TREM and a cell, tissue, or subject, comprising
[0829] contacting the cell, tissue or subject with a TREM of embodiments 1-414, thereby forming an admixture of a TREM and a cell, tissue, or subject.

[0830] 432. A method of delivering a TREM to a cell, tissue, or subject, comprising:
[0831] providing a cell, tissue, or subject, and contacting the cell, tissue, or subject, a TREM of embodiments 1-414.

[0832] 433. A method, e.g., an ex vivo method, of modulating the metabolism, e.g., the translational capacity of an organelle, comprising:
[0833] providing a preparation of an organelle, e.g., mitochondria or chloroplasts, and contacting the organelle with a TREM of embodiments 1-414.

[0834] 434. A method of treating a subject, e.g., modulating the metabolism, e.g., the translational capacity of a cell, in a subject, comprising:
[0835] providing, e.g., administering to the subject a TREM of embodiments 1-414, thereby treating the subject.

[0836] 435. A method of modulating a tRNA pool in a cell comprising an endogenous open reading frame (ORF), which ORF comprises a codon having a first sequence, comprising:
[0837] optionally, acquiring knowledge of the abundance of one or both of (i) and (ii), e.g., acquiring knowledge of the relative amounts of: (i) and (ii) in the cell, wherein (i) is a tRNA moiety having an anticodon that pairs with the codon of the ORF having a first sequence (the first tRNA moiety) and (ii) is an isoacceptor tRNA moiety having an anticodon that pairs with a codon other than the codon having the first sequence (the second tRNA moiety) in the cell;
[0838] contacting the cell with a TREM of embodiments 1-414, wherein the TREM has an anticodon that pairs with: the codon having the first sequence; or the codon other than the codon having the first sequence, in an amount and/or for a time sufficient to modulate the relative amounts of the first tRNA moiety and the second tRNA moiety in the cell,
[0839] thereby modulating the tRNA pool in the cell.

[0840] 436. A method of modulating a tRNA pool in a subject having an endogenous open reading frame (ORF), which ORF comprises a codon having a first sequence, comprising:
[0841] optionally, acquiring knowledge of the abundance of one or both of (i) and (ii), e.g., acquiring knowledge of the relative amounts of: (i) and (ii) in the subject, wherein (i) is a tRNA moiety having an anticodon that pairs with the codon of the ORF having a first sequence (the first tRNA moiety) and (ii) is an isoacceptor tRNA moiety having an anticodon that pairs with a codon other than the codon having the first sequence (the second tRNA moiety) in the subject;
[0842] contacting the subject with a TREM of embodiments 1-414, wherein the TREM has an anticodon that pairs with: the codon having the first sequence; or the codon other than the codon having the first sequence, in an amount and/or for a time sufficient to modulate the relative amounts of the first tRNA moiety and the second tRNA moiety in the subject,
[0843] thereby modulating the tRNA pool in the subject.

[0844] 437. A method of modulating a tRNA pool in a subject having an endogenous open reading frame (ORF) comprising a codon comprising a synonymous mutation (a synonymous mutation codon or SMC), comprising:
[0845] providing a composition comprising a TREM of embodiments 1-414, wherein the TREM comprises an isoacceptor tRNA moiety comprising an anticodon sequence that pairs with the SMC (the TREM);
[0846] contacting the subject with the composition in an amount and/or for a time sufficient to modulate the tRNA pool in the subject,
[0847] thereby modulating the tRNA pool in the subject.

[0848] 438. A method of modulating a tRNA pool in a cell comprising an endogenous open reading frame (ORF) comprising a codon comprising a synonymous mutation (a synonymous mutation codon or SMC), comprising:
[0849] providing a composition comprising a TREM of embodiments 1-414, wherein the TREM comprises an isoacceptor tRNA moiety comprising an anticodon sequence that pairs with the SMC (the TREM);
[0850] contacting the cell with the composition comprising a TREM in an amount and/or for a time sufficient to modulate the tRNA pool in the cell,
[0851] thereby modulating the tRNA pool in the cell.

[0852] 439. A method of modulating expression of a protein in a cell, wherein the protein is encoded by a nucleic acid comprising an endogenous open reading frame (ORF), which ORF comprises a codon having a mutation, comprising:
[0853] contacting the cell with a composition comprising a TREM of embodiments 1-414 in an amount and/or for a time sufficient to modulate expression of the encoded protein,
[0854] wherein the TREM has an anticodon that pairs with the codon having the mutation,
[0855] thereby modulating expression of the protein in the cell.

[0856] 440. A method of modulating expression of a protein in a subject, wherein the protein is encoded by a nucleic acid comprising an endogenous open reading frame (ORF), which ORF comprises a codon having a mutation, comprising:
[0857] contacting the subject with a composition comprising a TREM of embodiments 1-414, in an amount and/or for a time sufficient to modulate expression of the encoded protein,
[0858] wherein the TREM has an anticodon that pairs with the codon having the mutation,
[0859] thereby modulating expression of the protein in the subject.

[0860] 441. The method of embodiment 439-440, wherein the mutation in the ORF is a nonsense mutation, e.g., resulting in a premature stop codon chosen from UAA, UGA or UAG.

[0861] 442. The method of embodiment 439-441, wherein the TREM comprises an anticodon that pairs with a stop codon.

[0862] 443. The method of any one of the preceding embodiments, wherein the TREM comprises an anticodon that pairs with a stop codon.

[0863] Other features, objects, and advantages of the invention will be apparent from the description and from the claims.

[0864] Unless otherwise defined, all technical and scientific terms used herein have the same meaning as commonly understood by one of ordinary skill in the art to which this invention belongs. All publications, patent applications, patents, and other references mentioned herein are incorporated by reference in their entirety. In addition, the materials, methods, and examples are illustrative only and not intended to be limiting.

### DETAILED DESCRIPTION OF CERTAIN EMBODIMENTS

[0865] The present disclosure features tRNA-based effector molecules (TREMs) comprising a non-naturally occurring modification and methods relating thereto. As disclosed herein, TREMs are complex molecules which can mediate a variety of cellular processes. Pharmaceutical TREM compositions, e.g., TREMs comprising a non-naturally occurring modification, can be administered to a cell, a tissue, or to a subject to modulate these functions. Also disclosed herein are methods of modulating expression of a protein in a subject or cell, wherein the protein is encoded by a nucleic acid comprising an endogenous open reading frame (ORF) having a first sequence, e.g., a mutation, e.g., a premature termination codon (PTC), and methods of treating a subject having an endogenous open reading frame (ORF) which comprises a premature termination codon (PTC). Further disclosed herein are TREMs comprising a non-naturally occurring modification, methods of making the same and compositions thereof.

### Definitions

[0866] “Acquire” or “acquiring” as the terms are used herein, refer to obtaining possession of a value, e.g., a numerical value, by “directly acquiring” or “indirectly acquiring” the physical entity or value. “Directly acquiring” refers to performing a process (e.g., performing an analytical method) to obtain the value. “Indirectly acquiring” refers to receiving the value from another party or source (e.g., a third party laboratory that directly acquired the or value).

[0867] A “disease or disorder associated with a PTC” as that term is used herein includes, but is not limited to, a disease or disorder in which cells express, or at one time expressed, a polypeptide encoded by an ORF comprising a PTC. In some embodiments, a disease associated with a PTC is chosen from: a proliferative disorder (e.g., a cancer), a genetic disorder, a metabolic disorder, an immune disorder, an inflammatory disorder or a neurological disorder. Exemplary diseases or disorders associated with a PTC are provided in any one of Tables 15, 16 and 17. In an embodiment, the disease associated with a PTC is a cancer. In an embodiment, the disease associated with a PTC is a monogenic disease.

[0868] An “isoacceptor,” as that term is used herein, refers to a plurality of tRNA molecule or TREMs wherein each molecule of the plurality comprises a different naturally occurring anticodon sequence and each molecule of the plurality mediates the incorporation of the same amino acid and that amino acid is the amino acid that naturally corresponds to the anticodons of the plurality.

[0869] A “modification,” as that term is used herein with reference to a nucleotide, refers to a modification of the chemical structure, e.g., a covalent modification, of the subject nucleotide. The modification can be naturally occurring or non-naturally occurring. In an embodiment, the modification is non-naturally occurring. In an embodiment, the modification is naturally occurring. In an embodiment, the modification is a synthetic modification. In an embodiment, the modification is a modification provided in Tables 5, 6, 7, 8 or 9.

[0870] A “naturally occurring nucleotide.” as that term is used herein, refers to a nucleotide that does not comprise a non-naturally occurring modification. In an embodiment, it includes a naturally occurring modification.

[0871] A “non-naturally occurring modification,” as that term is used herein with reference to a nucleotide, refers to a modification that: (a) a cell, e.g., a human cell, does not make on an endogenous tRNA; or (b) a cell, e.g., a human cell, can make on an endogenous tRNA but wherein such modification is in a location in which it does not occur on a native tRNA, e.g., the modification is in a domain, linker or arm, or on a nucleotide and/or at a position within a domain, linker or arm, which does not have such modification in nature. In either case, the modification is added synthetically, e.g., in a cell free reaction, e.g., in a solid state or liquid phase synthetic reaction. In an embodiment, the non-naturally occurring modification is a modification that is not present (in identity, location or position) if a sequence of the TREM is expressed in a mammalian cell, e.g., a HEK293 cell line. Exemplary non-naturally occurring modifications are found in Tables 5, 6, 7, 8 or 9.

[0872] A “non-naturally modified nucleotide,” as that term is used herein, refers a nucleotide comprising a non-naturally occurring modification on or of a sugar, nucleobase, or phosphate moiety.

[0873] A “nucleotide,” as that term is used herein, refers to an entity comprising a sugar, typically a pentameric sugar; a nucleobase; and a phosphate linking group. In an embodiment, a nucleotide comprises a naturally occurring, e.g., naturally occurring in a human cell, nucleotide, e.g., an adenine, thymine, guanine, cytosine, or uracil nucleotide.

[0874] A “premature termination codon” or “PTC” as those terms are used herein, refer to a stop codon that occurs in an open reading frame (ORF) of a DNA or mRNA. In an embodiment, a PTC occurs at a position upstream of a naturally occurring stop codon in an ORF. In an embodiment, a PTC that occurs upstream of a naturally occurring stop codon, e.g., in an ORF, results in modulation of a production parameter of the corresponding mRNA or polypeptide encoded by the ORF. In an embodiment, a PTC can differ (or arise) from a pre-mutation sequence by a point mutation, e.g., a nonsense mutation. In an embodiment, a PTC can differ (or arise) from a pre-mutation sequence by a genetic change, e.g., abnormality, other than a point mutation, e.g., a frameshift, a deletion, an insertion, a rearrangement, an inversion, a translocation, a duplication, or a transversion. In an embodiment, a PTC results in the production of a truncated protein which lacks a native activity or which is associated with a mutant, disease, or other unwanted phenotype. In an embodiment, the ORF comprising the PTC is an ORF from a tumor suppressor gene. In an embodiment, the mutation giving rise to the PTC is a driver mutation, e.g., a mutation that provides a growth advantage to a tumor cell.

[0875] A “production parameter,” refers to an expression parameter and/or a signaling parameter. In an embodiment a production parameter is an expression parameter. An expression parameter includes an expression parameter of a polypeptide or protein encoded by the endogenous ORF having a first sequence or PTC; or an expression parameter of an RNA, e.g., messenger RNA, encoded by the endogenous ORF having a first sequence or PTC. In an embodiment, an expression parameter can include:
[0876] (a) protein translation;
[0877] (b) expression level (e.g., of polypeptide or protein, or mRNA);
[0878] (c) post-translational modification of polypeptide or protein;
[0879] (d) folding (e.g., of polypeptide or protein, or mRNA),
[0880] (e) structure (e.g., of polypeptide or protein, or mRNA),
[0881] (f) transduction (e.g., of polypeptide or protein),
[0882] (g) compartmentalization (e.g., of polypeptide or protein, or mRNA),
[0883] (h) incorporation (e.g., of polypeptide or protein, or mRNA) into a supermolecular structure, e.g., incorporation into a membrane, proteasome, or ribosome,
[0884] (i) incorporation into a multimeric polypeptide, e.g., a homo or heterodimer, and/or
[0885] (j) stability.

[0886] In an embodiment, a production parameter is a signaling parameter. A signaling parameter can include:
[0887] (1) modulation of a signaling pathway, e.g., a cellular signaling pathway which is downstream or upstream of the protein encoded by the endogenous ORF having a first sequence or PTC;
[0888] (2) cell fate modulation;
[0889] (3) ribosome occupancy modulation;
[0890] (4) protein translation modulation;
[0891] (5) mRNA stability modulation;
[0892] (6) protein folding and structure modulation;
[0893] (7) protein transduction or compartmentalization modulation; and/or
[0894] (8) protein stability modulation.

[0895] An “ORF having a PTC” as that phrase is used herein, refers to an open reading frame (ORF) which comprises a premature termination codon (PTC). In an embodiment, the ORF having the PTC is associated with a disease or disorder associated with a PTC, e.g., as described herein, e.g., a disease or disorder listed in any one of Tables 15, 16 and 17. In an embodiment, the ORF having the PTC is not associated with a disease or disorder associated with a PTC.

[0896] A “stop codon” as that term is used herein, refers to a three nucleotide contiguous sequence within messenger RNA that specifies a termination of translation. For example, UAG, UAA, UGA (in RNA) and TAG, TAA or TGA (in DNA) are stop codons. The stop codons are also known as amber (UAG), ochre (UAA), and opal (UGA).

[0897] A “tRNA-based effector molecule” or “TREM,” as that term is used herein, refers to an RNA molecule comprising a structure or property from (a)-(v) below, and which is a recombinant TREM, a synthetic TREM, or a TREM expressed from a heterologous cell. The TREMs described in the present invention are synthetic molecules and are made, e.g., in a cell free reaction, e.g., in a solid state or liquid phase synthetic reaction. TREMs are chemically distinct, e.g., in terms of primary sequence, type or location of modifications from the endogenous tRNA molecules made in cells, e.g., in mammalian cells, e.g., in human cells. A TREM can have a plurality (e.g., 2, 3, 4, 5, 6, 7, 8, 9) of the structures and functions of (a)-(v).

[0898] In an embodiment, a TREM is non-native, as evaluated by structure or the way in which it was made.

[0899] In an embodiment, a TREM comprises one or more of the following structures or properties:
[0900] (a′) an optional linker region of a consensus sequence provided in the “Consensus Sequence” section, e.g., a Linker 1 region;
[0901] (a) an amino acid attachment domain that binds an amino acid, e.g., an acceptor stem domain (AStD), wherein an AStD comprises sufficient RNA sequence to mediate, e.g., when present in an otherwise wildtype tRNA, acceptance of an amino acid, e.g., its cognate amino acid or a non-cognate amino acid, and transfer of the amino acid (AA) in the initiation or elongation of a polypeptide chain. Typically, the AStD comprises a 3′-end adenosine (CCA) for acceptor stem charging which is part of synthetase recognition. In an embodiment the AStD has at least 75, 80, 85, 85, 90, 95, or 100% identity with a naturally occurring AStD, e.g., an AStD encoded by a nucleic acid in Table 1. In an embodiment, the TREM can comprise a fragment or analog of an AStD, e.g., an AStD encoded by a nucleic acid in Table 1, which fragment in embodiments has AStD activity and in other embodiments does not have AStD activity. (One of ordinary skill can determine the relevant corresponding sequence for any of the domains, stems, loops, or other sequence features mentioned herein from a sequence encoded by a nucleic acid in Table 1. E.g . . . one of ordinary skill can determine the sequence which corresponds to an AStD from a tRNA sequence encoded by a nucleic acid in Table 1.)

[0902] In an embodiment the AStD falls under the corresponding sequence of a consensus sequence provided in the “Consensus Sequence” section, or differs from the consensus sequence by no more than 1, 2, 5, or 10 positions;

[0903] In an embodiment, the AStD comprises residues R₁-R₂-R₃-R₄-R₅-R₆-R₇ and residues R₆₅-R₆₆-R₆₇-R₆₈-R₆₉-R₇₀-R₇₁ of Formula I zzz, wherein ZZZ indicates any of the twenty amino acids;

[0904] In an embodiment, the AStD comprises residues R₁-R₂-R₃-R₄-R₅-R₆-R₇ and residues R₆₅-R₆₆-R₆₇-R₆₈-R₆₉-R₇₀-R₇₁ of Formula II zzz, wherein ZZZ indicates any of the twenty amino acids;

[0905] In an embodiment, the AStD comprises residues R₁-R₂-R₃-R₄-R₅-R₆-R₇ and residues R₆₅-R₆₆-R₆₇-R₆₈-R₆₉-R₇₀-R₇₁ of Formula III zzz, wherein ZZZ indicates any of the twenty amino acids;
[0906] (a′-1) a linker comprising residues R₈-R₉ of a consensus sequence provided in the “Consensus Sequence” section, e.g., a Linker 2 region;
[0907] (b) a dihydrouridine hairpin domain (DHD), wherein a DHD comprises sufficient RNA sequence to mediate, e.g., when present in an otherwise wildtype tRNA, recognition of aminoacyl-tRNA synthetase, e.g., acts as a recognition site for aminoacyl-tRNA synthetase for amino acid charging of the TREM. In embodiments, a DHD mediates the stabilization of the TREM's tertiary structure. In an embodiment the DHD has at least 75, 80, 85, 85, 90, 95, or 100% identity with a naturally occurring DHD, e.g., a DHD encoded by a nucleic acid in Table 1. In an embodiment, the TREM can comprise a fragment or analog of a DHD, e.g., a DHD encoded by a nucleic acid in Table 1, which fragment in embodiments has DHD activity and in other embodiments does not have DHD activity.

[0908] In an embodiment the DHD falls under the corresponding sequence of a consensus sequence provided in the “Consensus Sequence” section, or differs from the consensus sequence by no more than 1, 2, 5, or 10 positions;

[0909] In an embodiment, the DHD comprises residues R₁₀-R₁₁-R₁₂-R₁₃-R₁₄ R₁₅-R₁₆-R₁₇-R₁₈-R₁₉-R₂₀-R₂₁-R₂₂-R₂₃-R₂₄-R₂₅-R₂₆-R₂₇-R₂₈ of Formula I zzz, wherein ZZZ indicates any of the twenty amino acids;

[0910] In an embodiment, the DHD comprises residues R₁₀-R₁₁-R₁₂-R₁₃-R₁₄ R₁₅-R₁₆-R₁₇-R₁₈-R₁₉-R₂₀-R₂₁-R₂₂-R₂₃-R₂₄-R₂₅-R₂₆-R₂₇-R₂₈ of Formula II zzz, wherein ZZZ indicates any of the twenty amino acids;

[0911] In an embodiment, the DHD comprises residues R₁₀-R₁₁-R₁₂-R₁₃-R₁₄ R₁₅-R₁₆-R₁₇-R₁₈-R₁₉-R₂₀-R₂₁-R₂₂-R₂₃-R₂₄-R₂₅-R₂₆-R₂₇-R₂₈ of Formula III zzz, wherein ZZZ indicates any of the twenty amino acids;
[0912] (b′-1) a linker comprising residue R₂₉ of a consensus sequence provided in the “Consensus Sequence” section, e.g., a Linker 3 region;
[0913] (c) an anticodon that binds a respective codon in an mRNA, e.g., an anticodon hairpin domain (ACHD), wherein an ACHD comprises sufficient sequence, e.g., an anticodon triplet, to mediate, e.g., when present in an otherwise wildtype tRNA, pairing (with or without wobble) with a codon; In an embodiment the ACHD has at least 75, 80, 85, 85, 90, 95, or 100% identity with a naturally occurring ACHD, e.g., an ACHD encoded by a nucleic acid in Table 1. In an embodiment, the TREM can comprise a fragment or analog of an ACHD, e.g., an ACHD encoded by a nucleic acid in Table 1, which fragment in embodiments has ACHD activity and in other embodiments does not have ACHD activity.

[0914] In an embodiment the ACHD falls under the corresponding sequence of a consensus sequence provided in the “Consensus Sequence” section, or differs from the consensus sequence by no more than 1, 2, 5, or 10 positions;

[0915] In an embodiment, the ACHD comprises residues-R₃₀-R₃₁-R₃₂-R₃₃-R₃₄-R₃₅-R₃₆-R₃₇-R₃₈-R₃₉-R₄₀-R₄₁-R₄₂-R₄₃-R₄₄-R₄₅-R₄₆ of Formula I zzz, wherein ZZZ indicates any of the twenty amino acids;

[0916] In an embodiment, the ACHD comprises residues-R₃₀-R₃₁-R₃₂-R₃₃-R₃₄-R₃₅-R₃₆-R₃₇-R₃₈-R₃₉-R₄₀-R₄₁-R₄₂-R₄₃-R₄₄-R₄₅-R₄₆ of Formula II zzz, wherein ZZZ indicates any of the twenty amino acids;

[0917] In an embodiment, the ACHD comprises residues-R₃₀-R₃₁-R₃₂-R₃₃-R₃₄-R₃₅-R₃₆-R₃₇-R₃₈-R₃₉-R₄₀-R₄₁-R₄₂-R₄₃-R₄₄-R₄₅-R₄₆ of Formula III zzz, wherein ZZZ indicates any of the twenty amino acids;
[0918] (d) a variable loop domain (VLD), wherein a VLD comprises sufficient RNA sequence to mediate, e.g., when present in an otherwise wildtype tRNA, recognition of aminoacyl-tRNA synthetase, e.g., acts as a recognition site for aminoacyl-tRNA synthetase for amino acid charging of the TREM. In embodiments, a VLD mediates the stabilization of the TREM's tertiary structure. In an embodiment, a VLD modulates, e.g., increases, the specificity of the TREM, e.g., for its cognate amino acid, e.g., the VLD modulates the TREM's cognate adaptor function. In an embodiment the VLD has at least 75, 80, 85, 85, 90, 95, or 100% identity with a naturally occurring VLD, e.g., a VLD encoded by a nucleic acid in Table 1. In an embodiment, the TREM can comprise a fragment or analog of a VLD, e.g., a VLD encoded by a nucleic acid in Table 1, which fragment in embodiments has VLD activity and in other embodiments does not have VLD activity.

[0919] In an embodiment the VLD falls under the corresponding sequence of a consensus sequence provided in the “Consensus Sequence” section.

[0920] In an embodiment, the VLD comprises residue-[R₄₇]ₓ of a consensus sequence provided in the “Consensus Sequence” section, wherein x=1-271 (e.g., x=1-250, x=1-225, x=1-200, x=1-175, x=1-150, x=1-125, x=1-100, x=1-75, x=1-50, x=1-40, x=1-30, x=1-29, x=1-28, x=1-27, x=1-26, x=1-25, x=1-24, x=1-23, x=1-22, x=1-21, x=1-20, x=1-19, x=1-18, x=1-17, x=1-16, x=1-15, x=1-14, x=1-13, x=1-12, x=1-11, x=1-10, x=10-271, x=20-271, x=30-271, x=40-271, x=50-271, x=60-271, x=70-271, x=80-271, x=100-271, x=125-271, x=150-271, x=175-271, x=200-271, x=225-271, x=1, x=2, x=3, x=4, x=5, x=6, x=7, x=8, x=9, x=10, x=11, x=12, x=13, x=14, x=15, x=16, x=17, x=18, x=19, x=20, x=21, x=22, x=23, x=24, x=25, x=26, x=27, x=28, x=29, x=30, x=40, x=50, x=60, x=70, x=80, x=90, x=100, x=110, x=125, x=150, x=175, x=200, x=225, x=250, or x=271);
[0921] (e) a thymine hairpin domain (THD), wherein a THD comprises sufficient RNA sequence, to mediate, e.g., when present in an otherwise wildtype tRNA, recognition of the ribosome, e.g., acts as a recognition site for the ribosome to form a TREM-ribosome complex during translation. In an embodiment the THD has at least 75, 80, 85, 85, 90, 95, or 100% identity with a naturally occurring THD, e.g., a THD encoded by a nucleic acid in Table 1. In an embodiment, the TREM can comprise a fragment or analog of a THD, e.g., a THD encoded by a nucleic acid in Table 1, which fragment in embodiments has THD activity and in other embodiments does not have THD activity.

[0922] In an embodiment the THD falls under the corresponding sequence of a consensus sequence provided in the “Consensus Sequence” section, or differs from the consensus sequence by no more than 1, 2, 5, or 10 positions;

[0923] In an embodiment, the THD comprises residues-R₄₈-R₄₉-R₅₀-R₅₁-R₅₂-R₅₃-R₅₄-R₅₅-R₅₆-R₅₇-R₅₈-R₅₉-R₆₀-R₆₁-R₆₂-R₆₃-R₆₄ of Formula I zzz, wherein ZZZ indicates any of the twenty amino acids;

[0924] In an embodiment, the THD comprises residues-R₄₈-R₄₉-R₅₀-R₅₁-R₅₂-R₅₃-R₅₄-R₅₅-R₅₆-R₅₇-R₅₈-R₅₉-R₆₀-R₆₁-R₆₂-R₆₃-R₆₄ of Formula II zzz, wherein ZZZ indicates any of the twenty amino acids;

[0925] In an embodiment, the THD comprises residues-R₄₈-R₄₉-R₅₀-R₅₁-R₅₂-R₅₃-R₅₄-R₅₅-R₅₆-R₅₇-R₅₈-R₅₉-R₆₀-R₆₁-R₆₂-R₆₃-R₆₄ of Formula III zzz, wherein ZZZ indicates any of the twenty amino acids;
[0926] (e′1) a linker comprising residue R₇₂ of a consensus sequence provided in the “Consensus Sequence” section, e.g., a Linker 4 region;
[0927] (f) under physiological conditions, it comprises a stem structure and one or a plurality of loop structures, e.g., 1, 2, or 3 loops. A loop can comprise a domain described herein, e.g., a domain selected from (a)-(e). A loop can comprise one or a plurality of domains. In an embodiment, a stem or loop structure has at least 75, 80, 85, 85, 90, 95, or 100% identity with a naturally occurring stem or loop structure, e.g., a stem or loop structure encoded by a nucleic acid in Table 1. In an embodiment, the TREM can comprise a fragment or analog of a stem or loop structure, e.g., a stem or loop structure encoded by a nucleic acid in Table 1, which fragment in embodiments has activity of a stem or loop structure, and in other embodiments does not have activity of a stem or loop structure;
[0928] (g) a tertiary structure, e.g., an L-shaped tertiary structure;
[0929] (h) adaptor function, i.e., the TREM mediates acceptance of an amino acid, e.g., its cognate amino acid and transfer of the AA in the initiation or elongation of a polypeptide chain;
[0930] (i) cognate adaptor function wherein the TREM mediates acceptance and incorporation of an amino acid (e.g., cognate amino acid) associated in nature with the anti-codon of the TREM to initiate or elongate a polypeptide chain;
[0931] (j) non-cognate adaptor function, wherein the TREM mediates acceptance and incorporation of an amino acid (e.g., non-cognate amino acid) other than the amino acid associated in nature with the anti-codon of the TREM in the initiation or elongation of a polypeptide chain;
[0932] (k) a regulatory function, e.g., an epigenetic function (e.g., gene silencing function or signaling pathway modulation function), cell fate modulation function, mRNA stability modulation function, protein stability modulation function, protein transduction modulation function, or protein compartmentalization function;
[0933] (l) a structure which allows for ribosome binding;
[0934] (m) a post-transcriptional modification, e.g., a naturally occurring post-trasncriptional
[0935] modification;
[0936] (n) the ability to inhibit a functional property of a tRNA, e.g., any of properties (h)-(k)
[0937] possessed by a tRNA;
[0938] (o) the ability to modulate cell fate;
[0939] (p) the ability to modulate ribosome occupancy;
[0940] (q) the ability to modulate protein translation;
[0941] (r) the ability to modulate mRNA stability;
[0942] (s) the ability to modulate protein folding and structure;
[0943] (t) the ability to modulate protein transduction or compartmentalization;
[0944] (u) the ability to modulate protein stability; or
[0945] (v) the ability to modulate a signaling pathway, e.g., a cellular signaling pathway.

[0946] In an embodiment, a TREM comprises a full-length tRNA molecule or a fragment thereof.

[0947] In an embodiment, a TREM comprises the following properties: (a)-(e).

[0948] In an embodiment, a TREM comprises the following properties: (a) and (c).

[0949] In an embodiment, a TREM comprises the following properties: (a), (c) and (h).

[0950] In an embodiment, a TREM comprises the following properties: (a), (c), (h) and (b).

[0951] In an embodiment, a TREM comprises the following properties: (a), (c), (h) and (e).

[0952] In an embodiment, a TREM comprises the following properties: (a), (c), (h), (b) and (e).

[0953] In an embodiment, a TREM comprises the following properties: (a), (c), (h), (b), (e) and (g).

[0954] In an embodiment, a TREM comprises the following properties: (a), (c), (h) and (m).

[0955] In an embodiment, a TREM comprises the following properties: (a), (c), (h), (m), and (g).

[0956] In an embodiment, a TREM comprises the following properties: (a), (c), (h), (m) and (b).

[0957] In an embodiment, a TREM comprises the following properties: (a), (c), (h), (m) and (e).

[0958] In an embodiment, a TREM comprises the following properties: (a), (c), (h), (m), (g), (b) and (e).

[0959] In an embodiment, a TREM comprises the following properties: (a), (c), (h), (m), (g), (b), (e) and (q).

[0960] In an embodiment, a TREM comprises:
[0961] (i) an amino acid attachment domain that binds an amino acid (e.g., an AStD, as described in (a) herein; and
[0962] (ii) an anticodon that binds a respective codon in an mRNA (e.g., an ACHD, as described in (c) herein).

[0963] In an embodiment the TREM comprises a flexible RNA linker which provides for covalent linkage of (i) to (ii).

[0964] In an embodiment, the TREM mediates protein translation.

[0965] In an embodiment a TREM comprises a linker, e.g., an RNA linker, e.g., a flexible RNA linker, which provides for covalent linkage between a first and a second structure or domain. In an embodiment, an RNA linker comprises at least 1, 2, 3, 4, 5, 6, 7, 8, 9, 10, 11, 12, 13, 14 or 15 ribonucleotides. A TREM can comprise one or a plurality of linkers, e.g., in embodiments a TREM comprising (a), (b), (c), (d) and (e) can have a first linker between a first and second domain, and a second linker between a third domain and another domain.

[0966] In an embodiment, the TREM comprises a sequence of Formula A: [L1]-[ASt Domain1]-[L2]-[DH Domain]-[L3]-[ACH Domain]-[VL Domain]-[TH Domain]-[L4]-[ASt Domain2].

[0967] In an embodiment, a TREM comprises an RNA sequence at least 60, 65, 70, 75, 80, 85, 90, 95, 96, 97, 98 or 99% identical with, or which differs by no more than 1, 2, 3, 4, 5, 10, 15, 20, 25, or 30 ribonucleotides from, an RNA sequence encoded by a DNA sequence listed in Table 1, or a fragment or functional fragment thereof. In an embodiment, a TREM comprises an RNA sequence encoded by a DNA sequence listed in Table 1, or a fragment or functional fragment thereof. In an embodiment, a TREM comprises an RNA sequence encoded by a DNA sequence at least 60, 65, 70, 75, 80, 85, 90, 95, 96, 97, 98 or 99% identical with a DNA sequence listed in Table 1, or a fragment or functional fragment thereof. In an embodiment, a TREM comprises a TREM domain, e.g., a domain described herein, comprising at least 60, 65, 70, 75, 80, 85, 90, 95, 96, 97, 98, or 99% identical with, or which differs by no more than 1, 2, 3, 4, 5, 10, or 15, ribonucleotides from, an RNA encoded by a DNA sequence listed in Table 1, or a fragment or a functional fragment thereof. In an embodiment, a TREM comprises a TREM domain, e.g., a domain described herein, comprising an RNA sequence encoded by DNA sequence listed in Table 1, or a fragment or functional fragment thereof. In an embodiment, a TREM comprises a TREM domain, e.g., a domain described herein, comprising an RNA sequence encoded by DNA sequence at least 60, 65, 70, 75, 80, 85, 90, 95, 96, 97, 98 or 99% identical with a DNA sequence listed in Table 1, or a fragment or functional fragment thereof.

[0968] In an embodiment, a TREM is 76-90 nucleotides in length. In embodiments, a TREM or a fragment or functional fragment thereof is between 10-90 nucleotides, between 10-80 nucleotides, between 10-70 nucleotides, between 10-60 nucleotides, between 10-50 nucleotides, between 10-40 nucleotides, between 10-30 nucleotides, between 10-20 nucleotides, between 20-90 nucleotides, between 20-80 nucleotides, 20-70 nucleotides, between 20-60 nucleotides, between 20-50 nucleotides, between 20-40 nucleotides, between 30-90 nucleotides, between 30-80 nucleotides, between 30-70 nucleotides, between 30-60 nucleotides, or between 30-50 nucleotides.

[0969] In an embodiment, a TREM is aminoacylated, e.g., charged, with an amino acid by an aminoacyl tRNA synthetase.

[0970] In an embodiment, a TREM is not charged with an amino acid, e.g., an uncharged TREM (uTREM).

[0971] In an embodiment, a TREM comprises less than a full length tRNA. In embodiments, a TREM can correspond to a naturally occurring fragment of a tRNA, or to a non-naturally occurring fragment. Exemplary fragments include: TREM halves (e.g., from a cleavage in the ACHD, e.g., in the anticodon sequence, e.g., 5′halves or 3′ halves); a 5′ fragment (e.g., a fragment comprising the 5′ end, e.g., from a cleavage in a DHD or the ACHD); a 3′ fragment (e.g., a fragment comprising the 3′ end, e.g., from a cleavage in the THD); or an internal fragment (e.g., from a cleavage in one or more of the ACHD, DHD or THD).

[0972] A “TREM core fragment,” as that term is used herein, refers to a portion of the sequence of Formula B: [L1]_{y}-[ASt Domain1]ₓ-[L2]_{y}-[DH Domain]_{y}-[L3]_{y}-[ACH Domain]ₓ-[VL Domain]_{y}-[TH Domain]_{y}-[L4]_{y}-[ASt Domain2]ₓ, wherein: x=1 and y=0 or 1.

[0973] A “TREM fragment,” as used herein, refers to a portion of a TREM, wherein the TREM comprises a sequence of Formula A: [L1]-[ASt Domain1]-[L2]-[DH Domain]-[L3]-[ACH Domain]-[VL Domain]-[TH Domain]-[L4]-[ASt Domain2].

[0974] A “cognate adaptor function TREM,” as that term is used herein, refers to a TREM which mediates initiation or elongation with the AA (the cognate AA) associated in nature with the anti-codon of the TREM.

[0975] “Decreased expression,” as that term is used herein, refers to a decrease in comparison to a reference, e.g., in the case where altered control region, or addition of an agent, results in a decreased expression of the subject product, it is decreased relative to an otherwise similar cell without the alteration or addition.

[0976] An “exogenous nucleic acid,” as that term is used herein, refers to a nucleic acid sequence that is not present in or differs by at least one nucleotide from the closest sequence in a reference cell, e.g., a cell into which the exogenous nucleic acid is introduced. In an embodiment, an exogenous nucleic acid comprises a nucleic acid that encodes a TREM.

[0977] An “exogenous TREM,” as that term is used herein, refers to a TREM that:
[0978] (a) differs by at least one nucleotide or one post transcriptional modification from the closest sequence tRNA in a reference cell, e.g., a cell into which the exogenous nucleic acid is introduced;
[0979] (b) has been introduced into a cell other than the cell in which it was transcribed;
[0980] (c) is present in a cell other than one in which it naturally occurs; or
[0981] (d) has an expression profile, e.g., level or distribution, that is non-wildtype, e.g., it is expressed at a higher level than wildtype. In an embodiment, the expression profile can be mediated by a change introduced into a nucleic acid that modulates expression or by addition of an agent that modulates expression of the RNA molecule. In an embodiment an exogenous TREM comprises 1, 2, 3 or 4 of properties (a)-(d).

[0982] A “GMP-grade composition,” as that term is used herein, refers to a composition in compliance with current good manufacturing practice (cGMP) guidelines, or other similar requirements. In an embodiment, a GMP-grade composition can be used as a pharmaceutical product.

[0983] As used herein, the terms “increasing” and “decreasing” refer to modulating that results in, respectively, greater or lesser amounts of function, expression, or activity of a particular metric relative to a reference. For example, subsequent to administration to a cell, tissue or subject of a TREM described herein, the amount of a marker of a metric (e.g., protein translation, mRNA stability, protein folding) as described herein may be increased or decreased by at least 5%, 10%, 15%, 20%, 25%, 30%, 35%, 40%, 45%, 50%, 55%, 60%, 65%, 70%, 75%, 80%, 85%, 90%, 95% or 98%, 2X, 3X, 5X. 10X or more relative to the amount of the marker prior to administration or relative to the effect of a negative control agent. The metric may be measured subsequent to administration at a time that the administration has had the recited effect, e.g., at least 12 hours, 24 hours, one week, one month, 3 months, or 6 months, after a treatment has begun.

[0984] “Increased expression,” as that term is used herein, refers to an increase in comparison to a reference, e.g., in the case where altered control region, or addition of an agent, results in an increased expression of the subject product, it is increased relative to an otherwise similar cell without the alteration or addition.

[0985] A “non-cognate adaptor function TREM,” as that term is used herein, refers to a TREM which mediates initiation or elongation with an AA (a non-cognate AA) other than the AA associated in nature with the anti-codon of the TREM. In an embodiment, a non-cognate adaptor function TREM is also referred to as a mischarged TREM (mTREM).

[0986] A “non-naturally occurring sequence,” as that term is used herein, refers to a sequence wherein an Adenine is replaced by a residue other than an analog of Adenine, a Cytosine is replaced by a residue other than an analog of Cytosine, a Guanine is replaced by a residue other than an analog of Guanine, and a Uracil is replaced by a residue other than an analog of Uracil. An analog refers to any possible derivative of the ribonucleotides, A, G, C or U. In an embodiment, a sequence having a derivative of any one of ribonucleotides A, G, C or U is a non-naturally occurring sequence.

[0987] A “pharmaceutical TREM composition,” as that term is used herein, refers to a TREM composition that is suitable for pharmaceutical use. Typically, a pharmaceutical TREM composition comprises a pharmaceutical excipient. In an embodiment the TREM will be the only active ingredient in the pharmaceutical TREM composition. In embodiments the pharmaceutical TREM composition is free, substantially free, or has less than a pharmaceutically acceptable amount, of host cell proteins, DNA, e.g., host cell DNA, endotoxins, and bacteria.

[0988] A “post-transcriptional processing.” as that term is used herein, with respect to a subject molecule, e.g., a TREM, RNA or tRNAs, refers to a covalent modification of the subject molecule. In an embodiment, the covalent modification occurs post-transcriptionally. In an embodiment, the covalent modification occurs co-transcriptionally. In an embodiment the modification is made in vivo, e.g., in a cell used to produce a TREM. In an embodiment the modification is made ex vivo, e.g., it is made on a TREM isolated or obtained from the cell which produced the TREM. In an embodiment, the post-transcriptional modification is selected from a post-transcriptional modification listed in Table 2.

[0989] A “synthetic TREM,” as that term is used herein, refers to a TREM which was synthesized other than in or by a cell having an endogenous nucleic acid encoding the TREM, e.g., a synthetic TREM is synthetized by cell-free solid phase synthesis. A synthetic TREM can have the same, or a different, sequence, or tertiary structure, as a native tRNA.

[0990] A “recombinant TREM,” as that term is used herein, refers to a TREM that was expressed in a cell modified by human intervention, having a modification that mediates the production of the TREM, e.g., the cell comprises an exogenous sequence encoding the TREM, or a modification that mediates expression, e.g., transcriptional expression or post-transcriptional modification, of the TREM. A recombinant TREM can have the same, or a different, sequence, set of post-transcriptional modifications, or tertiary structure, as a reference tRNA, e.g., a native tRNA.

[0991] A “tRNA”, as that term is used herein, refers to a naturally occurring transfer ribonucleic acid in its native state.

[0992] A “TREM composition,” as that term is used herein, refers to a composition comprising a plurality of TREMs, a plurality of TREM core fragments and/or a plurality of TREM fragments. A TREM composition can comprise one or more species of TREMs, TREM core fragments or TREM fragments. In an embodiment, the composition comprises only a single species of TREM, TREM core fragment or TREM fragment. In an embodiment, the TREM composition comprises a first TREM, TREM core fragment or TREM fragment species; and a second TREM, TREM core fragment or TREM fragment species. In an embodiment, the TREM composition comprises X TREM, TREM core fragment or TREM fragment species, wherein X=2, 3, 4, 5, 6, 7, 8, 9, or 10. In an embodiment, the TREM, TREM core fragment or TREM fragment has at least 70, 75, 80, 85, 90, or 95, or has 100%, identity with a sequence encoded by a nucleic acid in Table 1. A TREM composition can comprise one or more species of TREMs, TREM core fragments or TREM fragments. In an embodiment, the TREM composition is at least 10, 20, 30, 40, 50, 60, 70, 80, 90, 95 or 99% dry weight TREMs (for a liquid composition dry weight refers to the weight after removal of substantially all liquid, e.g., after lyophilization). In an embodiment, the composition is a liquid. In an embodiment, the composition is dry, e.g., a lyophilized material. In an embodiment, the composition is a frozen composition. In an embodiment, the composition is sterile. In an embodiment, the composition comprises at least 0.5 g. 1.0 g. 5.0 g, 10 g, 15 g, 25 g, 50 g, 100 g, 200 g, 400 g, or 500 g (e.g., as determined by dry weight) of TREM.

[0993] In an embodiment, at least X % of the TREMs in a TREM composition has a non-naturally occurring modification at a selected position, and X is 80, 90, 95, 96, 97, 98, 99, or 99.5.

[0994] In an embodiment, at least X % of the TREMs in a TREM composition has a non-naturally occurring modification at a first position and a non-naturally occurring modification at a second position, and X, independently, is 80, 90, 95, 96, 97, 98, 99, or 99.5. In embodiments, the modification at the first and second position is the same. In embodiments, the modification at the first and second position are different. In embodiments, the nucleiotide at the first and second position is the same, e.g., both are adenine. In embodiments, the nucleiotide at the first and second position are different, e.g., one is adenine and one is thymine.

[0995] In an embodiment, at least X % of the TREMs in a TREM composition has a non-naturally occurring modification at a first position and less than Y % have a non-naturally occurring modification at a second position, wherein X is 80, 90, 95, 96, 97, 98, 99, or 99.5 and Y is 20, 20, 5, 2, 1 . . . 1, or 0.01. In embodiments, the nucleotide at the first and second position is the same, e.g., both are adenine. In embodiments the nucleotide at the first and second position are different, e.g., one is adenine and one is thymine.

### TREM, TREM Core Fragment and TREM Fragment

[0996] A “tRNA-based effector molecule” or “TREM” refers to an RNA molecule comprising one or more of the properties described herein. A TREM can comprise a non-naturally occurring modification, e.g., as provided in Tables 4, 5, 6 or 7.

[0997] In an embodiment, a TREM includes a TREM comprising a sequence of Formula A; a TREM core fragment comprising a sequence of Formula B; or a TREM fragment comprising a portion of a TREM which TREM comprises a sequence of Formula A.

[0998] In an embodiment, a TREM comprises a sequence of Formula A: [L1]-[ASt Domain1]-[L2]-[DH Domain]-[L3]-[ACH Domain]-[VL Domain]-[TH Domain]-[L4]-[ASt Domain2]. In an embodiment. [VL Domain] is optional. In an embodiment, [L1] is optional.

[0999] In an embodiment, a TREM core fragment comprises a sequence of Formula B: [L1]_{y}-[ASt Domain1]ₓ-[L2]_{y}-[DH Domain]_{y}-[L3]_{y}-[ACH Domain]ₓ-[VL Domain]_{y}-[TH Domain]_{y}-[L4]_{y}-[ASt Domain2]ₓ, wherein: x=1 and y=0 or 1. In an embodiment, y=0. In an embodiment, y=1.;

[1000] In an embodiment, a TREM fragment comprises a portion of a TREM, wherein the TREM comprises a sequence of Formula A: [L1]-[ASt Domain1]-[L2]-[DH Domain]-[L3]-[ACH Domain]-[VL Domain]-[TH Domain]-[L4]-[ASt Domain2], and wherein the TREM fragment comprises: one, two, three or all or any combination of the following: a TREM half (e.g., from a cleavage in the ACH Domain, e.g., in the anticodon sequence, e.g., a 5′half or a 3′ half); a 5′ fragment (e.g., a fragment comprising the 5′ end, e.g., from a cleavage in a DH Domain or the ACH Domain); a 3′ fragment (e.g., a fragment comprising the 3′ end, e.g., from a cleavage in the TH Domain); or an internal fragment (e.g., from a cleavage in any one of the ACH Domain, DH Domain or TH Domain). Exemplary TREM fragments include TREM halves (e.g., from a cleavage in the ACHD, e.g., 5′TREM halves or 3′ TREM halves), a 5′ fragment (e.g., a fragment comprising the 5′ end, e.g., from a cleavage in a DHD or the ACHD), a 3′ fragment (e.g., a fragment comprising the 3′ end of a TREM, e.g., from a cleavage in the THD), or an internal fragment (e.g., from a cleavage in one or more of the ACHD, DHD or THD).

[1001] In an embodiment, a TREM, a TREM core fragment or a TREM fragment can be charged with an amino acid (e.g., a cognate amino acid); charged with a non-cognate amino acid (e.g., a mischarged TREM (mTREM)); or not charged with an amino acid (e.g., an uncharged TREM (uTREM)). In an embodiment, a TREM, a TREM core fragment or a TREM fragment can be charged with an amino acid selected from alanine, arginine, asparagine, aspartate, cysteine, glutamine, glutamate, glycine, histidine, isoleucine, methionine, leucine, lysine, phenylalanine, proline, serine, threonine, tryptophan, tyrosine, or valine.

[1002] In some embodiments, a non-extended anticodon is an anticodon of no more than three nucleotides. In an embodiment, a non-extended codon pairs with no more than three codon nucleotides on a nucleic acid being translated.

[1003] In an embodiment, the TREM, TREM core fragment or TREM fragment is a cognate TREM. In an embodiment, the TREM, TREM core fragment or TREM fragment is a non-cognate TREM. In an embodiment, the TREM, TREM core fragment or TREM fragment recognizes a codon provided in Table 2 or Table 3.

TABLE 2

AAA
AAC
AAG
AAU
ACA
ACC
ACG
ACU
AGA
AGC
AGG
AGU
AUA
AUC
AUG
AUU
CAA
CAC
CAG
CAU
CCA
CCC
CCG
CCU
CGA
CGC
CGG
CGU
CUA
CUC
CUG
CUU
GAA
GAC
GAG
GAU
GCA
GCC
GCG
GCU
GGA
GGC
GGG
GGU
GUA
GUC
GUG
GUU
UAA
UAC
UAG
UAU
UCA
UCC
UCG
UCU
UGA
UGC
UGG
UGU
UUA
UUC
UUG
UUU

TABLE 3
Amino acids and corresponding codons

| Amino Acid | mRNA codons |
|---|---|
| Alanine | GCU, GCC, GCA, GCG |
| Arginine | CGU, CGC, CGA, CGG, AGA, AGG |
| Asparagine | AAU, AAC |
| Aspartate | GAU, GAC |
| Cysteine | UGU, UGC |
| Glutamate | GAA, GAG |
| Glutamine | CAA, CAG |
| Glycine | GGU, GGC, GGA, GGG |
| Histidine | CAU, CAC |
| Isoleucine | AUU, AUC, AUA |
| Leucine | UUA, UUG, CUU, CUC, CUA, CUG |
| Lysine | AAA, AAG |
| Methionine | AUG |
| Phenylalanine | UUU, UUC |
| Proline | CCU, CCC, CCA, CCG |
| Serine | UCU, UCC, UCA, UCG, AGU, AGC |
| Stop | UAA, UAG, UGA |
| Threonine | ACU, ACC, ACA, ACG |
| Tryptophan | UGG |
| Tyrosine | UAU, UAC |
| Valine | GUU, GUC, GUA, GUG |

[1004] In an embodiment, a TREM comprises a ribonucleic acid (RNA) sequence encoded by a deoxyribonucleic acid (DNA) sequence disclosed in Table 1, e.g., any one of SEQ ID NOs: 1-451 disclosed in Table 1. In an embodiment, a TREM comprises an RNA sequence at least 60%, 65%, 70%, 75%, 80%, 82%, 85%, 87%, 88%, 90%, 92%, 95%, 96%, 97%, 98%, or 99% identical to an RNA sequence encoded by a DNA sequence provided in Table 1, e.g., any one of SEQ ID NOs: 1-451 disclosed in Table 1. In an embodiment, a TREM comprises an RNA sequence encoded by a DNA sequence at least 60%, 65%, 70%, 75%, 80%, 82%, 85%, 87%, 88%, 90%, 92%, 95%, 96%, 97%, 98%, or 99% identical to a DNA sequence provided in Table 1, e.g., any one of SEQ ID NOs: 1-451 disclosed in Table 1.

[1005] In an embodiment, a TREM, a TREM core fragment, or TREM fragment comprises at least 5, 10, 15, 20, 25, or 30 consecutive nucleotides of an RNA sequence encoded by a DNA sequence disclosed in Table 1, e.g., at least 5, 10, 15, 20, 25, or 30 consecutive nucleotides of an RNA sequence encoded by any one of SEQ ID NOs: 1-451 disclosed in Table 1. In an embodiment, a TREM, a TREM core fragment, or TREM fragment comprises at least 5, 10, 15, 20, 25, or 30 consecutive nucleotides of an RNA sequence at least 60%, 65%, 70%, 75%, 80%. 82%, 85%, 87%, 88%, 90%, 92%, 95%, 96%, 97%, 98%, or 99% identical to an RNA sequence encoded by a DNA sequence provided in Table 1, e.g., any one of SEQ ID NOs: 1-451 disclosed in Table 1. In an embodiment, a TREM, a TREM core fragment, or TREM fragment comprises at least 5, 10, 15, 20, 25, or 30 consecutive nucleotides of an RNA sequence encoded by a DNA sequence at least 60%, 65%, 70%, 75%, 80%, 82%, 85%, 87%, 88%, 90%, 92%, 95%, 96%, 97%, 98%, or 99% identical to a DNA sequence provided in Table 1, e.g., any one of SEQ ID NOs: 1-451 disclosed in Table 1.

[1006] In an embodiment, a TREM core fragment or a TREM fragment comprises at least 5%, 10%, 15%, 20%, 25%, 30%, 35%, 40%, 50%, 55%, 60%, 65%, 70%, 75%, 80%, 85%, 90%, 95%, 96%, 97%, 98% or 99% of an RNA sequence encoded by a DNA sequence provided in Table 1, e.g., any one of SEQ ID NOs: 1-451 disclosed in Table 1. In an embodiment, a TREM core fragment or a TREM fragment comprises at least 5%, 10%, 15%, 20%, 25%, 30%, 35%, 40%, 50%, 55%, 60%, 65%, 70%, 75%, 80%, 85%, 90%, 95%, 96%, 97%, 98% or 99% of an RNA sequence at least 80%, 85%, 90%, 95%, 96%, 97%, 98%, or 99% identical to an RNA sequence encoded by a DNA sequence provided in Table 1, e.g., any one of SEQ ID NOs: 1-451 disclosed in Table 1. In an embodiment, a TREM core fragment or a TREM fragment comprises at least 5%, 10%, 15%, 20%, 25%, 30%, 35%, 40%, 50%, 55%, 60%, 65%, 70%, 75%, 80%, 85%, 90%, 95%, 96%, 97%, 98% or 99% of an RNA sequence encoded by a DNA sequence at least 80%, 85%, 90%, 95%, 96%, 97%, 98%, or 99% identical to a DNA sequence provided in Table 1, e.g., any one of SEQ ID NOs: 1-451 disclosed in Table 1.

[1007] In an embodiment, a TREM core fragment or a TREM fragment comprises at least 5 ribonucleotides (nt), 10 nt, 15 nt, 20 nt, 25 nt, 30 nt, 35 nt, 40 nt, 45 nt, 50 nt, 55 nt or 60 nt (but less than the full length) of an RNA sequence encoded by a DNA sequence disclosed in Table 1, e.g., any one of SEQ ID NOs: 1-451 disclosed in Table 1. In an embodiment, a TREM core fragment or a TREM fragment comprises at least 5 ribonucleotides (nt), 10 nt, 15 nt, 20 nt, 25 nt, 30 nt, 35 nt, 40 nt, 45 nt, 50 nt, 55 nt or 60 nt (but less than the full length) of an RNA sequence which is at least 80%, 85%, 90%, 95%, 96%, 97%, 98%, 99% or 100% identical to an RNA sequence encoded by a DNA sequence provided in Table 1, e.g., any one of SEQ ID NOs: 1-451 disclosed in Table 1. In an embodiment, a TREM core fragment or a TREM fragment comprises at least 5 ribonucleotides (nt), 10 nt, 15 nt, 20 nt, 25 nt, 30 nt, 35 nt, 40 nt, 45 nt, 50 nt, 55 nt or 60 nt (but less than the full length) of an RNA sequence encoded by a DNA sequence with at least 80%, 82%, 85%, 87%, 88%, 90%, 92%, 95%, 96%, 97%, 98%, 99% or 100% identity to a DNA sequence provided in Table 1, e.g., any one of SEQ ID NOs: 1-451 disclosed in Table 1.

[1008] In an embodiment, a TREM core fragment or a TREM fragment comprises a sequence of a length of between 10-90 ribonucleotides (rnt), between 10-80 rnt, between 10-70 rnt, between 10-60 rnt, between 10-50 rnt, between 10-40 rnt, between 10-30 rnt, between 10-20 rnt, between 20-90 rnt, between 20-80 rnt, 20-70 rnt, between 20-60 rnt, between 20-50 rnt, between 20-40 rnt, between 30-90 rnt, between 30-80 rnt, between 30-70 rnt, between 30-60 rnt, or between 30-50 rnt

TABLE 1
List of tRNA Sequences

| SEQ ID | | |
|---|---|---|
| NO | tRNA name | tRNA sequence |
| 1 | Ala_AGC_chr6:28763 | GGGGGTATAGCTCAGTGGTAGAGCGCGTGCT |
| | 741-28763812 (−) | TAGCATGCACGAGGTCCTGGGTTCGATCCCC |
| 2 | Ala_AGC_chr6:26687 | GGGGAATTAGCTCAAGTGGTAGAGCGCTTGC |
| | 485-26687557 (+) | TTAGCACGCAAGAGGTAGTGGGATCGATGCC |
| 3 | Ala_AGC_chr6:26572 | GGGGAATTAGCTCAAATGGTAGAGCGCTCGC |
| | 092-26572164 (−) | TTAGCATGCGAGAGGTAGCGGGATCGATGCC |
| 4 | Ala_AGC_chr6: 26682 | GGGGAATTAGCTCAAGTGGTAGAGCGCTTGC |
| | 715-26682787 (+) | TTAGCATGCAAGAGGTAGTGGGATCGATGCC |
| 5 | Ala_AGC_chr6: 26705 | GGGGAATTAGCTCAAGCGGTAGAGCGCTTGC |
| | 606-26705678 (+) | TTAGCATGCAAGAGGTAGTGGGATCGATGCC |
| 6 | Ala_AGC_chr6: 26673 | GGGGAATTAGCTCAAGTGGTAGAGCGCTTGC |
| | 590-26673662 (+) | TTAGCATGCAAGAGGTAGTGGGATCAATGCC |
| 7 | Ala_AGC_chr14: 8944 | GGGGAATTAGCTCAAGTGGTAGAGCGCTCGC |
| | 5442-89445514 (+) | TTAGCATGCGAGAGGTAGTGGGATCGATGCC |
| 8 | Ala_AGC_chr6: 58196 | GGGGAATTAGCCCAAGTGGTAGAGCGCTTGC |
| | 623-58196695 (−) | TTAGCATGCAAGAGGTAGTGGGATCGATGCC |
| 9 | Ala_AGC_chr6: 28806 | GGGGGTGTAGCTCAGTGGTAGAGCGCGTGCT |
| | 221-28806292 (−) | TAGCATGCACGAGGCCCCGGGTTCAATCCCC |
| 10 | Ala_AGC_chr6: 28574 | GGGGGTGTAGCTCAGTGGTAGAGCGCGTGCT |
| | 933-28575004 (+) | TAGCATGTACGAGGTCCCGGGTTCAATCCCC |
| 11 | Ala_AGC_chr6: 28626 | GGGGATGTAGCTCAGTGGTAGAGCGCATGCT |
| | 014-28626085 (−) | TAGCATGCATGAGGTCCCGGGTTCGATCCCC |
| 12 | Ala_AGC_chr6: 28678 | GGGGGTGTAGCTCAGTGGTAGAGCGCGTGCT |
| | 366-28678437 (+) | TAGCATGCACGAGGCCCTGGGTTCAATCCCC |
| 13 | Ala_AGC_chr6: 28779 | GGGGGTATAGCTCAGCGGTAGAGCGCGTGCT |
| | 849-28779920 (−) | TAGCATGCACGAGGTCCTGGGTTCAATCCCC |
| 14 | Ala_AGC_chr6: 28687 | GGGGGTGTAGCTCAGTGGTAGAGCGCGTGCT |
| | 481-28687552 (+) | TAGCATGCACGAGGCCCCGGGTTCAATCCCT |
| 15 | Ala_AGC_chr2: 27274 | GGGGGATTAGCTCAAATGGTAGAGCGCTCGC |
| | 082-27274154 (+) | TTAGCATGCGAGAGGTAGCGGGATCGATGCC |
| 16 | Ala_AGC_chr6: 26730 | GGGGAATTAGCTCAGGCGGTAGAGCGCTCGC |
| | 737-26730809 (+) | TTAGCATGCGAGAGGTAGCGGGATCGACGCC |
| 17 | Ala_CGC_chr6: 26553 | GGGGATGTAGCTCAGTGGTAGAGCGCATGCT |
| | 731-26553802 (+) | TCGCATGTATGAGGTCCCGGGTTCGATCCCC |
| 18 | Ala_CGC_chr6: 28641 | GGGGATGTAGCTCAGTGGTAGAGCGCATGCT |
| | 613-28641684 (−) | TCGCATGTATGAGGCCCCGGGTTCGATCCCC |
| 19 | Ala_CGC_chr2: 15725 | GGGGATGTAGCTCAGTGGTAGAGCGCGCGCT |
| | 7281-157257352 (+) | TCGCATGTGTGAGGTCCCGGGTTCAATCCCC |
| 20 | Ala_CGC_chr6: 28697 | GGGGGTGTAGCTCAGTGGTAGAGCGCGTGCT |
| | 092-28697163 (+) | TCGCATGTACGAGGCCCCGGGTTCGACCCCC |
| 21 | Ala_TGC_chr6: 28757 | GGGGGTGTAGCTCAGTGGTAGAGCGCATGCT |
| | 547-28757618 (−) | TTGCATGTATGAGGTCCCGGGTTCGATCCCC |
| 22 | Ala_TGC_chr6: 28611 | GGGGATGTAGCTCAGTGGTAGAGCGCATGCT |
| | 222-28611293 (+) | TTGCATGTATGAGGTCCCGGGTTCGATCCCC |
| 23 | Ala_TGC_chr5: 18063 | GGGGATGTAGCTCAGTGGTAGAGCGCATGCT |
| | 3868-180633939 (+) | TTGCATGTATGAGGCCCCGGGTTCGATCCCC |
| 24 | Ala_TGC_chr12: 1254 | GGGGATGTAGCTCAGTGGTAGAGCGCATGCT |
| | 24512-125424583 (+) | TTGCACGTATGAGGCCCCGGGTTCAATCCCC |
| 25 | Ala_TGC_chr6: 28785 | GGGGGTGTAGCTCAGTGGTAGAGCGCATGCT |
| | 012-28785083 (−) | TTGCATGTATGAGGCCTCGGGTTCGATCCCC |
| 26 | Ala_TGC_chr6: 28726 | GGGGGTGTAGCTCAGTGGTAGAGCACATGCT |
| | 141-28726212 (−) | TTGCATGTGTGAGGCCCCGGGTTCGATCCCC |
| 27 | Ala_TGC_chr6: 28770 | GGGGGTGTAGCTCAGTGGTAGAGCGCATGCT |
| | 577-28770647 (−) | TTGCATGTATGAGGCCTCGGTTCGATCCCCG |
| 28 | Arg_ACG_chr6: 26328 | GGGCCAGTGGCGCAATGGATAACGCGTCTGA |
| | 368-26328440 (+) | CTACGGATCAGAAGATTCCAGGTTCGACTCC |
| 29 | Arg_ACG_chr3: 45730 | GGGCCAGTGGCGCAATGGATAACGCGTCTGA |
| | 491-45730563 (−) | CTACGGATCAGAAGATTCTAGGTTCGACTCC |
| 30 | Arg_CCG_chr6: 28710 | GGCCGCGTGGCCTAATGGATAAGGCGTCTGA |
| | 729-28710801 (−) | TTCCGGATCAGAAGATTGAGGGTTCGAGTCC |
| 31 | Arg_CCG_chr17: 6601 | GACCCAGTGGCCTAATGGATAAGGCATCAGC |
| | 6013-66016085 (−) | CTCCGGAGCTGGGGATTGTGGGTTCGAGTCC |
| 32 | Arg_CCT_chr17: 7303 | GCCCCAGTGGCCTAATGGATAAGGCACTGGC |
| | 0001-73030073 (+) | CTCCTAAGCCAGGGATTGTGGGTTCGAGTCC |
| 33 | Arg_CCT_chr17: 7303 | GCCCCAGTGGCCTAATGGATAAGGCACTGGC |
| | 0526-73030598 (−) | CTCCTAAGCCAGGGATTGTGGGTTCGAGTCC |
| 34 | Arg_CCT_chr16: 3202 | GCCCCGGTGGCCTAATGGATAAGGCATTGGC |
| | 901-3202973 (+) | CTCCTAAGCCAGGGATTGTGGGTTCGAGTCC |
| 35 | Arg_CCT_chr7: 13902 | GCCCCAGTGGCCTAATGGATAAGGCATTGGC |
| | 5446-139025518 (+) | CTCCTAAGCCAGGGATTGTGGGTTCGAGTCC |
| 36 | Arg_CCT_chr16: 3243 | GCCCCAGTGGCCTGATGGATAAGGTACTGGC |
| | 918-3243990 (+) | CTCCTAAGCCAGGGATTGTGGGTTCGAGTTC |
| 37 | Arg_TCG_chr15: 8987 | GGCCGCGTGGCCTAATGGATAAGGCGTCTGA |
| | 8304-89878376 (+) | CTTCGGATCAGAAGATTGCAGGTTCGAGTCC |
| 38 | Arg_TCG_chr6: 26323 | GACCACGTGGCCTAATGGATAAGGCGTCTGA |
| | 046-26323118 (+) | CTTCGGATCAGAAGATTGAGGGTTCGAATCC |
| 39 | Arg_TCG_chr17: 7303 | GACCGCGTGGCCTAATGGATAAGGCGTCTGA |
| | 1208-73031280 (+) | CTTCGGATCAGAAGATTGAGGGTTCGAGTCC |
| 40 | Arg_TCG_chr6: 26299 | GACCACGTGGCCTAATGGATAAGGCGTCTGA |
| | 905-26299977 (+) | CTTCGGATCAGAAGATTGAGGGTTCGAATCC |
| 41 | Arg_TCG_chr6: 28510 | GACCACGTGGCCTAATGGATAAGGCGTCTGA |
| | 891-28510963 (−) | CTTCGGATCAGAAGATTGAGGGTTCGAATCC |
| 42 | Arg_TCG_chr9: 11296 | GGCCGTGTGGCCTAATGGATAAGGCGTCTGA |
| | 0803-112960875 (+) | CTTCGGATCAAAAGATTGCAGGTTTGAGTTC |
| 43 | Arg_TCT_chr1: 94313 | GGCTCCGTGGCGCAATGGATAGCGCATTGGA |
| | 129-94313213 (+) | CTTCTAGAGGCTGAAGGCATTCAAAGGTTCC |
| 44 | Arg_TCT_chr17: 8024 | GGCTCTGTGGCGCAATGGATAGCGCATTGGA |
| | 243-8024330 (+) | CTTCTAGTGACGAATAGAGCAATTCAAAGGT |
| 45 | Arg_TCT_chr9: 13110 | GGCTCTGTGGCGCAATGGATAGCGCATTGGA |
| | 2355-131102445 (−) | CTTCTAGCTGAGCCTAGTGTGGTCATTCAAA |
| 46 | Arg_TCT_chr11: 5931 | GGCTCTGTGGCGCAATGGATAGCGCATTGGA |
| | 8767-59318852 (+) | CTTCTAGATAGTTAGAGAAATTCAAAGGTTG |
| 47 | Arg_TCT_chr1: 15911 | GTCTCTGTGGCGCAATGGACGAGCGCGCTGG |
| | 1401-159111474 (−) | ACTTCTAATCCAGAGGTTCCGGGTTCGAGTC |
| 48 | Arg_TCT_chr6: 27529 | GGCTCTGTGGCGCAATGGATAGCGCATTGGA |
| | 963-27530049 (+) | CTTCTAGCCTAAATCAAGAGATTCAAAGGTT |
| 49 | Asn_GTT_chr1: 16151 | GTCTCTGTGGCGCAATCGGTTAGCGCGTTCG |
| | 0031-161510104 (+) | GCTGTTAACCGAAAGGTTGGTGGTTCGATCC |
| 50 | Asn_GTT_chr1: 14387 | GTCTCTGTGGCGCAATCGGCTAGCGCGTTTG |
| | 9832-143879905 (−) | GCTGTTAACTAAAAGGTTGGCGGTTCGAACC |
| 51 | Asn_GTT_chr1: 14430 | GTCTCTGTGGTGCAATCGGTTAGCGCGTTCCG |
| | 1611-144301684 (+) | CTGTTAACCGAAAGCTTGGTGGTTCGAGCCC |
| 52 | Asn_GTT_chr1: 14932 | GTCTCTGTGGCGCAATCGGCTAGCGCGTTTG |
| | 6272-149326345 (−) | GCTGTTAACTAAAAAGTTGGTGGTTCGAACA |
| 53 | Asn_GTT_chr1: 14824 | GTCTCTGTGGCGCAATCGGTTAGCGCGTTCG |
| | 8115-148248188 (+) | GCTGTTAACCGAAAGGTTGGTGGTTCGAGCC |
| 54 | Asn_GTT_chr1: 14859 | GTCTCTGTGGCGCAATCGGTTAGCGCATTCG |
| | 8314-148598387 (−) | GCTGTTAACCGAAAGGTTGGTGGTTCGAGCC |
| 55 | Asn_GTT_chr1: 17216 | GTCTCTGTGGCGCAATCGGTTAGCGCGTTCG |
| | 172-17216245 (+) | GCTGTTAACCGAAAGATTGGTGGTTCGAGCC |
| 56 | Asn_GTT_chr1: 16847 | GTCTCTGTGGCGCAATCGGTTAGCGCGTTCG |
| | 080-16847153 (−) | GCTGTTAACTGAAAGGTTGGTGGTTCGAGCC |
| 57 | Asn_GTT_chr1: 14923 | GTCTCTGTGGCGCAATGGGTTAGCGCGTTCG |
| | 0570-149230643 (−) | GCTGTTAACCGAAAGGTTGGTGGTTCGAGCC |
| 58 | Asn_GTT_chr1: 14800 | GTCTCTGTGGCGTAGTCGGTTAGCGCGTTCG |
| | 0805-148000878 (+) | GCTGTTAACCGAAAAGTTGGTGGTTCGAGCC |
| 59 | Asn_GTT_chr1: 14971 | GTCTCTGTGGCGCAATCGGCTAGCGCGTTTG |
| | 1798-149711871 (−) | GCTGTTAACTAAAAGGTTGGTGGTTCGAACC |
| 60 | Asn_GTT_chr1: 14597 | GTCTCTGTGGCGCAATCGGTTAGCGCGTTCG |
| | 9034-145979107 (−) | GCTGTTAACTGAAAGGTTAGTGGTTCGAGCC |
| 61 | Asp_GTC_chr12: 9889 | TCCTCGTTAGTATAGTGGTTAGTATCCCCGCC |
| | 7281-98897352 (+) | TGTCACGCGGGAGACCGGGGTTCAATTCCCC |
| 62 | Asp_GTC_chr1: 16141 | TCCTCGTTAGTATAGTGGTGAGTATCCCCGCC |
| | 0615-161410686 (−) | TGTCACGCGGGAGACCGGGGTTCGATTCCCC |
| 63 | Asp_GTC_chr6: 27551 | TCCTCGTTAGTATAGTGGTGAGTGTCCCCGTC |
| | 236-27551307 (−) | TGTCACGCGGGAGACCGGGGTTCGATTCCCC |
| 64 | Cys_GCA_chr7: 14900 | GGGGGCATAGCTCAGTGGTAGAGCATTTGAC |
| | 7281-149007352 (+) | TGCAGATCAAGAGGTCCCTGGTTCAAATCCA |
| 65 | Cys_GCA_chr7: 14907 | GGGGGTATAGCTCAGGGGTAGAGCATTTGAC |
| | 4601-149074672 (−) | TGCAGATCAAGAGGTCCCTGGTTCAAATCCA |
| 66 | Cys_GCA_chr7: 14911 | GGGGGTATAGCTTAGCGGTAGAGCATTTGAC |
| | 2229-149112300 (−) | TGCAGATCAAGAGGTCCCCGGTTCAAATCCG |
| 67 | Cys_GCA_chr7: 14934 | GGGGGTATAGCTTAGGGGTAGAGCATTTGAC |
| | 4046-149344117 (−) | TGCAGATCAAAAGGTCCCTGGTTCAAATCCA |
| 68 | Cys_GCA_chr7: 14905 | GGGGGTATAGCTCAGGGGTAGAGCATTTGAC |
| | 2766-149052837 (−) | TGCAGATCAAGAGGTCCCCAGTTCAAATCTG |
| 69 | Cys_GCA_chr17: 3701 | GGGGGTATAGCTCAGGGGTAGAGCATTTGAC |
| | 7937-37018008 (−) | TGCAGATCAAGAAGTCCCCGGTTCAAATCCG |
| 70 | Cys_GCA_chr7: 14928 | GGGGGTATAGCTCAGGGGTAGAGCATTTGAC |
| | 1816-149281887 (+) | TGCAGATCAAGAGGTCTCTGGTTCAAATCCA |
| 71 | Cys_GCA_chr7: 14924 | GGGGGTATAGCTCAGGGGTAGAGCACTTGAC |
| | 3631-149243702 (+) | TGCAGATCAAGAAGTCCTTGGTTCAAATCCA |
| 72 | Cys_GCA_chr7: 14938 | GGGGATATAGCTCAGGGGTAGAGCATTTGAC |
| | 8272-149388343 (−) | TGCAGATCAAGAGGTCCCCGGTTCAAATCCG |
| 73 | Cys_GCA_chr7: 14907 | GGGGGTATAGTTCAGGGGTAGAGCATTTGAC |
| | 2850-149072921 (−) | TGCAGATCAAGAGGTCCCTGGTTCAAATCCA |
| 74 | Cys_GCA_chr7: 14931 | GGGGGTATAGCTCAGGGGTAGAGCATTTGAC |
| | 0156-149310227 (−) | TGCAAATCAAGAGGTCCCTGATTCAAATCCA |
| 75 | Cys_GCA_chr4: 12443 | GGGGGTATAGCTCAGTGGTAGAGCATTTGAC |
| | 0005-124430076 (−) | TGCAGATCAAGAGGTCCCCGGTTCAAATCCG |
| 76 | Cys_GCA_chr7: 14929 | GGGCGTATAGCTCAGGGGTAGAGCATTTGAC |
| | 5046-149295117 (+) | TGCAGATCAAGAGGTCCCCAGTTCAAATCTG |
| 77 | Cys_GCA_chr7: 14936 | GGGGGTATAGCTCACAGGTAGAGCATTTGAC |
| | 1915-149361986 (+) | TGCAGATCAAGAGGTCCCCGGTTCAAATCTG |
| 78 | Cys_GCA_chr7: 14925 | GGGCGTATAGCTCAGGGGTAGAGCATTTGAC |
| | 3802-149253871 (+) | TGCAGATCAAGAGGTCCCCAGTTCAAATCTG |
| 79 | Cys_GCA_chr7: 14929 | GGGGGTATAGCTCACAGGTAGAGCATTTGAC |
| | 2305-149292376 (−) | TGCAGATCAAGAGGTCCCCGGTTCAAATCCG |
| 80 | Cys_GCA_chr7: 14928 | GGGGGTATAGCTCAGGGGTAGAGCACTTGAC |
| | 6164-149286235 (−) | TGCAGATCAAGAGGTCCCTGGTTCAAATCCA |
| 81 | Cys_GCA_chr17: 3702 | GGGGGTATAGCTCAGTGGTAGAGCATTTGAC |
| | 5545-37025616 (−) | TGCAGATCAAGAGGTCCCTGGTTCAAATCCG |
| 82 | Cys_GCA_chr15: 8003 | GGGGGTATAGCTCAGTGGGTAGAGCATTTGA |
| | 6997-80037069 (+) | CTGCAGATCAAGAGGTCCCCGGTTCAAATCC |
| 83 | Cys_GCA_chr3: 13194 | GGGGGTGTAGCTCAGTGGTAGAGCATTTGAC |
| | 7944-131948015 (−) | TGCAGATCAAGAGGTCCCTGGTTCAAATCCA |
| 84 | Cys_GCA_chr1: 93981 | GGGGGTATAGCTCAGGTGGTAGAGCATTTGA |
| | 834-93981906 (−) | CTGCAGATCAAGAGGTCCCCGGTTCAAATCC |
| 85 | Cys_GCA_chr14: 7342 | GGGGGTATAGCTCAGGGGTAGAGCATTTGAC |
| | 9679-73429750 (+) | TGCAGATCAAGAGGTCCCCGGTTCAAATCCG |
| 86 | Cys_GCA_chr3: 13195 | GGGGGTATAGCTCAGGGGTAGAGCATTTGAC |
| | 0642-131950713 (−) | TGCAGATCAAGAGGTCCCTGGTTCAAATCCA |
| 87 | Gln_CTG_chr6: 18836 | GGTTCCATGGTGTAATGGTTAGCACTCTGGA |
| | 402-18836473 (+) | CTCTGAATCCAGCGATCCGAGTTCAAATCTC |
| 88 | Gln_CTG_chr6: 27515 | GGTTCCATGGTGTAATGGTTAGCACTCTGGA |
| | 531-27515602 (−) | CTCTGAATCCAGCGATCCGAGTTCAAGTCTC |
| 89 | Gln_CTG_chr1: 14596 | GGTTCCATGGTGTAATGGTGAGCACTCTGGA |
| | 3304-145963375 (+) | CTCTGAATCCAGCGATCCGAGTTCGAGTCTC |
| 90 | Gln_CTG_chr1: 14773 | GGTTCCATGGTGTAATGGTAAGCACTCTGGA |
| | 7382-147737453 (−) | CTCTGAATCCAGCGATCCGAGTTCGAGTCTC |
| 91 | Gln_CTG_chr6: 27263 | GGTTCCATGGTGTAATGGTTAGCACTCTGGA |
| | 212-27263283 (+) | CTCTGAATCCGGTAATCCGAGTTCAAATCTC |
| 92 | Gln_CTG_chr6: 27759 | GGCCCCATGGTGTAATGGTCAGCACTCTGGA |
| | 135-27759206 (−) | CTCTGAATCCAGCGATCCGAGTTCAAATCTC |
| 93 | Gln_CTG_chr1: 14780 | GGTTCCATGGTGTAATGGTAAGCACTCTGGA |
| | 0937-147801008 (+) | CTCTGAATCCAGCCATCTGAGTTCGAGTCTCT |
| 94 | Gln_TTG_chr17: 4726 | GGTCCCATGGTGTAATGGTTAGCACTCTGGA |
| | 9890-47269961 (+) | CTTTGAATCCAGCGATCCGAGTTCAAATCTC |
| 95 | Gln_TTG_chr6: 28557 | GGTCCCATGGTGTAATGGTTAGCACTCTGGA |
| | 156-28557227 (+) | CTTTGAATCCAGCAATCCGAGTTCGAATCTC |
| 96 | Gln_TTG_chr6: 26311 | GGCCCCATGGTGTAATGGTTAGCACTCTGGA |
| | 424-26311495 (−) | CTTTGAATCCAGCGATCCGAGTTCAAATCTC |
| 97 | Gln_TTG_chr6: 14550 | GGTCCCATGGTGTAATGGTTAGCACTCTGGG |
| | 3859-145503930 (+) | CTTTGAATCCAGCAATCCGAGTTCGAATCTTG |
| 98 | Glu_CTC_chr1: 14539 | TCCCTGGTGGTCTAGTGGTTAGGATTCGGCG |
| | 9233-145399304 (−) | CTCTCACCGCCGCGGCCCGGGTTCGATTCCC |
| 99 | Glu_CTC_chr1: 24916 | TCCCTGGTGGTCTAGTGGTTAGGATTCGGCG |
| | 8447-249168518 (+) | CTCTCACCGCCGCGGCCCGGGTTCGATTCCC |
| 100 | Glu_TTC_chr2: 13109 | TCCCATATGGTCTAGCGGTTAGGATTCCTGGT |
| | 4701-131094772 (−) | TTTCACCCAGGTGGCCCGGGTTCGACTCCCG |
| 101 | Glu_TTC_chr13: 4549 | TCCCACATGGTCTAGCGGTTAGGATTCCTGGT |
| | 2062-45492133 (−) | TTTCACCCAGGCGGCCCGGGTTCGACTCCCG |
| 102 | Glu_TTC_chr1: 17199 | TCCCTGGTGGTCTAGTGGCTAGGATTCGGCG |
| | 078-17199149 (+) | CTTTCACCGCCGCGGCCCGGGTTCGATTCCCG |
| 103 | Glu_TTC_chr1: 16861 | TCCCTGGTGGTCTAGTGGCTAGGATTCGGCG |
| | 774-16861845 (−) | CTTTCACCGCCGCGGCCCGGGTTCGATTCCCG |
| 104 | Gly_CCC_chr1: 16872 | GCATTGGTGGTTCAGTGGTAGAATTCTCGCCT |
| | 434-16872504 (−) | CCCACGCGGGAGACCCGGGTTCAATTCCCGG |
| 105 | Gly_CCC_chr2: 70476 | GCGCCGCTGGTGTAGTGGTATCATGCAAGAT |
| | 123-70476193 (−) | TCCCATTCTTGCGACCCGGGTTCGATTCCCGG |
| 106 | Gly_CCC_chr17: 1976 | GCATTGGTGGTTCAATGGTAGAATTCTCGCCT |
| | 4175-19764245 (+) | CCCACGCAGGAGACCCAGGTTCGATTCCTGG |
| 107 | Gly_GCC_chr1: 16141 | GCATGGGTGGTTCAGTGGTAGAATTCTCGCC |
| | 3094-161413164 (+) | TGCCACGCGGGAGGCCCGGGTTCGATTCCCG |
| 108 | Gly_GCC_chr1: 16149 | GCATTGGTGGTTCAGTGGTAGAATTCTCGCCT |
| | 3637-161493707 (−) | GCCACGCGGGAGGCCCGGGTTCGATTCCCGG |
| 109 | Gly_GCC_chr16: 7081 | GCATTGGTGGTTCAGTGGTAGAATTCTCGCCT |
| | 2114-70812184 (−) | GCCACGCGGGAGGCCCGGGTTTGATTCCCGG |
| 110 | Gly_GCC_chr1: 16145 | GCATAGGTGGTTCAGTGGTAGAATTCTTGCC |
| | 0356-161450426 (+) | TGCCACGCAGGAGGCCCAGGTTTGATTCCTG |
| 111 | Gly_GCC_chr16: 7082 | GCATTGGTGGTTCAGTGGTAGAATTCTCGCCT |
| | 2597-70822667 (+) | GCCATGCGGGCGGCCGGGCTTCGATTCCTGG |
| 112 | Gly_TCC_chr19: 4724 | GCGTTGGTGGTATAGTGGTTAGCATAGCTGC |
| | 082-4724153 (+) | CTTCCAAGCAGTTGACCCGGGTTCGATTCCC |
| 113 | Gly_TCC_chr1: 14539 | GCGTTGGTGGTATAGTGGTGAGCATAGCTGC |
| | 7864-145397935 (−) | CTTCCAAGCAGTTGACCCGGGTTCGATTCCC |
| 114 | Gly_TCC_chr17: 8124 | GCGTTGGTGGTATAGTGGTAAGCATAGCTGC |
| | 866-8124937 (+) | CTTCCAAGCAGTTGACCCGGGTTCGATTCCC |
| 115 | Gly_TCC_chr1: 16140 | GCGTTGGTGGTATAGTGGTGAGCATAGTTGC |
| | 9961-161410032 (−) | CTTCCAAGCAGTTGACCCGGGCTCGATTCCC |
| 116 | His_GTG_chr1: 14539 | GCCGTGATCGTATAGTGGTTAGTACTCTGCGT |
| | 6881-145396952 (−) | TGTGGCCGCAGCAACCTCGGTTCGAATCCGA |
| 117 | His_GTG_chr1: 14915 | GCCATGATCGTATAGTGGTTAGTACTCTGCG |
| | 5828-149155899 (−) | CTGTGGCCGCAGCAACCTCGGTTCGAATCCG |
| 118 | Ile_AAT_chr6: 581492 | GGCCGGTTAGCTCAGTTGGTTAGAGCGTGGC |
| | 54-58149327 (+) | GCTAATAACGCCAAGGTCGCGGGTTCGATCC |
| 119 | Ile_AAT_chr6: 276559 | GGCCGGTTAGCTCAGTTGGTTAGAGCGTGGT |
| | 67-27656040 (+) | GCTAATAACGCCAAGGTCGCGGGTTCGATCC |
| 120 | Ile_AAT_chr6: 272429 | GGCTGGTTAGCTCAGTTGGTTAGAGCGTGGT |
| | 90-27243063 (−) | GCTAATAACGCCAAGGTCGCGGGTTCGATCC |
| 121 | Ile_AAT_chr17: 81303 | GGCCGGTTAGCTCAGTTGGTTAGAGCGTGGT |
| | 09-8130382 (−) | GCTAATAACGCCAAGGTCGCGGGTTCGAACC |
| 122 | Ile_AAT_chr6: 265543 | GGCCGGTTAGCTCAGTTGGTTAGAGCGTGGT |
| | 50-26554423 (+) | GCTAATAACGCCAAGGTCGCGGGTTCGATCC |
| 123 | Ile_AAT_chr6: 267452 | GGCCGGTTAGCTCAGTTGGTTAGAGCGTGGT |
| | 55-26745328 (−) | GCTAATAACGCTAAGGTCGCGGGTTCGATCC |
| 124 | Ile_AAT_chr6: 267212 | GGCCGGTTAGCTCAGTTGGTCAGAGCGTGGT |
| | 21-26721294 (−) | GCTAATAACGCCAAGGTCGCGGGTTCGATCC |
| 125 | Ile_AAT_chr6: 276363 | GGCCGGTTAGCTCAGTCGGCTAGAGCGTGGT |
| | 62-27636435 (+) | GCTAATAACGCCAAGGTCGCGGGTTCGATCC |
| 126 | Ile_AAT_chr6: 272417 | GGCTGGTTAGTTCAGTTGGTTAGAGCGTGGT |
| | 39-27241812 (+) | GCTAATAACGCCAAGGTCGTGGGTTCGATCC |
| 127 | Ile_GAT_chrX: 37564 | GGCCGGTTAGCTCAGTTGGTAAGAGCGTGGT |
| | 18-3756491 (−) | GCTGATAACACCAAGGTCGCGGGCTCGACTC |
| 128 | Ile_TAT_chr19: 39902 | GCTCCAGTGGCGCAATCGGTTAGCGCGCGGT |
| | 808-39902900 (−) | ACTTATATGACAGTGCGAGCGGAGCAATGCC |
| 129 | Ile_TAT_chr2: 430376 | GCTCCAGTGGCGCAATCGGTTAGCGCGCGGT |
| | 76-43037768 (+) | ACTTATACAGCAGTACATGCAGAGCAATGCC |
| 130 | Ile_TAT_chr6: 269881 | GCTCCAGTGGCGCAATCGGTTAGCGCGCGGT |
| | 25-26988218 (+) | ACTTATATGGCAGTATGTGTGCGAGTGATGC |
| 131 | Ile_TAT_chr6: 275992 | GCTCCAGTGGCGCAATCGGTTAGCGCGCGGT |
| | 00-27599293 (+) | ACTTATACAACAGTATATGTGCGGGTGATGC |
| 132 | Ile_TAT_chr6: 285053 | GCTCCAGTGGCGCAATCGGTTAGCGCGCGGT |
| | 67-28505460 (+) | ACTTATAAGACAGTGCACCTGTGAGCAATGC |
| 133 | Leu_AAG_chr5: 1805 | GGTAGCGTGGCCGAGCGGTCTAAGGCGCTGG |
| | 24474-180524555 (−) | ATTAAGGCTCCAGTCTCTTCGGAGGCGTGGG |
| 134 | Leu_AAG_chr5: 1806 | GGTAGCGTGGCCGAGCGGTCTAAGGCGCTGG |
| | 14701-180614782 (+) | ATTAAGGCTCCAGTCTCTTCGGGGGCGTGGG |
| 135 | Leu_AAG_chr6: 2895 | GGTAGCGTGGCCGAGCGGTCTAAGGCGCTGG |
| | 6779-28956860 (+) | ATTAAGGCTCCAGTCTCTTCGGGGGCGTGGG |
| 136 | Leu_AAG_chr6: 2844 | GGTAGCGTGGCCGAGTGGTCTAAGACGCTGG |
| | 6400-28446481 (−) | ATTAAGGCTCCAGTCTCTTCGGGGGCGTGGG |
| 137 | Leu_CAA_chr6: 28864 | GTCAGGATGGCCGAGTGGTCTAAGGCGCCAG |
| | 000-28864105 (−) | ACTCAAGCTAAGCTTCCTCCGCGGTGGGGAT |
| 138 | Leu_CAA_chr6: 28908 | GTCAGGATGGCCGAGTGGTCTAAGGCGCCAG |
| | 830-28908934 (+) | ACTCAAGCTTGGCTTCCTCGTGTTGAGGATTC |
| 139 | Leu_CAA_chr6: 27573 | GTCAGGATGGCCGAGTGGTCTAAGGCGCCAG |
| | 417-27573524 (−) | ACTCAAGCTTACTGCTTCCTGTGTTCGGGTCT |
| 140 | Leu_CAA_chr6: 27570 | GTCAGGATGGCCGAGTGGTCTAAGGCGCCAG |
| | 348-27570454 (−) | ACTCAAGTTGCTACTTCCCAGGTTTGGGGCTT |
| 141 | Leu_CAA_chr1: 24916 | GTCAGGATGGCCGAGTGGTCTAAGGCGCCAG |
| | 8054-249168159 (+) | ACTCAAGGTAAGCACCTTGCCTGCGGGCTTT |
| 142 | Leu_CAA_chr11: 9296 | GCCTCCTTAGTGCAGTAGGTAGCGCATCAGT |
| | 790-9296863 (+) | CTCAAAATCTGAATGGTCCTGAGTTCAAGCC |
| 143 | Leu_CAA_chr1: 16158 | GTCAGGATGGCCGAGCAGTCTTAAGGCGCTG |
| | 1736-161581819 (−) | CGTTCAAATCGCACCCTCCGCTGGAGGCGTG |
| 144 | Leu_CAG_chr1: 16141 | GTCAGGATGGCCGAGCGGTCTAAGGCGCTGC |
| | 1323-161411405 (+) | GTTCAGGTCGCAGTCTCCCCTGGAGGCGTGG |
| 145 | Leu_CAG_chr16: 5733 | GTCAGGATGGCCGAGCGGTCTAAGGCGCTGC |
| | 3863-57333945 (+) | GTTCAGGTCGCAGTCTCCCCTGGAGGCGTGG |
| 146 | Leu_TAA_chr6: 14453 | ACCAGGATGGCCGAGTGGTTAAGGCGTTGGA |
| | 7684-144537766 (+) | CTTAAGATCCAATGGACATATGTCCGCGTGG |
| 147 | Leu_TAA_chr6: 27688 | ACCGGGATGGCCGAGTGGTTAAGGCGTTGGA |
| | 898-27688980 (−) | CTTAAGATCCAATGGGCTGGTGCCCGCGTGG |
| 148 | Leu_TAA_chr11: 5931 | ACCAGAATGGCCGAGTGGTTAAGGCGTTGGA |
| | 9228-59319310 (+) | CTTAAGATCCAATGGATTCATATCCGCGTGG |
| 149 | Leu_TAA_chr6: 27198 | ACCGGGATGGCTGAGTGGTTAAGGCGTTGGA |
| | 334-27198416 (−) | CTTAAGATCCAATGGACAGGTGTCCGCGTGG |
| 150 | Leu_TAG_chr17: 8023 | GGTAGCGTGGCCGAGCGGTCTAAGGCGCTGG |
| | 632-8023713 (−) | ATTTAGGCTCCAGTCTCTTCGGAGGCGTGGG |
| 151 | Leu_TAG_chr14: 2109 | GGTAGTGTGGCCGAGCGGTCTAAGGCGCTGG |
| | 3529-21093610 (+) | ATTTAGGCTCCAGTCTCTTCGGGGGCGTGGG |
| 152 | Leu_TAG_chr16: 2220 | GGTAGCGTGGCCGAGTGGTCTAAGGCGCTGG |
| | 7032-22207113 (−) | ATTTAGGCTCCAGTCATTTCGATGGCGTGGGT |
| 153 | Lys_CTT_chr14: 5870 | GCCCGGCTAGCTCAGTCGGTAGAGCATGGGA |
| | 6613-58706685 (−) | CTCTTAATCCCAGGGTCGTGGGTTCGAGCCC |
| 154 | Lys_CTT_chr19: 3606 | GCCCAGCTAGCTCAGTCGGTAGAGCATAAGA |
| | 6750-36066822 (+) | CTCTTAATCTCAGGGTTGTGGATTCGTGCCCC |
| 155 | Lys_CTT_chr19: 5242 | GCAGCTAGCTCAGTCGGTAGAGCATGAGACT |
| | 5393-52425466 (−) | CTTAATCTCAGGGTCATGGGTTCGTGCCCCAT |
| 156 | Lys_CTT_chr1: 14539 | GCCCGGCTAGCTCAGTCGGTAGAGCATGAGA |
| | 5522-145395594 (−) | CTCTTAATCTCAGGGTCGTGGGTTCGAGCCCC |
| 157 | Lys_CTT_chr16: 3207 | GCCCGGCTAGCTCAGTCGGTAGAGCATGAGA |
| | 406-3207478 (−) | CCCTTAATCTCAGGGTCGTGGGTTCGAGCCC |
| 158 | Lys_CTT_chr16: 3241 | GCCCGGCTAGCTCAGTCGGTAGAGCATGGGA |
| | 501-3241573 (+) | CTCTTAATCTCAGGGTCGTGGGTTCGAGCCCC |
| 159 | Lys_CTT_chr16: 3230 | GCCCGGCTAGCTCAGTCGATAGAGCATGAGA |
| | 555-3230627 (−) | CTCTTAATCTCAGGGTCGTGGGTTCGAGCCG |
| 160 | Lys_CTT_chr1: 55423 | GCCCAGCTAGCTCAGTCGGTAGAGCATGAGA |
| | 542-55423614 (−) | CTCTTAATCTCAGGGTCATGGGTTTGAGCCCC |
| 161 | Lys_CTT_chr16: 3214 | GCCTGGCTAGCTCAGTCGGCAAAGCATGAGA |
| | 939-3215011 (+) | CTCTTAATCTCAGGGTCGTGGGCTCGAGCTCC |
| 162 | Lys_CTT_chr5: 26198 | GCCCGACTACCTCAGTCGGTGGAGCATGGGA |
| | 539-26198611 (−) | CTCTTCATCCCAGGGTTGTGGGTTCGAGCCCC |
| 163 | Lys_TTT_chr16: 7351 | GCCTGGATAGCTCAGTTGGTAGAGCATCAGA |
| | 2216-73512288 (−) | CTTTTAATCTGAGGGTCCAGGGTTCAAGTCCC |
| 164 | Lys_TTT_chr12: 2784 | ACCCAGATAGCTCAGTCAGTAGAGCATCAGA |
| | 3306-27843378 (+) | CTTTTAATCTGAGGGTCCAAGGTTCATGTCCC |
| 165 | Lys_TTT_chr11: 1224 | GCCTGGATAGCTCAGTTGGTAGAGCATCAGA |
| | 30655-122430727 (+) | CTTTTAATCTGAGGGTCCAGGGTTCAAGTCCC |
| 166 | Lys_TTT_chr1: 20447 | GCCCGGATAGCTCAGTCGGTAGAGCATCAGA |
| | 5655-204475727 (+) | CTTTTAATCTGAGGGTCCAGGGTTCAAGTCCC |
| 167 | Lys_TTT_chr6: 27559 | GCCTGGATAGCTCAGTCGGTAGAGCATCAGA |
| | 593-27559665 (−) | CTTTTAATCTGAGGGTCCAGGGTTCAAGTCCC |
| 168 | Lys_TTT_chr11: 5932 | GCCCGGATAGCTCAGTCGGTAGAGCATCAGA |
| | 3902-59323974 (+) | CTTTTAATCTGAGGGTCCGGGGTTCAAGTCCC |
| 169 | Lys_TTT_chr6: 27302 | GCCTGGGTAGCTCAGTCGGTAGAGCATCAGA |
| | 769-27302841 (−) | CTTTTAATCTGAGGGTCCAGGGTTCAAGTCCC |
| 170 | Lys_TTT_chr6: 28715 | GCCTGGATAGCTCAGTTGGTAGAACATCAGA |
| | 521-28715593 (+) | CTTTTAATCTGACGGTGCAGGGTTCAAGTCCC |
| 171 | Met_CAT_chr8: 12416 | GCCTCGTTAGCGCAGTAGGTAGCGCGTCAGT |
| | 9470-124169542 (−) | CTCATAATCTGAAGGTCGTGAGTTCGATCCTC |
| 172 | Met_CAT_chr16: 7146 | GCCCTCTTAGCGCAGTGGGCAGCGCGTCAGT |
| | 0396-71460468 (+) | CTCATAATCTGAAGGTCCTGAGTTCGAGCCT |
| 173 | Met_CAT_chr6: 28912 | GCCTCCTTAGCGCAGTAGGCAGCGCGTCAGT |
| | 352-28912424 (+) | CTCATAATCTGAAGGTCCTGAGTTCGAACCT |
| 174 | Met_CAT_chr6: 26735 | GCCCTCTTAGCGCAGCGGGCAGCGCGTCAGT |
| | 574-26735646 (−) | CTCATAATCTGAAGGTCCTGAGTTCGAGCCT |
| 175 | Met_CAT_chr6: 26701 | GCCCTCTTAGCGCAGCTGGCAGCGCGTCAGT |
| | 712-26701784 (+) | CTCATAATCTGAAGGTCCTGAGTTCAAGCCT |
| 176 | Met_CAT_chr16: 8741 | GCCTCGTTAGCGCAGTAGGCAGCGCGTCAGT |
| | 7628-87417700 (−) | CTCATAATCTGAAGGTCGTGAGTTCGAGCCT |
| 177 | Met_CAT_chr6: 58168 | GCCCTCTTAGTGCAGCTGGCAGCGCGTCAGT |
| | 492-58168564 (−) | TTCATAATCTGAAAGTCCTGAGTTCAAGCCTC |
| 178 | Phe_GAA_chr6: 28758 | GCCGAAATAGCTCAGTTGGGAGAGCGTTAGA |
| | 499-28758571 (−) | CTGAAGATCTAAAGGTCCCTGGTTCGATCCC |
| 179 | Phe_GAA_chr11: 5933 | GCCGAAATAGCTCAGTTGGGAGAGCGTTAGA |
| | 3853-59333925 (−) | CTGAAGATCTAAAGGTCCCTGGTTCAATCCC |
| 180 | Phe_GAA_chr6: 28775 | GCCGAGATAGCTCAGTTGGGAGAGCGTTAGA |
| | 610-28775682 (−) | CTGAAGATCTAAAGGTCCCTGGTTCAATCCC |
| 181 | Phe_GAA_chr6: 28791 | GCCGAAATAGCTCAGTTGGGAGAGCGTTAGA |
| | 093-28791166 (−) | CCGAAGATCTTAAAGGTCCCTGGTTCAATCC |
| 182 | Phe_GAA_chr6: 28731 | GCTGAAATAGCTCAGTTGGGAGAGCGTTAGA |
| | 374-28731447 (−) | CTGAAGATCTTAAAGTTCCCTGGTTCAACCCT |
| 183 | Pro_AGG_chr16: 3241 | GGCTCGTTGGTCTAGGGGTATGATTCTCGCTT |
| | 989-3242060 (+) | AGGATGCGAGAGGTCCCGGGTTCAAATCCCG |
| 184 | Pro_AGG_chr1: 16768 | GGCTCGTTGGTCTAGGGGTATGATTCTCGCTT |
| | 4725-167684796 (−) | AGGGTGCGAGAGGTCCCGGGTTCAAATCCCG |
| 185 | Pro_CGG_chr1: 16768 | GGCTCGTTGGTCTAGGGGTATGATTCTCGCTT |
| | 3962-167684033 (+) | CGGGTGCGAGAGGTCCCGGGTTCAAATCCCG |
| 186 | Pro_CGG_chr6: 27059 | GGCTCGTTGGTCTAGGGGTATGATTCTCGCTT |
| | 521-27059592 (+) | CGGGTGTGAGAGGTCCCGGGTTCAAATCCCG |
| 187 | Pro_TGG_chr14: 2110 | GGCTCGTTGGTCTAGTGGTATGATTCTCGCTT |
| | 1165-21101236 (+) | TGGGTGCGAGAGGTCCCGGGTTCAAATCCCG |
| 188 | Pro_TGG_chr11: 7594 | GGCTCGTTGGTCTAGGGGTATGATTCTCGGTT |
| | 6869-75946940 (−) | TGGGTCCGAGAGGTCCCGGGTTCAAATCCCG |
| 189 | Pro_TGG_chr5: 18061 | GGCTCGTTGGTCTAGGGGTATGATTCTCGCTT |
| | 5854-180615925 (−) | TGGGTGCGAGAGGTCCCGGGTTCAAATCCCG |
| 190 | SeC_TCA_chr19: 4598 | GCCCGGATGATCCTCAGTGGTCTGGGGTGCA |
| | 1859-45981945 (−) | GGCTTCAAACCTGTAGCTGTCTAGCGACAGA |
| 191 | SeC_TCA_chr22: 4454 | GCTCGGATGATCCTCAGTGGTCTGGGGTGCA |
| | 6537-44546620 (+) | GGCTTCAAACCTGTAGCTGTCTAGTGACAGA |
| 192 | Ser_AGA_chr6: 27509 | GTAGTCGTGGCCGAGTGGTTAAGGCGATGGA |
| | 554-27509635 (−) | CTAGAAATCCATTGGGGTTTCCCCGCGCAGG |
| 193 | Ser_AGA_chr6: 26327 | GTAGTCGTGGCCGAGTGGTTAAGGCGATGGA |
| | 817-26327898 (+) | CTAGAAATCCATTGGGGTCTCCCCGCGCAGG |
| 194 | Ser_AGA_chr6: 27499 | GTAGTCGTGGCCGAGTGGTTAAGGCGATGGA |
| | 987-27500068 (+) | CTAGAAATCCATTGGGGTTTCCCCACGCAGG |
| 195 | Ser_AGA_chr6: 27521 | GTAGTCGTGGCCGAGTGGTTAAGGTGATGGA |
| | 192-27521273 (−) | CTAGAAACCCATTGGGGTCTCCCCGCGCAGG |
| 196 | Ser_CGA_chr17: 8042 | GCTGTGATGGCCGAGTGGTTAAGGCGTTGGA |
| | 199-8042280 (−) | CTCGAAATCCAATGGGGTCTCCCCGCGCAGG |
| 197 | Ser_CGA_chr6: 27177 | GCTGTGATGGCCGAGTGGTTAAGGCGTTGGA |
| | 628-27177709 (+) | CTCGAAATCCAATGGGGTCTCCCCGCGCAGG |
| 198 | Ser_CGA_chr6: 27640 | GCTGTGATGGCCGAGTGGTTAAGGTGTTGGA |
| | 229-27640310 (−) | CTCGAAATCCAATGGGGGTTCCCCGCGCAGG |
| 199 | Ser_CGA_chr12: 5658 | GTCACGGTGGCCGAGTGGTTAAGGCGTTGGA |
| | 4148-56584229 (+) | CTCGAAATCCAATGGGGTTTCCCCGCACAGG |
| 200 | Ser_GCT_chr6: 27065 | GACGAGGTGGCCGAGTGGTTAAGGCGATGG |
| | 085-27065166 (+) | ACTGCTAATCCATTGTGCTCTGCACGCGTGG |
| 201 | Ser_GCT_chr6: 27265 | GACGAGGTGGCCGAGTGGTTAAGGCGATGG |
| | 775-27265856 (+) | ACTGCTAATCCATTGTGCTCTGCACGCGTGG |
| 202 | Ser_GCT_chr11: 6611 | GACGAGGTGGCCGAGTGGTTAAGGCGATGG |
| | 5591-66115672 (+) | ACTGCTAATCCATTGTGCTTTGCACGCGTGGG |
| 203 | Ser_GCT_chr6: 28565 | GACGAGGTGGCCGAGTGGTTAAGGCGATGG |
| | 117-28565198 (−) | ACTGCTAATCCATTGTGCTCTGCACGCGTGG |
| 204 | Ser_GCT_chr6: 28180 | GACGAGGTGGCCGAGTGGTTAAGGCGATGG |
| | 815-28180896 (+) | ACTGCTAATCCATTGTGCTCTGCACACGTGG |
| 205 | Ser_GCT_chr6: 26305 | GGAGAGGCCTGGCCGAGTGGTTAAGGCGATG |
| | 718-26305801 (−) | GACTGCTAATCCATTGTGCTCTGCACGCGTG |
| 206 | Ser_TGA_chr10: 6952 | GCAGCGATGGCCGAGTGGTTAAGGCGTTGGA |
| | 4261-69524342 (+) | CTTGAAATCCAATGGGGTCTCCCCGCGCAGG |
| 207 | Ser_TGA_chr6: 27513 | GTAGTCGTGGCCGAGTGGTTAAGGCGATGGA |
| | 468-27513549 (+) | CTTGAAATCCATTGGGGTTTCCCCGCGCAGG |
| 208 | Ser_TGA_chr6: 26312 | GTAGTCGTGGCCGAGTGGTTAAGGCGATGGA |
| | 824-26312905 (−) | CTTGAAATCCATTGGGGTCTCCCCGCGCAGG |
| 209 | Ser_TGA_chr6: 27473 | GTAGTCGTGGCCGAGTGGTTAAGGCGATGGA |
| | 607-27473688 (−) | CTTGAAATCCATTGGGGTTTCCCCGCGCAGG |
| 210 | Thr_AGT_chr17: 8090 | GGCGCCGTGGCTTAGTTGGTTAAAGCGCCTG |
| | 478-8090551 (+) | TCTAGTAAACAGGAGATCCTGGGTTCGAATC |
| 211 | Thr_AGT_chr6: 26533 | GGCTCCGTGGCTTAGCTGGTTAAAGCGCCTG |
| | 145-26533218 (−) | TCTAGTAAACAGGAGATCCTGGGTTCGAATC |
| 212 | Thr_AGT_chr6: 28693 | GGCTCCGTAGCTTAGTTGGTTAAAGCGCCTG |
| | 795-28693868 (+) | TCTAGTAAACAGGAGATCCTGGGTTCGACTC |
| 213 | Thr_AGT_chr6: 27694 | GGCTTCGTGGCTTAGCTGGTTAAAGCGCCTG |
| | 473-27694546 (+) | TCTAGTAAACAGGAGATCCTGGGTTCGAATC |
| 214 | Thr_AGT_chr17: 8042 | GGCGCCGTGGCTTAGCTGGTTAAAGCGCCTG |
| | 770-8042843 (−) | TCTAGTAAACAGGAGATCCTGGGTTCGAATC |
| 215 | Thr_AGT_chr6: 27130 | GGCCCTGTGGCTTAGCTGGTCAAAGCGCCTG |
| | 050-27130123 (+) | TCTAGTAAACAGGAGATCCTGGGTTCGAATC |
| 216 | Thr_CGT_chr6: 28456 | GGCTCTATGGCTTAGTTGGTTAAAGCGCCTGT |
| | 770-28456843 (−) | CTCGTAAACAGGAGATCCTGGGTTCGACTCC |
| 217 | Thr_CGT_chr16: 1437 | GGCGCGGTGGCCAAGTGGTAAGGCGTCGGTC |
| | 9750-14379821 (+) | TCGTAAACCGAAGATCACGGGTTCGAACCCC |
| 218 | Thr_CGT_chr6: 28615 | GGCTCTGTGGCTTAGTTGGCTAAAGCGCCTG |
| | 984-28616057 (−) | TCTCGTAAACAGGAGATCCTGGGTTCGAATC |
| 219 | Thr_CGT_chr17: 2987 | GGCGCGGTGGCCAAGTGGTAAGGCGTCGGTC |
| | 7093-29877164 (+) | TCGTAAACCGAAGATCGCGGGTTCGAACCCC |
| 220 | Thr_CGT_chr6: 27586 | GGCCCTGTAGCTCAGCGGTTGGAGCGCTGGT |
| | 135-27586208 (+) | CTCGTAAACCTAGGGGTCGTGAGTTCAAATC |
| 221 | Thr_TGT_chr6: 28442 | GGCTCTATGGCTTAGTTGGTTAAAGCGCCTGT |
| | 329-28442402 (−) | CTTGTAAACAGGAGATCCTGGGTTCGAATCC |
| 222 | Thr_TGT_chr1: 22263 | GGCTCCATAGCTCAGTGGTTAGAGCACTGGT |
| | 8347-222638419 (+) | CTTGTAAACCAGGGGTCGCGAGTTCGATCCT |
| 223 | Thr_TGT_chr14: 2108 | GGCTCCATAGCTCAGGGGTTAGAGCGCTGGT |
| | 1949-21082021 (−) | CTTGTAAACCAGGGGTCGCGAGTTCAATTCT |
| 224 | Thr_TGT_chr14: 2109 | GGCTCCATAGCTCAGGGGTTAGAGCACTGGT |
| | 9319-21099391 (−) | CTTGTAAACCAGGGGTCGCGAGTTCAAATCT |
| 225 | Thr_TGT_chr14: 2114 | GGCCCTATAGCTCAGGGGTTAGAGCACTGGT |
| | 9849-21149921 (+) | CTTGTAAACCAGGGGTCGCGAGTTCAAATCT |
| 226 | Thr_TGT_chr5: 18061 | GGCTCCATAGCTCAGGGGTTAGAGCACTGGT |
| | 8687-180618758 (−) | CTTGTAAACCAGGGTCGCGAGTTCAAATCTC |
| 227 | Trp_CCA_chr17: 8124 | GGCCTCGTGGCGCAACGGTAGCGCGTCTGAC |
| | 187-8124258 (−) | TCCAGATCAGAAGGTTGCGTGTTCAAATCAC |
| 228 | Trp_CCA_chr17: 1941 | GACCTCGTGGCGCAATGGTAGCGCGTCTGAC |
| | 1494-19411565 (+) | TCCAGATCAGAAGGTTGCGTGTTCAAGTCAC |
| 229 | Trp_CCA_chr6: 26319 | GACCTCGTGGCGCAACGGTAGCGCGTCTGAC |
| | 330-26319401 (−) | TCCAGATCAGAAGGTTGCGTGTTCAAATCAC |
| 230 | Trp_CCA_chr12: 9889 | GACCTCGTGGCGCAACGGTAGCGCGTCTGAC |
| | 8030-98898101 (+) | TCCAGATCAGAAGGCTGCGTGTTCGAATCAC |
| 231 | Trp_CCA_chr7: 99067 | GACCTCGTGGCGCAACGGCAGCGCGTCTGAC |
| | 307-99067378 (+) | TCCAGATCAGAAGGTTGCGTGTTCAAATCAC |
| 232 | Tyr_ATA_chr2: 21911 | CCTTCAATAGTTCAGCTGGTAGAGCAGAGGA |
| | 0549-219110641 (+) | CTATAGCTACTTCCTCAGTAGGAGACGTCCTT |
| 233 | Tyr_GTA_chr6: 26569 | CCTTCGATAGCTCAGTTGGTAGAGCGGAGGA |
| | 086-26569176 (+) | CTGTAGTTGGCTGTGTCCTTAGACATCCTTAG |
| 234 | Tyr_GTA_chr2: 27273 | CCTTCGATAGCTCAGTTGGTAGAGCGGAGGA |
| | 650-27273738 (+) | CTGTAGTGGATAGGGCGTGGCAATCCTTAGG |
| 235 | Tyr_GTA_chr6: 26577 | CCTTCGATAGCTCAGTTGGTAGAGCGGAGGA |
| | 332-26577420 (+) | CTGTAGGCTCATTAAGCAAGGTATCCTTAGG |
| 236 | Tyr_GTA_chr14: 2112 | CCTTCGATAGCTCAGCTGGTAGAGCGGAGGA |
| | 5623-21125716 (−) | CTGTAGATTGTATAGACATTTGCGGACATCCT |
| 237 | Tyr_GTA_chr8: 67025 | CCTTCGATAGCTCAGCTGGTAGAGCGGAGGA |
| | 602-67025694 (+) | CTGTAGCTACTTCCTCAGCAGGAGACATCCTT |
| 238 | Tyr_GTA_chr8: 67026 | CCTTCGATAGCTCAGCTGGTAGAGCGGAGGA |
| | 223-67026311 (+) | CTGTAGGCGCGCGCCCGTGGCCATCCTTAGG |
| 239 | Tyr_GTA_chr14: 2112 | CCTTCGATAGCTCAGCTGGTAGAGCGGAGGA |
| | 1258-21121351 (−) | CTGTAGCCTGTAGAAACATTTGTGGACATCC |
| 240 | Tyr_GTA_chr14: 2113 | CCTTCGATAGCTCAGCTGGTAGAGCGGAGGA |
| | 1351-21131444 (−) | CTGTAGATTGTACAGACATTTGCGGACATCC |
| 241 | Tyr_GTA_chr14: 2115 | CCTTCGATAGCTCAGCTGGTAGAGCGGAGGA |
| | 1432-21151520 (+) | CTGTAGTACTTAATGTGTGGTCATCCTTAGGT |
| 242 | Tyr_GTA_chr6: 26595 | CCTTCGATAGCTCAGCTGGTAGAGCGGAGGA |
| | 102-26595190 (+) | CTGTAGGGGTTTGAATGTGGTCATCCTTAGGT |
| 243 | Tyr_GTA_chr14: 2112 | CCTTCGATAGCTCAGCTGGTAGAGCGGAGGA |
| | 8117-21128210 (−) | CTGTAGACTGCGGAAACGTTTGTGGACATCC |
| 244 | Tyr_GTA_chr6: 26575 | CTTTCGATAGCTCAGTTGGTAGAGCGGAGGA |
| | 798-26575887 (+) | CTGTAGGTTCATTAAACTAAGGCATCCTTAG |
| 245 | Tyr_GTA_chr8: 66609 | TCTTCAATAGCTCAGCTGGTAGAGCGGAGGA |
| | 532-66609619 (−) | CTGTAGGTGCACGCCCGTGGCCATTCTTAGG |
| 246 | Val_AAC_chr3: 16949 | GTTTCCGTAGTGTAGTGGTTATCACGTTCGCC |
| | 0018-169490090 (+) | TAACACGCGAAAGGTCCCCGGTTCGAAACCG |
| 247 | Val_AAC_chr5: 18061 | GTTTCCGTAGTGTAGTGGTCATCACGTTCGCC |
| | 5416-180615488 (−) | TAACACGCGAAAGGTCCCCGGTTCGAAACCG |
| 248 | Val_AAC_chr6: 27618 | GTTTCCGTAGTGTAGTGGTTATCACGTTCGCC |
| | 707-27618779 (−) | TAACACGCGAAAGGTCCCTGGATCAAAACCA |
| 249 | Val_AAC_chr6: 27648 | GTTTCCGTAGTGTAGTGGTTATCACGTTCGCC |
| | 885-27648957 (−) | TAACACGCGAAAGGTCCGCGGTTCGAAACCG |
| 250 | Val_AAC_chr6: 27203 | GTTTCCGTAGTGTAGTGGTTATCACGTTTGCC |
| | 288-27203360 (+) | TAACACGCGAAAGGTCCCCGGTTCGAAACCG |
| 251 | Val_AAC_chr6: 28703 | GGGGGTGTAGCTCAGTGGTAGAGCGTATGCT |
| | 206-28703277 (−) | TAACATTCATGAGGCTCTGGGTTCGATCCCC |
| 252 | Val_CAC_chr1: 16136 | GTTTCCGTAGTGTAGTGGTTATCACGTTCGCC |
| | 9490-161369562 (−) | TCACACGCGAAAGGTCCCCGGTTCGAAACCG |
| 253 | Val_CAC_chr6: 27248 | GCTTCTGTAGTGTAGTGGTTATCACGTTCGCC |
| | 049-27248121 (−) | TCACACGCGAAAGGTCCCCGGTTCGAAACCG |
| 254 | Val_CAC_chr19: 4724 | GTTTCCGTAGTGTAGCGGTTATCACATTCGCC |
| | 647-4724719 (−) | TCACACGCGAAAGGTCCCCGGTTCGATCCCG |
| 255 | Val_CAC_chr1: 14929 | GTTTCCGTAGTGTAGTGGTTATCACGTTCGCC |
| | 8555-149298627 (−) | TCACACGCGAAAGGTCCCCGGTTCGAAACTG |
| 256 | Val_CAC_chr1: 14968 | GTTTCCGTAGTGTAGTGGTTATCACGTTCGCC |
| | 4088-149684161 (−) | TCACACGCGTAAAGGTCCCCGGTTCGAAACC |
| 257 | Val_CAC_chr6: 27173 | GTTTCCGTAGTGGAGTGGTTATCACGTTCGCC |
| | 867-27173939 (−) | TCACACGCGAAAGGTCCCCGGTTTGAAACCA |
| 258 | Val_TAC_chr11: 5931 | GGTTCCATAGTGTAGTGGTTATCACGTCTGCT |
| | 8102-59318174 (−) | TTACACGCAGAAGGTCCTGGGTTCGAGCCCC |
| 259 | Val_TAC_chr11: 5931 | GGTTCCATAGTGTAGCGGTTATCACGTCTGCT |
| | 8460-59318532 (−) | TTACACGCAGAAGGTCCTGGGTTCGAGCCCC |
| 260 | Val_TAC_chr10: 5895 | GGTTCCATAGTGTAGTGGTTATCACATCTGCT |
| | 674-5895746 (−) | TTACACGCAGAAGGTCCTGGGTTCAAGCCCC |
| 261 | Val_TAC_chr6: 27258 | GTTTCCGTGGTGTAGTGGTTATCACATTCGCC |
| | 405-27258477 (+) | TTACACGCGAAAGGTCCTCGGGTCGAAACCG |
| 262 | iMet_CAT_chr1: 1536 | AGCAGAGTGGCGCAGCGGAAGCGTGCTGGG |
| | 43726-153643797 (+) | CCCATAACCCAGAGGTCGATGGATCGAAACC |
| 263 | iMet_CAT_chr6: 2774 | AGCAGAGTGGCGCAGCGGAAGCGTGCTGGG |
| | 5664-27745735 (+) | CCCATAACCCAGAGGTCGATGGATCTAAACC |
| 264 | Glu_TTC_chr1: 16861 | TCCCTGGTGGTCTAGTGGCTAGGATTCGGCG |
| | 773-16861845 (−) | CTTTCACCGCCGCGGCCCGGGTTCGATTCCCG |
| 265 | Gly_CCC_chr1: 17004 | GCGTTGGTGGTTTAGTGGTAGAATTCTCGCCT |
| | 765-17004836 (−) | CCCATGCGGGAGACCCGGGTTCAATTCCCGG |
| 266 | Gly_CCC_chr1: 17053 | GGCCTTGGTGGTGCAGTGGTAGAATTCTCGC |
| | 779-17053850 (+) | CTCCCACGTGGGAGACCCGGGTTCAATTCCC |
| 267 | Glu_TTC_chr1: 17199 | GTCCCTGGTGGTCTAGTGGCTAGGATTCGGC |
| | 077-17199149 (+) | GCTTTCACCGCCGCGGCCCGGGTTCGATTCCC |
| 268 | Asn_GTT_chr1: 17216 | TGTCTCTGTGGCGCAATCGGTTAGCGCGTTCG |
| | 171-17216245 (+) | GCTGTTAACCGAAAGATTGGTGGTTCGAGCC |
| 269 | Arg_TCT_chr1: 94313 | TGGCTCCGTGGCGCAATGGATAGCGCATTGG |
| | 128-94313213 (+) | ACTTCTAGAGGCTGAAGGCATTCAAAGGTTC |
| 270 | Lys_CTT_chr1: 14539 | GCCCGGCTAGCTCAGTCGGTAGAGCATGAGA |
| | 5521-145395594 (−) | CTCTTAATCTCAGGGTCGTGGGTTCGAGCCCC |
| 271 | His_GTG_chr1: 14539 | GCCGTGATCGTATAGTGGTTAGTACTCTGCGT |
| | 6880-145396952 (−) | TGTGGCCGCAGCAACCTCGGTTCGAATCCGA |
| 272 | Gly_TCC_chr1: 14539 | GCGTTGGTGGTATAGTGGTGAGCATAGCTGC |
| | 7863-145397935 (−) | CTTCCAAGCAGTTGACCCGGGTTCGATTCCC |
| 273 | Glu_CTC_chr1: 14539 | TCCCTGGTGGTCTAGTGGTTAGGATTCGGCG |
| | 9232-145399304 (−) | CTCTCACCGCCGCGGCCCGGGTTCGATTCCC |
| 274 | Gln_CTG_chr1: 14596 | AGGTTCCATGGTGTAATGGTGAGCACTCTGG |
| | 3303-145963375 (+) | ACTCTGAATCCAGCGATCCGAGTTCGAGTCT |
| 275 | Asn_GTT_chr1: 14800 | TGTCTCTGTGGCGTAGTCGGTTAGCGCGTTCG |
| | 0804-148000878 (+) | GCTGTTAACCGAAAAGTTGGTGGTTCGAGCC |
| 276 | Asn_GTT_chr1: 14824 | TGTCTCTGTGGCGCAATCGGTTAGCGCGTTCG |
| | 8114-148248188 (+) | GCTGTTAACCGAAAGGTTGGTGGTTCGAGCC |
| 277 | Asn_GTT_chr1: 14859 | GTCTCTGTGGCGCAATCGGTTAGCGCATTCG |
| | 8313-148598387 (−) | GCTGTTAACCGAAAGGTTGGTGGTTCGAGCC |
| 278 | Asn_GTT_chr1: 14923 | GTCTCTGTGGCGCAATGGGTTAGCGCGTTCG |
| | 0569-149230643 (−) | GCTGTTAACCGAAAGGTTGGTGGTTCGAGCC |
| 279 | Val_CAC_chr1: 14929 | GCACTGGTGGTTCAGTGGTAGAATTCTCGCC |
| | 4665-149294736 (−) | TCACACGCGGGACACCCGGGTTCAATTCCCG |
| 280 | Val_CAC_chr1: 14929 | GTTTCCGTAGTGTAGTGGTTATCACGTTCGCC |
| | 8554-149298627 (−) | TCACACGCGAAAGGTCCCCGGTTCGAAACTG |
| 281 | Gly_CCC_chr1: 14968 | GCACTGGTGGTTCAGTGGTAGAATTCTCGCC |
| | 0209-149680280 (−) | TCCCACGCGGGAGACCCGGGTTTAATTCCCG |
| 282 | Val_CAC_chr1: 14968 | GTTTCCGTAGTGTAGTGGTTATCACGTTCGCC |
| | 4087-149684161 (−) | TCACACGCGTAAAGGTCCCCGGTTCGAAACC |
| 283 | Met_CAT_chr1: 15364 | TAGCAGAGTGGCGCAGCGGAAGCGTGCTGG |
| | 3725-153643797 (+) | GCCCATAACCCAGAGGTCGATGGATCGAAAC |
| 284 | Val_CAC_chr1: 16136 | GTTTCCGTAGTGTAGTGGTTATCACGTTCGCC |
| | 9489-161369562 (−) | TCACACGCGAAAGGTCCCCGGTTCGAAACCG |
| 285 | Asp_GTC_chr1: 16141 | TCCTCGTTAGTATAGTGGTGAGTATCCCCGCC |
| | 0614-161410686 (−) | TGTCACGCGGGAGACCGGGGTTCGATTCCCC |
| 286 | Gly_GCC_chr1: 16141 | TGCATGGGTGGTTCAGTGGTAGAATTCTCGC |
| | 3093-161413164 (+) | CTGCCACGCGGGAGGCCCGGGTTCGATTCCC |
| 287 | Glu_CTC_chr1: 16141 | TCCCTGGTGGTCTAGTGGTTAGGATTCGGCG |
| | 7017-161417089 (−) | CTCTCACCGCCGCGGCCCGGGTTCGATTCCC |
| 288 | Asp_GTC_chr1: 16149 | ATCCTTGTTACTATAGTGGTGAGTATCTCTGC |
| | 2934-161493006 (+) | CTGTCATGCGTGAGAGAGGGGGTCGATTCCC |
| 289 | Gly_GCC_chr1: 16149 | GCATTGGTGGTTCAGTGGTAGAATTCTCGCCT |
| | 3636-161493707 (−) | GCCACGCGGGAGGCCCGGGTTCGATTCCCGG |
| 290 | Leu_CAG_chr1: 16150 | GTCAGGATGGCCGAGCGGTCTAAGGCGCTGC |
| | 0131-161500214 (−) | GTTCAGGTCGCAGTCTCCCCTGGAGGCGTGG |
| 291 | Gly_TCC_chr1: 16150 | CGCGTTGGTGGTATAGTGGTGAGCATAGCTG |
| | 0902-161500974 (+) | CCTTCCAAGCAGTTGACCCGGGTTCGATTCCC |
| 292 | Asn_GTT_chr1: 16151 | CGTCTCTGTGGCGCAATCGGTTAGCGCGTTC |
| | 0030-161510104 (+) | GGCTGTTAACCGAAAGGTTGGTGGTTCGATC |
| 293 | Glu_TTC_chr1: 16158 | CGCGTTGGTGGTGTAGTGGTGAGCACAGCTG |
| | 2507-161582579 (+) | CCTTTCAAGCAGTTAACGCGGGTTCGATTCCC |
| 294 | Pro_CGG_chr1: 16768 | CGGCTCGTTGGTCTAGGGGTATGATTCTCGCT |
| | 3961-167684033 (+) | TCGGGTGCGAGAGGTCCCGGGTTCAAATCCC |
| 295 | Pro_AGG_chr1: 16768 | GGCTCGTTGGTCTAGGGGTATGATTCTCGCTT |
| | 4724-167684796 (−) | AGGGTGCGAGAGGTCCCGGGTTCAAATCCCG |
| 296 | Lys_TTT_chr1: 20447 | CGCCCGGATAGCTCAGTCGGTAGAGCATCAG |
| | 5654-204475727 (+) | ACTTTTAATCTGAGGGTCCAGGGTTCAAGTC |
| 297 | Lys_TTT_chr1: 20447 | GCCCGGATAGCTCAGTCGGTAGAGCATCAGA |
| | 6157-204476230 (−) | CTTTTAATCTGAGGGTCCAGGGTTCAAGTCCC |
| 298 | Leu_CAA_chr1: 24916 | TGTCAGGATGGCCGAGTGGTCTAAGGCGCCA |
| | 8053-249168159 (+) | GACTCAAGGTAAGCACCTTGCCTGCGGGCTT |
| 299 | Glu_CTC_chr1: 24916 | TTCCCTGGTGGTCTAGTGGTTAGGATTCGGCG |
| | 8446-249168518 (+) | CTCTCACCGCCGCGGCCCGGGTTCGATTCCC |
| 300 | Tyr_GTA_chr2: 27273 | GCCTTCGATAGCTCAGTTGGTAGAGCGGAGG |
| | 649-27273738 (+) | ACTGTAGTGGATAGGGCGTGGCAATCCTTAG |
| 301 | Ala_AGC_chr2: 27274 | CGGGGGATTAGCTCAAATGGTAGAGCGCTCG |
| | 081-27274154 (+) | CTTAGCATGCGAGAGGTAGCGGGATCGATGC |
| 302 | Ile_TAT_chr2: 430376 | AGCTCCAGTGGCGCAATCGGTTAGCGCGCGG |
| | 75-43037768 (+) | TACTTATACAGCAGTACATGCAGAGCAATGC |
| 303 | Gly_CCC_chr2: 70476 | GCGCCGCTGGTGTAGTGGTATCATGCAAGAT |
| | 122-70476193 (−) | TCCCATTCTTGCGACCCGGGTTCGATTCCCGG |
| 304 | Glu_TTC_chr2: 13109 | TCCCATATGGTCTAGCGGTTAGGATTCCTGGT |
| | 4700-131094772 (−) | TTTCACCCAGGTGGCCCGGGTTCGACTCCCG |
| 305 | Ala_CGC_chr2: 15725 | GGGGGATGTAGCTCAGTGGTAGAGCGCGCGC |
| | 7280-157257352 (+) | TTCGCATGTGTGAGGTCCCGGGTTCAATCCCC |
| 306 | Gly_GCC_chr2: 15725 | GCATTGGTGGTTCAGTGGTAGAATTCTCGCCT |
| | 7658-157257729 (−) | GCCACGCGGGAGGCCCGGGTTCGATTCCCGG |
| 307 | Arg_ACG_chr3: 45730 | GGGCCAGTGGCGCAATGGATAACGCGTCTGA |
| | 490-45730563 (−) | CTACGGATCAGAAGATTCTAGGTTCGACTCC |
| 308 | Val_AAC_chr3: 16949 | GGTTTCCGTAGTGTAGTGGTTATCACGTTCGC |
| | 0017-169490090 (+) | CTAACACGCGAAAGGTCCCCGGTTCGAAACC |
| 309 | Val_AAC_chr5: 18059 | AGTTTCCGTAGTGTAGTGGTTATCACGTTCGC |
| | 6609-180596682 (+) | CTAACACGCGAAAGGTCCCCGGTTCGAAACC |
| 310 | Leu_AAG_chr5: 1806 | AGGTAGCGTGGCCGAGCGGTCTAAGGCGCTG |
| | 14700-180614782 (+) | GATTAAGGCTCCAGTCTCTTCGGGGGCGTGG |
| 311 | Val_AAC_chr5: 18061 | GTTTCCGTAGTGTAGTGGTCATCACGTTCGCC |
| | 5415-180615488 (−) | TAACACGCGAAAGGTCCCCGGTTCGAAACCG |
| 312 | Pro_TGG_chr5: 18061 | GGCTCGTTGGTCTAGGGGTATGATTCTCGCTT |
| | 5853-180615925 (−) | TGGGTGCGAGAGGTCCCGGGTTCAAATCCCG |
| 313 | Thr_TGT_chr5: 18061 | GGCTCCATAGCTCAGGGGTTAGAGCACTGGT |
| | 8686-180618758 (−) | CTTGTAAACCAGGGTCGCGAGTTCAAATCTC |
| 314 | Ala_TGC_chr5: 18063 | TGGGGATGTAGCTCAGTGGTAGAGCGCATGC |
| | 3867-180633939 (+) | TTTGCATGTATGAGGCCCCGGGTTCGATCCCC |
| 315 | Lys_CTT_chr5: 18063 | CGCCCGGCTAGCTCAGTCGGTAGAGCATGAG |
| | 4754-180634827 (+) | ACTCTTAATCTCAGGGTCGTGGGTTCGAGCC |
| 316 | Val_AAC_chr5: 18064 | GTTTCCGTAGTGTAGTGGTTATCACGTTCGCC |
| | 5269-180645342 (−) | TAACACGCGAAAGGTCCCCGGTTCGAAACCG |
| 317 | Lys_CTT_chr5: 18064 | GCCCGGCTAGCTCAGTCGGTAGAGCATGAGA |
| | 8978-180649051 (−) | CTCTTAATCTCAGGGTCGTGGGTTCGAGCCCC |
| 318 | Val_CAC_chr5: 18064 | GTTTCCGTAGTGTAGTGGTTATCACGTTCGCC |
| | 9394-180649467 (−) | TCACACGCGAAAGGTCCCCGGTTCGAAACCG |
| 319 | Met_CAT_chr6: 26286 | CAGCAGAGTGGCGCAGCGGAAGCGTGCTGG |
| | 753-26286825 (+) | GCCCATAACCCAGAGGTCGATGGATCGAAAC |
| 320 | Ser_GCT_chr6: 26305 | GGAGAGGCCTGGCCGAGTGGTTAAGGCGATG |
| | 717-26305801 (−) | GACTGCTAATCCATTGTGCTCTGCACGCGTG |
| 321 | Gln_TTG_chr6: 26311 | GGCCCCATGGTGTAATGGTTAGCACTCTGGA |
| | 423-26311495 (−) | CTTTGAATCCAGCGATCCGAGTTCAAATCTC |
| 322 | Gln_TTG_chr6: 26311 | GGCCCCATGGTGTAATGGTTAGCACTCTGGA |
| | 974-26312046 (−) | CTTTGAATCCAGCGATCCGAGTTCAAATCTC |
| 323 | Ser_TGA_chr6: 26312 | GTAGTCGTGGCCGAGTGGTTAAGGCGATGGA |
| | 823-26312905 (−) | CTTGAAATCCATTGGGGTCTCCCCGCGCAGG |
| 324 | Met_CAT_chr6: 26313 | AGCAGAGTGGCGCAGCGGAAGCGTGCTGGG |
| | 351-26313423 (−) | CCCATAACCCAGAGGTCGATGGATCGAAACC |
| 325 | Arg_TCG_chr6: 26323 | GGACCACGTGGCCTAATGGATAAGGCGTCTG |
| | 045-26323118 (+) | ACTTCGGATCAGAAGATTGAGGGTTCGAATC |
| 326 | Ser_AGA_chr6: 26327 | TGTAGTCGTGGCCGAGTGGTTAAGGCGATGG |
| | 816-26327898 (+) | ACTAGAAATCCATTGGGGTCTCCCCGCGCAG |
| 327 | Met_CAT_chr6: 26330 | AGCAGAGTGGCGCAGCGGAAGCGTGCTGGG |
| | 528-26330600 (−) | CCCATAACCCAGAGGTCGATGGATCGAAACC |
| 328 | Leu_CAG_chr6: 26521 | CGTCAGGATGGCCGAGCGGTCTAAGGCGCTG |
| | 435-26521518 (+) | CGTTCAGGTCGCAGTCTCCCCTGGAGGCGTG |
| 329 | Thr_AGT_chr6: 26533 | GGCTCCGTGGCTTAGCTGGTTAAAGCGCCTG |
| | 144-26533218 (−) | TCTAGTAAACAGGAGATCCTGGGTTCGAATC |
| 330 | Arg_ACG_chr6: 26537 | AGGGCCAGTGGCGCAATGGATAACGCGTCTG |
| | 725-26537798 (+) | ACTACGGATCAGAAGATTCCAGGTTCGACTC |
| 331 | Val_CAC_chr6: 26538 | GGTTTCCGTAGTGTAGTGGTTATCACGTTCGC |
| | 281-26538354 (+) | CTCACACGCGAAAGGTCCCCGGTTCGAAACC |
| 332 | Ala_CGC_chr6: 26553 | AGGGGATGTAGCTCAGTGGTAGAGCGCATGC |
| | 730-26553802 (+) | TTCGCATGTATGAGGTCCCGGGTTCGATCCCC |
| 333 | Ile_AAT_chr6: 265543 | TGGCCGGTTAGCTCAGTTGGTTAGAGCGTGG |
| | 49-26554423 (+) | TGCTAATAACGCCAAGGTCGCGGGTTCGATC |
| 334 | Pro_AGG_chr6: 26555 | CGGCTCGTTGGTCTAGGGGTATGATTCTCGCT |
| | 497-26555569 (+) | TAGGGTGCGAGAGGTCCCGGGTTCAAATCCC |
| 335 | Lys_CTT_chr6: 26556 | AGCCCGGCTAGCTCAGTCGGTAGAGCATGAG |
| | 773-26556846 (+) | ACTCTTAATCTCAGGGTCGTGGGTTCGAGCC |
| 336 | Tyr_GTA_chr6: 26569 | TCCTTCGATAGCTCAGTTGGTAGAGCGGAGG |
| | 085-26569176 (+) | ACTGTAGTTGGCTGTGTCCTTAGACATCCTTA |
| 337 | Ala_AGC_chr6: 26572 | GGGGAATTAGCTCAAATGGTAGAGCGCTCGC |
| | 091-26572164 (−) | TTAGCATGCGAGAGGTAGCGGGATCGATGCC |
| 338 | Met_CAT_chr6: 26766 | CGCCCTCTTAGCGCAGCGGGCAGCGCGTCAG |
| | 443-26766516 (+) | TCTCATAATCTGAAGGTCCTGAGTTCGAGCCT |
| 339 | Ile_TAT_chr6: 269881 | TGCTCCAGTGGCGCAATCGGTTAGCGCGCGG |
| | 24-26988218 (+) | TACTTATATGGCAGTATGTGTGCGAGTGATG |
| 340 | His_GTG_chr6: 27125 | TGCCGTGATCGTATAGTGGTTAGTACTCTGCG |
| | 905-27125977 (+) | TTGTGGCCGCAGCAACCTCGGTTCGAATCCG |
| 341 | Ile_AAT_chr6: 271449 | GGCCGGTTAGCTCAGTTGGTTAGAGCGTGGT |
| | 93-27145067 (−) | GCTAATAACGCCAAGGTCGCGGGTTCGATCC |
| 342 | Val_AAC_chr6: 27203 | AGTTTCCGTAGTGTAGTGGTTATCACGTTTGC |
| | 287-27203360 (+) | CTAACACGCGAAAGGTCCCCGGTTCGAAACC |
| 343 | Val_CAC_chr6: 27248 | GCTTCTGTAGTGTAGTGGTTATCACGTTCGCC |
| | 048-27248121 (−) | TCACACGCGAAAGGTCCCCGGTTCGAAACCG |
| 344 | Asp_GTC_chr6: 27447 | TTCCTCGTTAGTATAGTGGTGAGTATCCCCGC |
| | 452-27447524 (+) | CTGTCACGCGGGAGACCGGGGTTCGATTCCC |
| 345 | Ser_TGA_chr6: 27473 | GTAGTCGTGGCCGAGTGGTTAAGGCGATGGA |
| | 606-27473688 (−) | CTTGAAATCCATTGGGGTTTCCCCGCGCAGG |
| 346 | Gln_CTG_chr6: 27487 | AGGTTCCATGGTGTAATGGTTAGCACTCTGG |
| | 307-27487379 (+) | ACTCTGAATCCAGCGATCCGAGTTCAAATCT |
| 347 | Asp_GTC_chr6: 27551 | TCCTCGTTAGTATAGTGGTGAGTGTCCCCGTC |
| | 235-27551307 (−) | TGTCACGCGGGAGACCGGGGTTCGATTCCCC |
| 348 | Val_AAC_chr6: 27618 | GTTTCCGTAGTGTAGTGGTTATCACGTTCGCC |
| | 706-27618779 (−) | TAACACGCGAAAGGTCCCTGGATCAAAACCA |
| 349 | Ile_AAT_chr6: 276559 | CGGCCGGTTAGCTCAGTTGGTTAGAGCGTGG |
| | 66-27656040 (+) | TGCTAATAACGCCAAGGTCGCGGGTTCGATC |
| 350 | Gln_CTG_chr6: 27759 | GGCCCCATGGTGTAATGGTCAGCACTCTGGA |
| | 134-27759206 (−) | CTCTGAATCCAGCGATCCGAGTTCAAATCTC |
| 351 | Gln_TTG_chr6: 27763 | GGCCCCATGGTGTAATGGTTAGCACTCTGGA |
| | 639-27763711 (−) | CTTTGAATCCAGCGATCCGAGTTCAAATCTC |
| 352 | Ala_AGC_chr6: 28574 | TGGGGGTGTAGCTCAGTGGTAGAGCGCGTGC |
| | 932-28575004 (+) | TTAGCATGTACGAGGTCCCGGGTTCAATCCC |
| 353 | Ala_AGC_chr6: 28626 | GGGGATGTAGCTCAGTGGTAGAGCGCATGCT |
| | 013-28626085 (−) | TAGCATGCATGAGGTCCCGGGTTCGATCCCC |
| 354 | Ala_CGC_chr6: 28697 | AGGGGGTGTAGCTCAGTGGTAGAGCGCGTGC |
| | 091-28697163 (+) | TTCGCATGTACGAGGCCCCGGGTTCGACCCC |
| 355 | Ala_AGC_chr6: 28806 | GGGGGTGTAGCTCAGTGGTAGAGCGCGTGCT |
| | 220-28806292 (−) | TAGCATGCACGAGGCCCCGGGTTCAATCCCC |
| 356 | Ala_AGC_chr6: 28831 | GGGGGTGTAGCTCAGTGGTAGAGCGCGTGCT |
| | 461-28831533 (−) | TAGCATGCACGAGGCCCCGGGTTCAATCCCC |
| 357 | Leu_CAA_chr6: 28863 | GTCAGGATGGCCGAGTGGTCTAAGGCGCCAG |
| | 999-28864105 (−) | ACTCAAGCTAAGCTTCCTCCGCGGTGGGGAT |
| 358 | Leu_CAA_chr6: 28908 | TGTCAGGATGGCCGAGTGGTCTAAGGCGCCA |
| | 829-28908934 (+) | GACTCAAGCTTGGCTTCCTCGTGTTGAGGATT |
| 359 | Gln_CTG_chr6: 28909 | GGTTCCATGGTGTAATGGTTAGCACTCTGGA |
| | 377-28909449 (−) | CTCTGAATCCAGCGATCCGAGTTCAAATCTC |
| 360 | Leu_AAG_chr6: 2891 | GGTAGCGTGGCCGAGCGGTCTAAGGCGCTGG |
| | 1398-28911480 (−) | ATTAAGGCTCCAGTCTCTTCGGGGGCGTGGG |
| 361 | Met_CAT_chr6: 28912 | TGCCTCCTTAGCGCAGTAGGCAGCGCGTCAG |
| | 351-28912424 (+) | TCTCATAATCTGAAGGTCCTGAGTTCGAACCT |
| 362 | Lys_TTT_chr6: 28918 | AGCCCGGATAGCTCAGTCGGTAGAGCATCAG |
| | 805-28918878 (+) | ACTTTTAATCTGAGGGTCCAGGGTTCAAGTC |
| 363 | Met_CAT_chr6: 28921 | GCCTCCTTAGCGCAGTAGGCAGCGCGTCAGT |
| | 041-28921114 (−) | CTCATAATCTGAAGGTCCTGAGTTCGAACCT |
| 364 | Glu_CTC_chr6: 28949 | TTCCCTGGTGGTCTAGTGGTTAGGATTCGGCG |
| | 975-28950047 (+) | CTCTCACCGCCGCGGCCCGGGTTCGATTCCC |
| 365 | Leu_TAA_chr6: 14453 | CACCAGGATGGCCGAGTGGTTAAGGCGTTGG |
| | 7683-144537766 (+) | ACTTAAGATCCAATGGACATATGTCCGCGTG |
| 366 | Pro_AGG_chr7: 12842 | TGGCTCGTTGGTCTAGGGGTATGATTCTCGCT |
| | 3503-128423575 (+) | TAGGGTGCGAGAGGTCCCGGGTTCAAATCCC |
| 367 | Arg_CCT_chr7: 13902 | AGCCCCAGTGGCCTAATGGATAAGGCATTGG |
| | 5445-139025518 (+) | CCTCCTAAGCCAGGGATTGTGGGTTCGAGTC |
| 368 | Cys_GCA_chr7: 14938 | GGGGATATAGCTCAGGGGTAGAGCATTTGAC |
| | 8271-149388343 (−) | TGCAGATCAAGAGGTCCCCGGTTCAAATCCG |
| 369 | Tyr_GTA_chr8: 67025 | CCCTTCGATAGCTCAGCTGGTAGAGCGGAGG |
| | 601-67025694 (+) | ACTGTAGCTACTTCCTCAGCAGGAGACATCC |
| 370 | Tyr_GTA_chr8: 67026 | CCCTTCGATAGCTCAGCTGGTAGAGCGGAGG |
| | 222-67026311 (+) | ACTGTAGGCGCGCGCCCGTGGCCATCCTTAG |
| 371 | Ala_AGC_chr8: 67026 | TGGGGGATTAGCTCAAATGGTAGAGCGCTCG |
| | 423-67026496 (+) | CTTAGCATGCGAGAGGTAGCGGGATCGATGC |
| 372 | Ser_AGA_chr8: 96281 | GTAGTCGTGGCCGAGTGGTTAAGGCGATGGA |
| | 884-96281966 (−) | CTAGAAATCCATTGGGGTCTCCCCGCGCAGG |
| 373 | Met_CAT_chr8: 12416 | GCCTCGTTAGCGCAGTAGGTAGCGCGTCAGT |
| | 9469-124169542 (−) | CTCATAATCTGAAGGTCGTGAGTTCGATCCTC |
| 374 | Arg_TCT_chr9: 13110 | GGCTCTGTGGCGCAATGGATAGCGCATTGGA |
| | 2354-131102445 (−) | CTTCTAGCTGAGCCTAGTGTGGTCATTCAAA |
| 375 | Asn_GTT_chr10: 2251 | GTCTCTGTGGCGCAATCGGTTAGCGCGTTCG |
| | 8437-22518511 (−) | GCTGTTAACCGAAAGGTTGGTGGTTCGAGCC |
| 376 | Ser_TGA_chr10: 6952 | GGCAGCGATGGCCGAGTGGTTAAGGCGTTGG |
| | 4260-69524342 (+) | ACTTGAAATCCAATGGGGTCTCCCCGCGCAG |
| 377 | Val_TAC_chr11: 5931 | GGTTCCATAGTGTAGTGGTTATCACGTCTGCT |
| | 8101-59318174 (−) | TTACACGCAGAAGGTCCTGGGTTCGAGCCCC |
| 378 | Val_TAC_chr11: 5931 | GGTTCCATAGTGTAGCGGTTATCACGTCTGCT |
| | 8459-59318532 (−) | TTACACGCAGAAGGTCCTGGGTTCGAGCCCC |
| 379 | Arg_TCT_chr11: 5931 | TGGCTCTGTGGCGCAATGGATAGCGCATTGG |
| | 8766-59318852 (+) | ACTTCTAGATAGTTAGAGAAATTCAAAGGTT |
| 380 | Leu_TAA_chr11: 5931 | TACCAGAATGGCCGAGTGGTTAAGGCGTTGG |
| | 9227-59319310 (+) | ACTTAAGATCCAATGGATTCATATCCGCGTG |
| 381 | Lys_TTT_chr11: 5932 | GGCCCGGATAGCTCAGTCGGTAGAGCATCAG |
| | 3901-59323974 (+) | ACTTTTAATCTGAGGGTCCGGGGTTCAAGTC |
| 382 | Phe_GAA_chr11: 5932 | GCCGAAATAGCTCAGTTGGGAGAGCGTTAGA |
| | 4969-59325042 (−) | CTGAAGATCTAAAGGTCCCTGGTTCGATCCC |
| 383 | Lys_TTT_chr11: 5932 | GCCCGGATAGCTCAGTCGGTAGAGCATCAGA |
| | 7807-59327880 (−) | CTTTTAATCTGAGGGTCCAGGGTTCAAGTCCC |
| 384 | Phe_GAA_chr11: 5933 | GCCGAAATAGCTCAGTTGGGAGAGCGTTAGA |
| | 3852-59333925 (−) | CTGAAGATCTAAAGGTCCCTGGTTCAATCCC |
| 385 | Ser_GCT_chr11: 6611 | GGACGAGGTGGCCGAGTGGTTAAGGCGATG |
| | 5590-66115672 (+) | GACTGCTAATCCATTGTGCTTTGCACGCGTGG |
| 386 | Pro_TGG_chr11: 7594 | GGCTCGTTGGTCTAGGGGTATGATTCTCGGTT |
| | 6868-75946940 (−) | TGGGTCCGAGAGGTCCCGGGTTCAAATCCCG |
| 387 | Ser_CGA_chr12: 5658 | AGTCACGGTGGCCGAGTGGTTAAGGCGTTGG |
| | 4147-56584229 (+) | ACTCGAAATCCAATGGGGTTTCCCCGCACAG |
| 388 | Asp_GTC_chr12: 9889 | CTCCTCGTTAGTATAGTGGTTAGTATCCCCGC |
| | 7280-98897352 (+) | CTGTCACGCGGGAGACCGGGGTTCAATTCCC |
| 389 | Trp_CCA_chr12: 9889 | GGACCTCGTGGCGCAACGGTAGCGCGTCTGA |
| | 8029-98898101 (+) | CTCCAGATCAGAAGGCTGCGTGTTCGAATCA |
| 390 | Ala_TGC_chr12: 1254 | GGGGATGTAGCTCAGTGGTAGAGCGCATGCT |
| | 06300-125406372 (−) | TTGCATGTATGAGGCCCCGGGTTCGATCCCC |
| 391 | Phe_GAA_chr12: 1254 | GCCGAAATAGCTCAGTTGGGAGAGCGTTAGA |
| | 12388-125412461 (−) | CTGAAGATCTAAAGGTCCCTGGTTCGATCCC |
| 392 | Ala_TGC_chr12: 1254 | AGGGGATGTAGCTCAGTGGTAGAGCGCATGC |
| | 24511-125424583 (+) | TTTGCACGTATGAGGCCCCGGGTTCAATCCC |
| 393 | Asn_GTT_chr13: 3124 | GTCTCTGTGGCGCAATCGGTTAGCGCGTTCG |
| | 8100-31248174 (−) | GCTGTTAACCGAAAGGTTGGTGGTTCGAGCC |
| 394 | Glu_TTC_chr13: 4549 | TCCCACATGGTCTAGCGGTTAGGATTCCTGGT |
| | 2061-45492133 (−) | TTTCACCCAGGCGGCCCGGGTTCGACTCCCG |
| 395 | Thr_TGT_chr14: 2108 | GGCTCCATAGCTCAGGGGTTAGAGCGCTGGT |
| | 1948-21082021 (−) | CTTGTAAACCAGGGGTCGCGAGTTCAATTCT |
| 396 | Leu_TAG_chr14: 2109 | TGGTAGTGTGGCCGAGCGGTCTAAGGCGCTG |
| | 3528-21093610 (+) | GATTTAGGCTCCAGTCTCTTCGGGGGCGTGG |
| 397 | Thr_TGT_chr14: 2109 | GGCTCCATAGCTCAGGGGTTAGAGCACTGGT |
| | 9318-21099391 (−) | CTTGTAAACCAGGGGTCGCGAGTTCAAATCT |
| 398 | Pro_TGG_chr14: 2110 | TGGCTCGTTGGTCTAGTGGTATGATTCTCGCT |
| | 1164-21101236 (+) | TTGGGTGCGAGAGGTCCCGGGTTCAAATCCC |
| 399 | Tyr_GTA_chr14: 2113 | CCTTCGATAGCTCAGCTGGTAGAGCGGAGGA |
| | 1350-21131444 (−) | CTGTAGATTGTACAGACATTTGCGGACATCC |
| 400 | Thr_TGT_chr14: 2114 | AGGCCCTATAGCTCAGGGGTTAGAGCACTGG |
| | 9848-21149921 (+) | TCTTGTAAACCAGGGGTCGCGAGTTCAAATC |
| 401 | Tyr_GTA_chr14: 2115 | TCCTTCGATAGCTCAGCTGGTAGAGCGGAGG |
| | 1431-21151520 (+) | ACTGTAGTACTTAATGTGTGGTCATCCTTAGG |
| 402 | Pro_TGG_chr14: 2115 | TGGCTCGTTGGTCTAGGGGTATGATTCTCGCT |
| | 2174-21152246 (+) | TTGGGTGCGAGAGGTCCCGGGTTCAAATCCC |
| 403 | Lys_CTT_chr14: 5870 | GCCCGGCTAGCTCAGTCGGTAGAGCATGGGA |
| | 6612-58706685 (−) | CTCTTAATCCCAGGGTCGTGGGTTCGAGCCC |
| 404 | Ile_AAT_chr14: 10278 | CGGCCGGTTAGCTCAGTTGGTTAGAGCGTGG |
| | 3428-102783502 (+) | TGCTAATAACGCCAAGGTCGCGGGTTCGATC |
| 405 | Glu_TTC_chr15: 2632 | TCCCACATGGTCTAGCGGTTAGGATTCCTGGT |
| | 7380-26327452 (−) | TTTCACCCAGGCGGCCCGGGTTCGACTCCCG |
| 406 | Ser_GCT_chr15: 4088 | GACGAGGTGGCCGAGTGGTTAAGGCGATGG |
| | 6022-40886104 (−) | ACTGCTAATCCATTGTGCTCTGCACGCGTGG |
| 407 | His_GTG_chr15: 4549 | GCCGTGATCGTATAGTGGTTAGTACTCTGCGT |
| | 0803-45490875 (−) | TGTGGCCGCAGCAACCTCGGTTCGAATCCGA |
| 408 | His_GTG_chr15: 4549 | CGCCGTGATCGTATAGTGGTTAGTACTCTGC |
| | 3348-45493420 (+) | GTTGTGGCCGCAGCAACCTCGGTTCGAATCC |
| 409 | Gln_CTG_chr15: 6616 | GGTTCCATGGTGTAATGGTTAGCACTCTGGA |
| | 1399-66161471 (−) | CTCTGAATCCAGCGATCCGAGTTCAAATCTC |
| 410 | Lys_CTT_chr15: 7915 | TGCCCGGCTAGCTCAGTCGGTAGAGCATGGG |
| | 2903-79152976 (+) | ACTCTTAATCCCAGGGTCGTGGGTTCGAGCC |
| 411 | Arg_TCG_chr15: 8987 | GGGCCGCGTGGCCTAATGGATAAGGCGTCTG |
| | 8303-89878376 (+) | ACTTCGGATCAGAAGATTGCAGGTTCGAGTC |
| 412 | Gly_CCC_chr16: 6867 | GCGCCGCTGGTGTAGTGGTATCATGCAAGAT |
| | 35-686806 (−) | TCCCATTCTTGCGACCCGGGTTCGATTCCCGG |
| 413 | Arg_CCG_chr16: 3200 | GGGCCGCGTGGCCTAATGGATAAGGCGTCTG |
| | 674-3200747 (+) | ATTCCGGATCAGAAGATTGAGGGTTCGAGTC |
| 414 | Arg_CCT_chr16: 3202 | CGCCCCGGTGGCCTAATGGATAAGGCATTGG |
| | 900-3202973 (+) | CCTCCTAAGCCAGGGATTGTGGGTTCGAGTC |
| 415 | Lys_CTT_chr16: 3207 | GCCCGGCTAGCTCAGTCGGTAGAGCATGAGA |
| | 405-3207478 (−) | CCCTTAATCTCAGGGTCGTGGGTTCGAGCCC |
| 416 | Thr_CGT_chr16: 1437 | AGGCGCGGTGGCCAAGTGGTAAGGCGTCGGT |
| | 9749-14379821 (+) | CTCGTAAACCGAAGATCACGGGTTCGAACCC |
| 417 | Leu_TAG_chr16: 2220 | GGTAGCGTGGCCGAGTGGTCTAAGGCGCTGG |
| | 7031-22207113 (−) | ATTTAGGCTCCAGTCATTTCGATGGCGTGGGT |
| 418 | Leu_AAG_chr16: 223 | GGGTAGCGTGGCCGAGCGGTCTAAGGCGCTG |
| | 08460-22308542 (+) | GATTAAGGCTCCAGTCTCTTCGGGGGCGTGG |
| 419 | Leu_CAG_chr16: 5733 | AGTCAGGATGGCCGAGCGGTCTAAGGCGCTG |
| | 3862-57333945 (+) | CGTTCAGGTCGCAGTCTCCCCTGGAGGCGTG |
| 420 | Leu_CAG_chr16: 5733 | GTCAGGATGGCCGAGCGGTCTAAGGCGCTGC |
| | 4391-57334474 (−) | GTTCAGGTCGCAGTCTCCCCTGGAGGCGTGG |
| 421 | Met_CAT_chr16: 8741 | GCCTCGTTAGCGCAGTAGGCAGCGCGTCAGT |
| | 7627-87417700 (−) | CTCATAATCTGAAGGTCGTGAGTTCGAGCCT |
| 422 | Leu_TAG_chr17: 8023 | GGTAGCGTGGCCGAGCGGTCTAAGGCGCTGG |
| | 631-8023713 (−) | ATTTAGGCTCCAGTCTCTTCGGAGGCGTGGG |
| 423 | Arg_TCT_chr17: 8024 | TGGCTCTGTGGCGCAATGGATAGCGCATTGG |
| | 242-8024330 (+) | ACTTCTAGTGACGAATAGAGCAATTCAAAGG |
| 424 | Gly_GCC_chr17: 8029 | CGCATTGGTGGTTCAGTGGTAGAATTCTCGC |
| | 063-8029134 (+) | CTGCCACGCGGGAGGCCCGGGTTCGATTCCC |
| 425 | Ser_CGA_chr17: 8042 | GCTGTGATGGCCGAGTGGTTAAGGCGTTGGA |
| | 198-8042280 (−) | CTCGAAATCCAATGGGGTCTCCCCGCGCAGG |
| 426 | Thr_AGT_chr17: 8042 | GGCGCCGTGGCTTAGCTGGTTAAAGCGCCTG |
| | 769-8042843 (−) | TCTAGTAAACAGGAGATCCTGGGTTCGAATC |
| 427 | Trp_CCA_chr17: 8089 | CGACCTCGTGGCGCAACGGTAGCGCGTCTGA |
| | 675-8089747 (+) | CTCCAGATCAGAAGGTTGCGTGTTCAAATCA |
| 428 | Ser_GCT_chr17: 8090 | AGACGAGGTGGCCGAGTGGTTAAGGCGATG |
| | 183-8090265 (+) | GACTGCTAATCCATTGTGCTCTGCACGCGTG |
| 429 | Thr_AGT_chr17: 8090 | CGGCGCCGTGGCTTAGTTGGTTAAAGCGCCT |
| | 477-8090551 (+) | GTCTAGTAAACAGGAGATCCTGGGTTCGAAT |
| 430 | Trp_CCA_chr17: 8124 | GGCCTCGTGGCGCAACGGTAGCGCGTCTGAC |
| | 186-8124258 (−) | TCCAGATCAGAAGGTTGCGTGTTCAAATCAC |
| 431 | Gly_TCC_chr17: 8124 | AGCGTTGGTGGTATAGTGGTAAGCATAGCTG |
| | 865-8124937 (+) | CCTTCCAAGCAGTTGACCCGGGTTCGATTCCC |
| 432 | Asp_GTC_chr17: 8125 | TCCTCGTTAGTATAGTGGTGAGTATCCCCGCC |
| | 555-8125627 (−) | TGTCACGCGGGAGACCGGGGTTCGATTCCCC |
| 433 | Pro_CGG_chr17: 8126 | GGCTCGTTGGTCTAGGGGTATGATTCTCGCTT |
| | 150-8126222 (−) | CGGGTGCGAGAGGTCCCGGGTTCAAATCCCG |
| 434 | Thr_AGT_chr17: 8129 | GGCGCCGTGGCTTAGTTGGTTAAAGCGCCTG |
| | 552-8129626 (−) | TCTAGTAAACAGGAGATCCTGGGTTCGAATC |
| 435 | Ser_AGA_chr17: 8129 | GTAGTCGTGGCCGAGTGGTTAAGGCGATGGA |
| | 927-8130009 (−) | CTAGAAATCCATTGGGGTCTCCCCGCGCAGG |
| 436 | Trp_CCA_chr17: 1941 | TGACCTCGTGGCGCAATGGTAGCGCGTCTGA |
| | 1493-19411565 (+) | CTCCAGATCAGAAGGTTGCGTGTTCAAGTCA |
| 437 | Thr_CGT_chr17: 2987 | AGGCGCGGTGGCCAAGTGGTAAGGCGTCGGT |
| | 7092-29877164 (+) | CTCGTAAACCGAAGATCGCGGGTTCGAACCC |
| 438 | Cys_GCA_chr17: 3702 | AGGGGGTATAGCTCAGTGGTAGAGCATTTGA |
| | 3897-37023969 (+) | CTGCAGATCAAGAGGTCCCCGGTTCAAATCC |
| 439 | Cys_GCA_chr17: 3702 | GGGGGTATAGCTCAGTGGTAGAGCATTTGAC |
| | 5544-37025616 (−) | TGCAGATCAAGAGGTCCCTGGTTCAAATCCG |
| 440 | Cys_GCA_chr17: 3730 | GGGGGTATAGCTCAGTGGTAGAGCATTTGAC |
| | 9986-37310058 (−) | TGCAGATCAAGAGGTCCCCGGTTCAAATCCG |
| 441 | Gln_TTG_chr17: 4726 | AGGTCCCATGGTGTAATGGTTAGCACTCTGG |
| | 9889-47269961 (+) | ACTTTGAATCCAGCGATCCGAGTTCAAATCT |
| 442 | Arg_CCG_chr17: 6601 | GACCCAGTGGCCTAATGGATAAGGCATCAGC |
| | 6012-66016085 (−) | CTCCGGAGCTGGGGATTGTGGGTTCGAGTCC |
| 443 | Arg_CCT_chr17: 7303 | AGCCCCAGTGGCCTAATGGATAAGGCACTGG |
| | 0000-73030073 (+) | CCTCCTAAGCCAGGGATTGTGGGTTCGAGTC |
| 444 | Arg_CCT_chr17: 7303 | GCCCCAGTGGCCTAATGGATAAGGCACTGGC |
| | 0525-73030598 (−) | CTCCTAAGCCAGGGATTGTGGGTTCGAGTCC |
| 445 | Arg_TCG_chr17: 7303 | AGACCGCGTGGCCTAATGGATAAGGCGTCTG |
| | 1207-73031280 (+) | ACTTCGGATCAGAAGATTGAGGGTTCGAGTC |
| 446 | Asn_GTT_chr19: 1383 | CGTCTCTGTGGCGCAATCGGTTAGCGCGTTC |
| | 561-1383635 (+) | GGCTGTTAACCGAAAGGTTGGTGGTTCGAGC |
| 447 | Gly_TCC_chr19: 4724 | GGCGTTGGTGGTATAGTGGTTAGCATAGCTG |
| | 081-4724153 (+) | CCTTCCAAGCAGTTGACCCGGGTTCGATTCCC |
| 448 | Val_CAC_chr19: 4724 | GTTTCCGTAGTGTAGCGGTTATCACATTCGCC |
| | 646-4724719 (−) | TCACACGCGAAAGGTCCCCGGTTCGATCCCG |
| 449 | Thr_AGT_chr19: 3366 | TGGCGCCGTGGCTTAGTTGGTTAAAGCGCCT |
| | 7962-33668036 (+) | GTCTAGTAAACAGGAGATCCTGGGTTCGAAT |
| 450 | Ile_TAT_chr19: 39902 | GCTCCAGTGGCGCAATCGGTTAGCGCGCGGT |
| | 807-39902900 (−) | ACTTATATGACAGTGCGAGCGGAGCAATGCC |
| 451 | Gly_GCC_chr21: 1882 | GCATGGGTGGTTCAGTGGTAGAATTCTCGCC |
| | 7106-18827177 (−) | TGCCACGCGGGAGGCCCGGGTTCGATTCCCG |

### Non-Naturally Occurring Modification

[1009] A TREM, a TREM core fragment or a TREM fragment described herein comprises a non-naturally occurring modification, e.g., a modification described in any one of Tables 5-9. A non-naturally occurring modification can be made according to methods known in the art. Exemplary methods of making non-naturally occurring modifications are provided in Examples 4-7.

[1010] In an embodiment, a non-naturally occurring modification is a modification that a cell, e.g., a human cell, does not make on an endogenous tRNA.

[1011] In an embodiment, a non-naturally occurring modification is a modification that a cell, e.g., a human cell, can make on an endogenous tRNA, but wherein such modification is in a location in which it does not occur on a native tRNA. In an embodiment, the non-naturally occurring modification is in a domain, linker or arm which does not have such modification in nature. In an embodiment, the non-naturally occurring modification is at a position within a domain, linker or arm, which does not have such modification in nature. In an embodiment, the non-naturally occurring modification is on a nucleotide which does not have such modification in nature. In an embodiment, the non-naturally occurring modification is on a nucleotide at a position within a domain, linker or arm, which does not have such modification in nature.

[1012] In an embodiment, a TREM, a TREM core fragment or a TREM fragment described herein comprises a non-naturally occurring modification provided in Table 5, or a combination thereof.

TABLE 5
Exemplary non-naturally occurring modifications
Modification

7-deaza-adenosine
N1-methyl-adenosine
N6, N6 (dimethyl)adenine
N6-cis-hydroxy-isopentenyl-adenosine
thio-adenosine
2-(amino)adenine
2-(aminopropyl)adenine
2-(methylthio) N6 (isopentenyl)adenine
2-(alkyl)adenine
2-(aminoalkyl)adenine
2-(aminopropyl)adenine
2-(halo)adenine
2-(propyl)adenine
2′-azido-2′-deoxy-adenosine
2′-Deoxy-2′-alpha-aminoadenosine
2′-Deoxy-2′-alpha-azidoadenosine
6-(alkyl)adenine
6-(methyl)adenine
6-(alkyl)adenine
6-(methyl)adenine
7-(deaza)adenine
8-(alkenyl)adenine
8-(alkynyl)adenine
8-(amino)adenine
8-(thioalkyl)adenine
8-(alkenyl)adenine
8-(alkyl)adenine
8-(alkynyl)adenine
8-(amino)adenine
8-(halo)adenine
8-(hydroxyl)adenine
8-(thioalkyl)adenine
8-(thiol)adenine
8-azido-adenosine
azaadenine
deazaadenine
N6-(methyl)adenine
N6-(isopentyl)adenine
7-deaza-8-aza-adenosine
7-methyladenine
1-deazaadenosine
2′-Fluoro-N6-Bz-deoxyadenosine
2′-OMe-2-Amino-adenosine
2′O-methyl-N6-Bz-deoxyadenosine
2′alpha-ethynyladenosine
2-aminoadenine
2-Aminoadenosine
2-Amino-adenosine
2′-alpha-Trifluoromethyladenosine
2-Azidoadenosine
2′-beta-Ethynyladenosine
2-Bromoadenosine
2′-beta-Trifluoromethyladenosine
2-Chloroadenosine
2′-Deoxy-2′,2′-difluoroadenosine
2′-Deoxy-2′-alpha-mercaptoadenosine
2′-Deoxy-2′-alpha-thiomethoxyadenosine
2′-Deoxy-2′-beta-aminoadenosine
2′-Deoxy-2′-beta-azidoadenosine
2′-Deoxy-2′-beta-bromoadenosine
2′-Deoxy-2′-beta-chloroadenosine
2′-Deoxy-2′-beta-fluoroadenosine
2′-Deoxy-2′-beta-iodoadenosine
2′-Deoxy-2′-beta-mercaptoadenosine
2′-Deoxy-2′-beta-thiomethoxyadenosine
2-Fluoroadenosine
2-Iodoadenosine
2-Mercaptoadenosine
2-methoxy-adenine
2-methylthio-adenine
2-Trifluoromethyladenosine
3-Deaza-3-bromoadenosine
3-Deaza-3-chloroadenosine
3-Deaza-3-fluoroadenosine
3-Deaza-3-iodoadenosine
3-Deazaadenosine
4′-Azidoadenosine
4′-Carbocyclic adenosine
4′-Ethynyladenosine
5′-Homo-adenosine
8-Aza-adenosine
8-bromo-adenosine
8-Trifluoromethyladenosine
9-Deazaadenosine
2-aminopurine
7-deaza-2,6-diaminopurine
7-deaza-8-aza-2,6-diaminopurine
7-deaza-8-aza-2-aminopurine
2,6-diaminopurine
7-deaza-8-aza-adenine, 7-deaza-2-aminopurine
4-methylcytidine
5-aza-cytidine
Pseudo-iso-cytidine
pyrrolo-cytidine
alpha-thio-cytidine
2-(thio)cytosine
2′-Amino-2′-deoxy-cytosine
2′-Azido-2′-deoxy-cytosine
2′-Deoxy-2′-alpha-aminocytidine
2′-Deoxy-2′-alpha-azidocytidine
3 (deaza) 5 (aza)cytosine
3 (methyl)cytosine
3-(alkyl)cytosine
3-(deaza) 5 (aza)cytosine
3-(methyl)cytidine
4,2′-O-dimethylcytidine
5 (halo)cytosine
5 (methyl)cytosine
5 (propynyl)cytosine
5 (trifluoromethyl)cytosine
5-(alkyl)cytosine
5-(alkynyl)cytosine
5-(halo)cytosine
5-(propynyl)cytosine
5-(trifluoromethyl)cytosine
5-bromo-cytidine
5-iodo-cytidine
5-propynyl cytosine
6-(azo)cytosine
6-aza-cytidine
aza cytosine
deaza cytosine
N4 (acetyl)cytosine
1-methyl-1-deaza-pseudoisocytidine
1-methyl-pseudoisocytidine
2-methoxy-5-methyl-cytidine
2-methoxy-cytidine
2-thio-5-methyl-cytidine
4-methoxy-1-methyl-pseudoisocytidine
4-methoxy-pseudoisocytidine
4-thio-1-methyl-1-deaza-pseudoisocytidine
4-thio-1-methyl-pseudoisocytidine
4-thio-pseudoisocytidine
5-aza-zebularine
5-methyl-zebularine
pyrrolo-pseudoisocytidine
zebularine
(E)-5-(2-Bromo-vinyl)cytidine
2,2′-anhydro-cytidine
2′-Fluor-N4-Bz-cytidine
2′-Fluoro-N4-Acetyl-cytidine
2′-O-Methyl-N4-Acetyl-cytidine
2′-O-methyl-N4-Bz-cytidine
2′-a-Ethynylcytidine
2′-a-Trifluoromethylcytidine
2′-b-Ethynylcytidine
2′-b-Trifluoromethylcytidine
2′-Deoxy-2′,2′-difluorocytidine
2′-Deoxy-2′-alpha-mercaptocytidine
2′-Deoxy-2′-alpha-thiomethoxycytidine
2′-Deoxy-2′-betab-aminocytidine
2′-Deoxy-2′-beta-azidocytidine
2′-Deoxy-2′-beta-bromocytidine
2′-Deoxy-2′-beta-chlorocytidine
2′-Deoxy-2′-beta-fluorocytidine
2′-Deoxy-2′-beta-iodocytidine
2′-Deoxy-2′-beta-mercaptocytidine
2′-Deoxy-2′-beta-thiomethoxycytidine TP
2′-O-Methyl-5-(1-propynyl)cytidine
3′-Ethynylcytidine
4′-Azidocytidine
4′-Carbocyclic cytidine
4′-Ethynylcytidine
5-(1-Propynyl)ara-cytidine
5-(2-Chloro-phenyl)-2-thiocytidine
5-(4-Amino-phenyl)-2-thiocytidine
5-Aminoallyl-cytosine
5-Cyanocytidine
5-Ethynylara-cytidine
5-Ethynylcytidine
5′-Homo-cytidine
5-Methoxycytidine
5-Trifluoromethyl-Cytidine
N4-Amino-cytidine
N4-Benzoyl-cytidine
pseudoisocytidine
6-thio-guanosine
7-deaza-guanosine
8-oxo-guanosine
N1-methyl-guanosine
alpha-thio-guanosine
2-(propyl)guanine
2-(alkyl)guanine
2′-Amino-2′-deoxy-guanosine
2′-Azido-2′-deoxy-guanosine
2′-Deoxy-2′-alpha-aminoguanosine
2′-Deoxy-2′-alpha-azidoguanosine
6-(methyl)guanine
6-(alkyl)guanine
6-(methyl)guanine
6-methyl-guanosine
7-(alkyl)guanine
7-(deaza)guanine
7-(methyl)guanine
7-(alkyl)guanine
7-(deaza)guanine
7-(methyl)guanine
8-(alkyl)guanine
8-(alkynyl)guanine
8-(halo)guanine
8-(thioalkyl)guanine
8-(alkenyl)guanine
8-(alkyl)guanine
8-(alkynyl)guanine
8-(amino)guanine
8-(halo)guanine
8-(hydroxyl)guanine
8-(thioalkyl)guanine
8-(thiol)guanine
azaguanine
deaza guanine
N (methyl)guanine
N-(methyl)guanine
1-methyl-6-thio-guanosine
6-methoxy-guanosine
6-thio-7-deaza-8-aza-guanosine
6-thio-7-deaza-guanosine
6-thio-7-methyl-guanosine
7-deaza-8-aza-guanosine
7-methyl-8-oxo-guanosine
N2,N2-dimethyl-6-thio-guanosine
N2-methyl-6-thio-guanosine
1-Me-guanosine
2′Fluoro-N2-isobutyl-guanosine
2′O-methyl-N2-isobutyl-guanosine
2′-alpha-Ethynylguanosine
2′-alpha-Trifluoromethylguanosine
2′-beta-Ethynylguanosine
2′-beta-Trifluoromethylguanosine
2′-Deoxy-2′,2′-difluoroguanosine
2′-Deoxy-2′-alpha-mercaptoguanosine
2′-Deoxy-2′-alpha-thiomethoxyguanosine
2′-Deoxy-2′-beta-aminoguanosine
8-(alkyl)guanine
2′-Deoxy-2′-beta-azidoguanosine
2′-Deoxy-2′-beta-bromoguanosine
2′-Deoxy-2′-beta-chloroguanosine
2′-Deoxy-2′-beta-fluoroguanosine
2′-Deoxy-2′-beta-iodoguanosine
2′-Deoxy-2′-beta-mercaptoguanosine
2′-Deoxy-2′-beta-thiomethoxyguanosine
4′-Azidoguanosine
4′-Carbocyclic guanosine
4′-Ethynylguanosine
5′-Homo-guanosine
8-bromo-guanosine
9-Deazaguanosine
N2-isobutyl-guanosine
7-methylinosine
allyamino-thymidine
aza thymidine
deaza thymidine
deoxy-thymidine
5-propynyl uracil
alpha-thio-uridine
1-(aminoalkylamino-carbonylethylenyl)-2(thio)-pseudouracil
1-(aminoalkylaminocarbonylethylenyl)-2,4-(dithio)psuedouracil
1-(aminoalkylaminocarbonylethylenyl)-4(thio)pseudouracil
1-(aminoalkylaminocarbonylethylenyl)-pseudouracil
1-( aminocarbonylethylenyl)-2(thio)-pseudouracil
1-( aminocarbonylethylenyl)-2,4-( dithio)pseudouracil
1-(aminocarbonylethylenyl)-4(thio)pseudouracil
1-(aminocarbonylethylenyl)-pseudouracil
1-substituted 2-(thio)-pseudouracil
1-substituted 2,4-(dithio)pseudouracil
1-substituted 4 (thio)pseudouracil
1-substituted pseudouracil
1-(aminoalkylamino-carbonylethylenyl)-2(thio)-pseudouracil
1-Methyl-3-(3-amino-3-carboxypropyl)pseudouridine
1-Methyl-3-(3-amino-3-carboxyproovl)pseudo-Uradine
1-Methyl-pseudo-UTP
2 (thio)pseudouracil
2′ deoxy uridine
2′ fluorouridine
2-(thio)uracil
2,4-(dithio)pseudouracil
2′-methyl, 2′-amino, 2′azido, 2′fluro-guanosine
2′-Amino-2′-deoxy-uridine
2′-Azido-2′-deoxy-uridine
2′-Azido-deoxyuridine
2′-O-methylpseudouridine
2′ deoxyuridine
2′ fluorouridine
2′-Deoxy-2′-alpha-aminouridine TP
2′-Deoxy-2′-alpha-azidouridine TP
2-methylpseudouridine
3-(3 amino-3-carboxypropyl)uracil
4-(thio)pseudouracil
4-(thio )pseudouracil
4-(thio)uracil
4-thiouracil
5-(1,3-diazole-1-alkyl)uracil
5-(2-aminopropyl)uracil
5-(aminoalkyl)uracil
5-(dimethylaminoalkyl)uracil
5-(guanidiniumalkyl)uracil
5-(methoxycarbonylmethyl)-2-(thio)uracil
5-(methoxycarbonyl-methyl)uracil
5-(methyl)-2-(thio)uracil
5-(methyl)-2,4-(dithio)uracil
5 (methyl) 4 (thio)uracil
5 (methylaminomethyl)-2 (thio)uracil
5 (methylaminomethyl)-2,4 (dithio)uracil
5 (methylaminomethyl)-4 (thio)uracil
5 (propynyl)uracil
5 (trifluoromethyl)uracil
5-(2-aminopropyl)uracil
5-(alkyl)-2-(thio)pseudouracil
5-(alkyl)-2,4 (dithio)pseudouracil
5-(alkyl)-4 (thio)pseudouracil
5-(alkyl)pseudouracil
5-(alkyl)uracil
5-(alkynyl)uracil
5-(allylamino)uracil
5-(cyanoalkyl)uracil
5-(dialkylaminoalkyl)uracil
5-(dimethylaminoalkyl)uracil
5-(guanidiniumalkyl)uracil
5-(halo)uracil
5-(1,3-diazole-1-alkyl)uracil
5-(methoxy)uracil
5-(methoxycarbonylmethyl)-2-(thio)uracil
5-(methoxycarbonyl-methyl)uracil
5-(methyl) 2(thio)uracil
5-(methyl) 2,4 (dithio )uracil
5-(methyl) 4 (thio)uracil
5-(methyl)-2-(thio)pseudouracil
5-(methyl)-2,4 (dithio)pseudouracil
5-(methyl)-4 (thio)pseudouracil
5-(methyl)pseudouracil
5-(methylaminomethyl)-2 (thio)uracil
5-(methylaminomethyl)-2,4(dithio )uracil
5-(methylaminomethyl)-4-(thio)uracil
5-(propynyl)uracil
5-(trifluoromethyl)uracil
5-aminoallyl-uridine
5-bromo-uridine
5-iodo-uridine
5-uracil
6 (azo)uracil
6-(azo)uracil
6-aza-uridine
allyamino-uracil
aza uracil
deaza uracil
N3 (methyl)uracil
Pseudo-uridine-1-2-ethanoic acid
pseudouracil
4-Thio-pseudouridine
1-carboxymethyl-pseudouridine
1-methyl-1-deaza-pseudouridine
1-propynyl-uridine
1-taurinomethyl-1-methyl-uridine
1-taurinomethyl-4-thio-uridine
1-taurinomethyl-pseudouridine
2-methoxy-4-thio-pseudouridine
2-thio-1-methyl-1-deaza-pseudouridine
2-thio-1-methyl-pseudouridine
2-thio-5-aza-uridine
2-thio-dihydropseudouridine
2-thio-dihydrouridine
2-thio-pseudouridine
4-methoxy-2-thio-pseudouridine
4-methoxy-pseudouridine
4-thio-1-methyl-pseudouridine
4-thio-pseudouridine
5-aza-uridine
dihydropseudouridine
(±)1-(2-Hydroxypropyl)pseudouridine
(2R)-1-(2-Hydroxypropyl)pseudouridine
(2S)-1-(2-Hydroxypropyl)pseudouridine
(E)-5-(2-Bromo-vinyl)ara-uridine
(E)-5-(2-Bromo-vinyl)uridine
(Z)-5-(2-Bromo-vinyl)ara-uridine
(Z)-5-(2-Bromo-vinyl)uridine
1-(2,2,2-Trifluoroethyl)-pseudouridine
1-(2,2,3,3,3-Pentafluoropropyl)pseudouridine
1-(2,2-Diethoxyethyl)pseudouridine
1-(2,4,6-Trimethylbenzyl)pseudouridine
1-(2,4,6-Trimethyl-benzyl)pseudo-uridineuridine
1-(2,4,6-Trimethyl-phenyl)pseudo-uridine
1-(2-Amino-2-carboxyethyl)pseudo-uridine
1-(2-Amino-ethyl)pseudouridine
1-(2-Hydroxyethyl)pseudouridine
1-(2-Methoxyethyl)pseudouridine
1-(3,4-Bis-trifluoromethoxybenzyl)pseudouridine
1-(3,4-Dimethoxybenzyl)pseudouridine
1-(3-Amino-3-carboxypropyl)pseudo-uridine
1-(3-Amino-propyl)pseudouridine
1-(3-Cyclopropyl-prop-2-ynyl)pseudouridine TP
1-(4-Amino-4-carboxybutyl)pseudouridine
1-(4-Amino-benzyl)pseudouridine
1-(4-Amino-butyl)pseudouridine
1-(4-Amino-phenyl)pseudouridine
1-(4-Azidobenzyl)pseudouridine
1-(4-Bromobenzyl)pseudouridine
1-(4-Chlorobenzyl)pseudouridine
1-(4-Fluorobenzyl)pseudouridin
1-(4-Iodobenzyl)pseudouridine
1-(4-Methanesulfonylbenzyl)pseudouridine
1-(4-Methoxybenzyl)pseudouridine
1-(4-Methoxy-benzyl)pseudouridine
1-(4-Methoxy-phenyl)pseudouridine
1-(4-Methylbenzyl)pseudouridine
1-(4-Methyl-benzyl)pseudouridine
1-(4-Nitrobenzyl)pseudouridine
1-(4-Nitro-benzyl)pseudouridine
1( 4-Nitro-phenyl)pseudouridine
1-(4-Thiomethoxybenzyl)pseudouridine
1-(4-Trifluoromethoxybenzyl)pseudouridine
1-(4-Trifluoromethylbenzyl)pseudouridine
1-(5-Amino-pentyl)pseudouridine
1-(6-Amino-hexyl)pseudouridine
1,6-Dimethyl-pseudouridine
1-[3-(2-{2-[2-(2-Aminoethoxy)-ethoxy]-ethoxy }-ethoxy)-
propionyl } pseudouridine
1-{3-[2-(2-Aminoethoxy)-ethoxy]-propionyl } pseudouridine
1-Acetylpseudouridine
1-Alkyl-6-(1-propynyl)-pseudo-uridine
1-Alkyl-6-(2-propynyl)-pseudo-uridine
1-Alkyl-6-allyl-pseudo-uridine
1-Alkyl-6-ethynyl-pseudo-uridine
1-Alkyl-6-homoallyl-pseudo-uridine
1-Alkyl-6-vinyl-pseudo-uridine
1-Allylpseudouridine
1-Aminomethyl-pseudo-uridine
1-Benzoylpseudouridine
1-Benzyloxymethylpseudouridine
1-Benzyl-pseudo-uridine
1-Biotinyl-PEG2-pseudouridine
1-Biotinylpseudouridine
1-Butyl-pseudo-uridine
1-Cyanomethylpseudouridine
1-Cyclobutylmethyl-pseudo-uridine
1-Cyclobutyl-pseudo-uridine
1-Cycloheptylmethyl-pseudo-uridine
1-Cycloheptyl-pseudo-uridine
1-Cyclohexylmethyl-pseudo-uridine
1-Cyclohexyl-pseudo-uridine
1-Cyclooctylmethyl-pseudo-uridine
1-Cyclooctyl-pseudo-uridine
1-Cyclopentylmethyl-pseudo-uridine
1-Cyclopentyl-pseudo-uridine
1-Cyclopropylmethyl-pseudo-uridine
1-Cyclopropyl-pseudo-uridine
1-Ethyl-pseudo-uridine
1-Hexyl-pseudo-uridine
1-Homoallylpseudouridine
1-Hydroxymethylpseudouridine
1-iso-propyl-pseudo-uridine
1-Me-2-thio-pseudo-uridine
1-Me-4-thio-pseudo-uridine
1-Me-alpha-thio-pseudo-uridine
1-Methanesulfonylmethylpseudouridine
1-Methoxymethylpseudouridine uridine
1-Methyl-6-(2,2,2-Trifluoroethyl)pseudo-uridine
1-Methyl-6-(4-morpholino )-pseudo-uridine
1-Methyl-6-(4-thiomorpholino)-pseudo-uridine
1-Methyl-6-(substituted phenyl)pseudo-uridine
1-Methyl-6-amino-pseudo-uridine
1-Methyl-6-azido-pseudo-uridine
1-Methyl-6-bromo-pseudo-uridine
1-Methyl-6-butyl-pseudo-uridine
1-Methyl-6-chloro-pseudo-uridine
1-Methyl-6-cyano-pseudo-uridine
1-Methyl-6-dimethylamino-pseudo-uridine
1-Methyl-6-ethoxy-pseudo-uridine
1-Methyl-6-ethylcarboxylate-pseudo-uridine
1-Methyl-6-ethyl-pseudo-uridine
1-Methyl-6-fluoro-pseudo-uridine
1-Methyl-6-formyl-pseudo-uridine
1-Methyl-6-hydroxyamino-pseudo-uridine
1-Methyl-6-hydroxy-pseudo-uridine
1-Methyl-6-iodo-pseudo-uridine
1-Methyl-6-iso-propyl-pseudo-uridine
1-Methyl-6-methoxy-pseudo-uridine
1-Methyl-6-methylamino-pseudo-uridine
1-Methyl-6-phenyl-pseudo-uridine
1-Methyl-6-propyl-pseudo-uridine
1-Methyl-6-tert-butyl-pseudo-uridine
1-Methyl-6-trifluoromethoxy-pseudo-uridine
1-Methyl-6-trifluoromethyl-pseudo-uridine
1-Morpholinomethylpseudouridine
1-Pentyl-pseudo-uridineuridine
1-Phenyl-pseudo-uridine
1-Pivaloylpseudouridine
1-Propargylpseudouridine
1-Propyl-pseudo-uridine
1-propynyl-pseudouridine
1-p-tolyl-pseudo-uridine
1-tert-Butyl-pseudo-uridine
1-Thiomethoxymethylpseudouridine
1-Thiomorpholinomethylpseudouridine
1-Trifluoroacetylpseudouridine
1-Trifluoromethyl-pseudouridine
1-Vinylpseudouridine
2,2′-anhydro-uridine
2′-bromo-deoxyuridine
2′-F-5-Methyl-2′-deoxy-uridine
2′-OMe-5-Me-uridine
2′-OMe-pseudouridine
2′-alpha-Ethynyluridine
2′-alpha-Trifluoromethyluridine
2′-beta-Ethynyluridine
2′-beta-Trifluoromethyluridiner
2′-Deoxy-2′,2′-difluorouridine
2′-Deoxy-2′-a-mercaptouridin
2′-Deoxy-2′-alpha-thiomethoxyuridine
2′-Deoxy-2′-beta-aminouridine
2′-Deoxy-2′-beta-azidouridine
2′-Deoxy-2′-beta-bromouridine
2′-Deoxy-2′-beta-chlorouridine
2′-Deoxy-2′-beta-fluorouridine
2′-Deoxy-2′-beta-iodouridine
2′-Deoxy-2′-beta-mercaptouridine
2′-Deoxy-2′-beta-thiomethoxyuridine
2-methoxy-4-thio-uridine
2-methoxyuridine
2′-O-Methyl-5-(1-propynyl)uridine
3-Alkyl-pseudo-uridine
4′-Azidouridine
4′-Carbocyclic uridine
4′-Ethynyluridine
5-(1-Propynyl)ara-uridine
5-(2-Furanyl)uridine
5-Cyanouridine
5-Dimethylaminouridine
5′-Homo-uridine
5-iodo-2′-fluoro-deoxyuridine
5-Phenylethynyluridine
5-Trideuteromethyl-6-deuterouridine
5-Trifluoromethyl-Uridine
5-Vinylarauridine
6-(2,2,2-Trifluoroethyl)-pseudo-uridine
6-(4-Morpholino)-pseudo-uridine
6-(4-Thiomorpholino)-pseudo-uridine
6-(Substituted-Phenyl)-pseudo-uridine
6-Amino-pseudo-uridine
6-Azido-pseudo-uridine
6-Bromo-pseudo-uridine
6-Butyl-pseudo-uridine
6-Chloro-pseudo-uridine
6-Cyano-pseudo-uridine
6-Dimethylamino-pseudo-uridine
6-Ethoxy-pseudo-uridine
6-Ethylcarboxylate-pseudo-uridine
6-Ethyl-pseudo-uridine
6-Fluoro-pseudo-uridine
6-Formyl-pseudo-uridine
6-Hydroxyamino-pseudo-uridine
6-Hydroxy-pseudo-uridine
6-Iodo-pseudo-uridine
6-iso-Propyl-pseudo-uridine
6-Methoxy-pseudo-uridine
6-Methylamino-pseudo-uridine
6-Methyl-pseudo-uridine
6-Phenyl-pseudo-uridine
6-Phenyl-pseudo-uridine
6-Propyl-pseudo-uridine
6-tert-Butyl-pseudo-uridine
6-Trifluoromethoxy-pseudo-uridine
6-Trifluoromethyl-pseudo-uridine
alpha-thio-pseudo-uridine
Pseudouridine 1-(4-methylbenzenesulfonic acid)
Pseudouridine 1-(4-methylbenzoic acid)TP
Pseudouridine 1-[3-(2-ethoxy)]propionic acid
Pseudouridine 1-[3-{2-(2-[2-(2-ethoxy)-ethoxy]-ethoxy )-
ethoxy}]propionic acid
Pseudouridine 1-[3-{2-(2-[2-{2(2-etho)-ethoxy]-ethoxy )-
ethoxy}]propionic acid
Pseudouridine 1-[3-{2-(2-[2-ethoxy ]-ethoxy)-ethoxy}]propionic acid
Pseudouridine 1-[3-{2-(2-ethoxy)-ethoxy}] propionic acid
Pseudouridine 1-methylphosphonic acid
Pseudouridine TP 1-methylphosphonic acid diethyl ester
Pseudo-uridine-N1-3-butanoic acid
Pseudo-uridine-N1-4-butanoic acid
Pseudo-uridine-N 1-5-pentanoic acid
Pseudo-uridine-N1-6-hexanoic acid
Pseudo-uridine-N1-7-heptanoic acid
Pseudo-uridine-N1-methyl-p-benzoic acid
Pseudo-uridine-N1-p-benzoic acid

[1013] In an embodiment, a TREM, a TREM core fragment or a TREM fragment described herein comprises a modification provided in Table 6, or a combination thereof. The modifications provided in Table 6 occur naturally in RNAs, and are used herein on a synthetic TREM, a TREM core fragment or a TREM fragment at a position that does not occur in nature.

TABLE 6
Additional exemplary modifications

| Modification | Modification |
|---|---|
| 2-methylthio-N6-(cis- | 2-thiocytidine |
| hvdroxvisopentenvl)adenosine | 3-methylcytidine |
| 2-methylthio-N6-methyladenosine | 5-formylcytidine |
| 2-methylthio-N6-threonyl | 5-hydroxymethylcytidine |
| carbamoyladenosine | 5-methylcytidine |
| N6-glycinylcarbamoyladenosine | N4-acetylcytidine |
| N6-isopentenyladenosine | 2′-O-methylcytidine |
| N6-methyladenosine | 2′-O-methylcytidine |
| N6-threonylcarbamoyladenosine | 5,2′-O-dimethylcytidine |
| 1,2′-O-dimethyladenosine | 5-formyl-2′-O-methylcytidine |
| 1-methyladenosine | lysidine |
| 2′-O-methyladenosine | N4,2′-O-dimethy lcytidine |
| 2′-O-ribosyladenosine (phosphate) | N4-acetyl-2′-O-methylcytidine |
| 2-methyladenosine | N4-methylcytidine |
| 2-methylthio-N6 isopentenyladenosine | N4,N4-Dimethyl-2′-OMe-Cytidine |
| 2-methylthio-N6-hydroxynorvalyl | 7-methylguanosine |
| carbamoyladenosine | N2,2′-O-dimethylguanosine |
| 2′-O-methyladenosine | N2-methylguanosine |
| 2′-O-ribosyladenosine (phosphate) | wyosme |
| isopenteny ladenosine | 1,2′-O-dimethylguanosine |
| N6-(cis-hydroxyisopentenyl)adenosine | 1-methylguanosine |
| N6,2′-O-dimethyladenosine | 2′-O-methylguanosine |
| N6,2′-O-dimethyladenosine | 2′-O-ribosylguanosine (phosphate) |
| N6,N6,2′-O-trimethyladenosine | 2′-O-methylguanosine |
| N6,N6-dimethyladenosine | 2′-O-ribosylguanosine (phosphate) |
| N6-acetyladenosine | 1-methyl-pseudouridine |
| N6-hydroxynorvalylcarbamoyladenosine | 2′-O-methyluridine |
| N6-methyl-N6- | 2′-O-methylpseudouridine |
| threonylcarbamoyladenosine | 2′-O-methyluridine |
| 2-methyladenosine | 2-thio-2′-O-methyluridine |
| 2-methylthio-N⁶-isopentenyladenosine | 3-(3-amino-3-carboxypropyl)uridine |
| 7-aminomethyl-7-deazaguanosine | 3,2′-0-dimethyluridine |
| 7-cyano-7-deazaguanosine | 3-Methyl-pseudo-Uridine |
| archaeosine | 4-thiouridine |
| methylwyosine | 5-(carboxyhydroxymethyl)uridine |
| N2,7-dimethylguanosine | 5-(carboxyhydroxymethyl)uridine methyl |
| N2,N2,2′-O-trimethylguanosine | ester |
| N2,N2,7-trimethylguanosine | 5,2′-O-dimethyluridine |
| N2,N2-dimethylguanosine | 5,6-dihydro-uridine |
| N2, 7,2′-O-trimethylguanosine | 5-aminomethy1-2-thiouridine |
| 1-methylinosine | 5-carbamoylmethyl-2′-0-methyluridine |
| mosme | 5-carbamoylmethyluridine |
| 1,2′-O-dimethylinosine | 5-carboxyhydroxymethyluridine |
| 2′-O-methylinosine | 5-carboxyhydroxymethyluridine methyl |
| 2′-O-methylinosine | ester |
| epoxyqueuosine | 5-carboxymethylaminomethyl-2′-O- |
| galactosyl-queuosine | methyluridine |
| mannosyl-queuosine | 5-carboxymethylaminomethyl-2- |
| 2′-O-methyluridine | thiouridine |
| 2-thiouridine | 5-carboxymethylaminomethyl-2- |
| 3-methyluridine | thiouridine |
| 5-carboxymethyluridine | 5-carboxymethylaminomethyluridine |
| 5-hydroxyuridine | 5-carboxymethylaminomethyluridine |
| 5-methyluridine | 5-Carbamoylmethyluridine |
| 5-taurinomethyl-2-thiouridine | 5-methoxycarbonylmethyl-2′-O- |
| 5-taurinomethyluridine | methyluridine |
| dihydrouridine | 5-methoxycarbonylmethy 1-2-thiouridine |
| pseudouridine | 5-methoxycarbonylmethyluridine |
| (3-(3-amino-3-carboxypropyl)uridine | 5-methoxyuridine |
| 1-methyl-3-(3-amino-5- | 5-(iso-Pentenylaminomethyl)-2- |
| carboxypropyl)pseudouridine | thiouridine |
| 1-methylpseduouridine | 5-(iso-Pentenylaminomethyl)-2′-O- |
| 5-methyl-2-thiouridine | methyluridine |
| 5-methylaminomethyl-2-selenouridine | 5-(iso-Pentenylaminomethyl)uridine |
| 5-methylaminomethyl-2-thiouridine | wybutosine |
| 5-methylaminomethyluridine | hydroxywybutosine |
| 5-Methyldihydrouridine | isowyosme |
| 5-Oxyacetic acid- Uridine | peroxywybutosine |
| 5-Oxyacetic acid-methyl ester-Uridin | undermodified hydroxywybutosine |
| Nl-methyl-pseudo-uridine | 4-demethylwyosine |
| uridine 5-oxyacetic acid | altriol |
| uridine 5-oxyacetic acid methyl ester | |
| 3-(3-Amino-3-carboxypropyl)-Uridine | |

[1014] In an embodiment, a TREM, a TREM core fragment or a TREM fragment described herein comprises a non-naturally occurring modification provided in Table 7, or a combination thereof.

TABLE 7
Additional exemplary non-naturally occurring modifications

| Modification | Modification |
|---|---|
| 2,6-(diamino)purine | 2′-fluoro-modified bases |
| 1-(aza)-2-(thio)-3-(aza)-phenoxazin-1-yl | 2′-O-methyl-ribose |
| 1,3-(diaza)-2-(oxo)-phenthiazin-1-yl | 2-oxo-7-aminopyridopyrimidin-3-yl |
| 1,3-(diaza)-2-(oxo)-phenoxazin-1-yl | 2-oxo-pyridopyrimidine-3-yl |
| 1,3,5-(triaza)-2,6-(dioxa)-naphthalene | 2-pyridinone |
| 2 (amino)purine | 3 nitropyrrole |
| 2,4,5-(trimethyl)phenyl | 3-(methyl)-7-(propynyl)isocarbostyrilyl |
| 2′methyl, 2′amino, 2′azido, 2′fluro- | 3-(methyl)isocarbostyrilyl |
| cytidine | 4-(fluoro)-6-(methyl)benzimidazole |
| 2′methyl, 2′amino, 2′azido, 2′fluro- | 4-(methyl)benzimidazole |
| adenine | 4-(methyl)indolyl |
| 2′methyl, 2′amino, 2′azido, 2′fluro- | 4,6-(dimethyl)indolyl |
| uridine | 5 nitroindole |
| 2′-amino-2′-deoxyribose | 5 substituted pyrimidines |
| 2-amino-6-Chloro-purine | 5-(methyl)isocarbostyrilyl |
| 2-aza-inosinyl | 5-nitroindole |
| 2′-azido-2′-deoxyribose | 6-(aza)pyrimidine |
| 2′fluoro-2′-deoxyribose | bis-ortho-substituted-6-phenyl-pyrrolo- |
| 6-(azo)thymine | pyrimidin-2-on-3-yl |
| 6-(methyl)-7-(aza)indolyl | difluorotolyl |
| 6-chloro-purine | hypoxanthine |
| 6-phenyl-pyrrolo-pyrimidin-2-on-3-yl | imidizopyridinyl |
| 7-(aminoalkylhydroxy)-1-(aza)-2-(thio)- | inosinyl |
| 3-(aza)-phenthiazin-1-yl | isocarbostyrilyl |
| 7-(aminoalkylhydroxy)-1-(aza)-2-(thio)- | isoguanosine |
| 3-(aza)-phenoxazin-1-yl | N2-substituted purines |
| 7-(aminoalkylhydroxy)-1,3-(diaza)-2- | N6-methyl-2-amino-purine |
| (oxo)-phenoxazin-1-yl | N6-substituted purines |
| 7-(aminoalkylhydroxy)-1,3-(diaza)-2- | N-alkylated derivative |
| (oxo)-phenthiazin-1-yl | napthalenyl |
| 7-(aminoalkylhydroxy)-1,3-(diaza)-2- | nitrobenzimidazolyl |
| (oxo)-phenoxazin-1-yl | nitroimidazolyl |
| 7-(aza)indolyl | nitroindazolyl |
| 7-(guanidiniumalkylhydroxy)-1-(aza)-2- | nitropyrazolyl |
| (thio)-3-(aza)-phenoxazinl-yl | nubularine |
| 7-(guanidiniumalkylhydroxy)-1-(aza)-2- | O6-substituted purines |
| (thio)-3-(aza)-phenthiazin-1-yl | O-alkylated derivative |
| 7-(guanidiniumalkylhydroxy)-1-(aza)-2- | ortho-(aminoalkylhydroxy)-6-phenyl- |
| (thio)-3-(aza)-phenoxazin-1-yl | pyrrolo-pyrimidin-2-on-3-yl |
| 7-(guanidiniumalkylhydroxy)-1,3- | ortho-substituted-6-phenyl-pyrrolo- |
| (diaza)-2-(oxo)-phenoxazin-1-yl | pyrimidin-2-on-3-yl |
| 7-(guanidiniumalkyl-hydroxy)-1,3- | Oxoformycin TP |
| (diaza)-2-(oxo)-phenoxazin-1-yl | para-(aminoalkylhydroxy)-6-phenyl- |
| 7-(guanidiniumalkylhydroxy)-1,3- | pyrrolo-pyrimidin-2-on-3-yl |
| (diaza)-2-(oxo)-phenoxazin-1-yl | para-substituted-6-phenyl-pyrrolo- |
| 7-(propynyl)isocarbostyrilyl | pyrimidin-2-on-3-yl |
| 7-(propynyl)isocarbostyrilyl, propynyl- | pentacenyl |
| 7-(aza)indolyl | phenanthracenyl |
| 7-deaza-inosinyl | phenyl |
| 7-substituted 1-(aza)-2-(thio)-3-(aza)- | propynyl-7-(aza)indolyl |
| phenthiazin-1-yl | pyrenyl |
| 7-substituted 1,3-(diaza)-2-(oxo)- | pyridopyrimidin-3-yl |
| phenoxazin-1-yl | pyridopyrimidin-3-yl, 2-oxo-7-amino- |
| 9-(methyl)-imidizopyridinyl | pyridopyrimidin-3-yl |
| aminoindolyl | pyrrolo-pyrimidin-2-on-3-yl |
| anthracenyl | pyrrolopyrimidinyl |
| bis-ortho-(aminoalkylhydroxy)-6- | pyrrolopyrizinyl |
| phenyl-pyrrolo-nvrimidin-2-on-3-yl | Formycin A |
| stilbenzyl | Formycin B |
| substituted 1,2,4-triazoles | Pyrrolosine |
| tetracenyl | 2′-OH-ara-adenosine |
| tubercidine | 2′-OH-ara-cytidine |
| xanthine | 2′-OH-ara-uridine |
| Xanthosine | 2′-OH-ara-guanosine |
| 2-thio-zebularine | 5-(2-carbomethoxyvinyl)uridine |
| 5-aza-2-thio-zebularine | N6-(19-Amino- |
| 7-deaza-2-amino-purine | pentaoxanonadecyl)adenosine |
| pyridin-4-one ribonucleoside | |
| 2-Amino-riboside | |

[1015] In an embodiment, a TREM, a TREM core fragment or a TREM fragment described herein comprises a non-naturally occurring modification provided in Table 8, or a combination thereof.

TABLE 8
Exemplary backbone modifications

| Modification | Modification |
|---|---|
| 3′-alkylene phosphonates | oligonucleosides with heteroatom |
| 3′-amino phosphoramidate | intenucleoside linkage |
| alkene containing backbones | phosphinates |
| aminoalkylphosphotriesters | phosphoramidates |
| aminoalkylphosphoramidates | phosphorothioates |
| boranophosphates | phosphorothioate intenucleoside |
| —CH2-0-N(CH3)—CH2— | linkages |
| —CH2—N(CH3)—N(CH3)—CH2— | phosphorodithioates |
| —CH2—NH—CH2— | phosphotriesters |
| chiral phosphonates | PNA |
| chiral phosphorothioates | siloxane backbones |
| formacetyl and thioformacetyl | sulfamate backbones |
| backbones | sulfide sulfoxide and sulfone |
| methylene (methylimino) | backbones |
| methylene formacetyl and | sulfonate and sulfonamide backbones |
| thioformacetyl backbones | thionoalkylphosphonates |
| methyleneimino and | thionoalkylphosphotriesters |
| methylenehydrazino backbones | thionophosphoramidates |
| morpholino linkages | methylphosphonates |
| —N(CH3)—CH2—CH2— | phosphonoacetates |
| Constrained nucleic acid (CNA) | Phosphorothioate |
| 2′-O-methyl | Constrained nucleic acid (CNA) |
| 2′-O-methoxyethyl (MOE) | 2′-O-methyl |
| 2′ Fluoro | 2′-O-methoxyethyl (MOE) |
| Locked nucleic acid (LNA) | 2′ Fluoro |
| (S)-constrained ethyl (cEt) | Locked nucleic acid (LNA) |
| Fluoro hexitol nucleic acid (FHNA) | (S)-constrained ethyl (cEt) |
| 5′-phosphorothioate | Fluoro hexitol nucleic acid (FHNA) |
| Phosphorodiamidate Morpholino Oligomer | 5′-phosphorothioate |
| (PMO) | Phosphorodiamidate Morpholino Oligomer |
| Tricyclo-DNA (tcDNA) | (PMO) |
| (S) 5′-C-methyl | Tricyclo-DNA (tcDNA) |
| (E)-vinylphosphonate | (S) 5′-C-methyl |
| Methyl phosphonate | (E)-vinylphosphonate |
| (S) 5′-C-methyl with phosphate | Methyl phosphonate |
| (R) 5′-C-methyl with phosphate | (S) 5′-C-methyl with phosphate |
| DNA | (R) 5′-C-methyl with phosphate |
| (R) 5′-C-methyl | DNA |
| GNA (glycol nucleic acid) | (R) 5′-C-methyl |
| alkyl phosphonates | GNA (glycol nucleic acid) |
| Phosphorothioate | alkyl phosphonates |

[1016] In an embodiment, a TREM, a TREM core fragment or a TREM fragment described herein comprises a non-naturally occurring modification provided in Table 9, or a combination thereof.

TABLE 9
Exemplary non-naturally occurring backbone modificiations
Name of synthetic backbone modifications

Phosphorothioate
Constrained nucleic acid (CNA)
2′ O′methylation
2′-O-methoxyethylribose (MOE)
2′ Fluoro
Locked nucleic acid (LNA)
(S)-constrained ethyl (cEt)
Fluoro hexitol nucleic acid (FHNA)
5′phosphorothioate
Phosphorodiamidate Morpholino Oligomer (PMO)
Tricyclo-DNA (tcDNA)
(S) 5′-C-methyl
(E)-vinylphosphonate
Methyl phosphonate
(S) 5′-C-methyl with phosphate

### Design Guidance

[1017] The present disclosure further describes representative design principles for installing a non-naturally occurring modification on a TREM, TREM core fragment, or TREM fragment. Without being bound by theory, these design principles may provide guidance for modulating a parameter of a TREM, TREM core fragment, or TREM fragment described herein. These design principles are also referred to herein as “Design Guidances”. For example, a TREM comprising a non-naturally occurring modification pattern according to a Design Guidance may exhibit improved stability, e.g., in vitro or in a cell. Representative Design Guidances are described in greater detail below.

### Design Guidance 1

[1018] In an embodiment, a TREM comprises a sequence of Formula (I): [L1]-[ASt Domain1]-[L2]-[DH Domain]-[L3]-[ACH Domain]-[VL Domain]-[TH Domain]-[L4]-[ASt Domain2], wherein independently, [L1] and [VL Domain], are optional; and one of [L1], [ASt Domain1], [L4], and [ASt Domain2] comprises a nucleotide having a non-naturally occurring modification.

[1019] (a) In an embodiment, the nucleotide having a non-naturally occurring modification is any one of nucleotide positions 1-6 or 66-76., e.g., (i) wherein the nucleotide position corresponds to 1-6 or 66-76 of SEQ ID NO: 622 or (ii) wherein the nucleotide position corresponds to 1-6 or 66-76 according to the CtNS.

[1020] (b) In an embodiment, one of [L1], [ASt Domain1], [L4], and [ASt Domain2] comprises a nucleotide having a 2′-O-methoxy (2′O-Me) modification. In an embodiment, the nucleotide having the 2′OMe modification is any one of nucleotide positions 1-6, 65-70, and 74-76, e.g., (i) wherein the nucleotide position corresponds to 1-6, 65-70, and 74-76 of SEQ ID NO: 622 or (ii) wherein the nucleotide position corresponds to 1-6, 65-70, and 74-76 according to the CtNS.

[1021] (c) In an embodiment, one of [L1], [ASt Domain1], [L4], and [ASt Domain2] comprises a nucleotide having a phosphorothiorate (PS) modification. In an embodiment, the PS modiciation is present on any one of nucleotide positions 1-6 or 65-76, e.g., (i) wherein the nucleotide position corresponds to 1-6 or 65-76 of SEQ ID NO: 622 or (ii) wherein the nucleotide position corresponds to 1-6 or 65-76 according to the CtNS.

[1022] (d) In an embodiment, one of [L1], [ASt Domain1], [L4], and [ASt Domain2] comprises a nucleotide having a 2′-O-methoxy (2′O-Me) modification and a nucleotide having a phosphorothiorate (PS) modification. In an embodiment, both the 2′-OMe and the PS modiciation are independently present on any one of nucleotide positions 1-6 or 65-76, e.g., (i) wherein the nucleotide position corresponds to 1-6 or 65-76 of SEQ ID NO: 622 or (ii) wherein the nucleotide position corresponds to 1-6 or 65-76 according to the CtNS.

[1023] (e) In an embodiment, one of [L1]. [ASt Domain1]. [L4], and [ASt Domain2] comprises a nucleotide having a 2′-O-methoxy (2′O-Me) modification and a nucleotide having a phosphorothiorate (PS) modification, provided that none of nucleotides corresponding to positions 71-73 (e.g., corresponding to SEQ ID NO: 622 or the CtNS) comprise a 2′-O-methoxy (2′O-Me) modification.

[1024] (f) In an embodiment, one of [L1], [ASt Domain1], [L4], and [ASt Domain2] comprises a nucleotide having a phosphorothiorate (PS) modification on one of positions 1-3 or 74-76 (e.g., corresponding to SEQ ID NO: 622 or the CtNS).

### Design Guidance 2

[1025] In an embodiment, a TREM comprises a sequence of Formula (I): [L1]-[ASt Domain1]-[L2]-[DH Domain]-[L3]-[ACH Domain]-[VL Domain]-[TH Domain]-[L4]-[ASt Domain2], wherein independently. [L1] and [VL Domain], are optional; and one of [DH Domain]-[L3] comprises a nucleotide having a non-naturally occurring modification.

[1026] (a) In an embodiment, the nucleotide having a non-naturally occurring modification is any one of nucleotide positions 10-13 or 22-25., e.g., (i) wherein the nucleotide position corresponds to 10-13 or 22-25 of SEQ ID NO: 622 or (ii) wherein the nucleotide position corresponds to 10-13 or 22-25 according to the CtNS.

[1027] (b) In an embodiment, one of [DH Domain]-[L3] comprises a nucleotide having a 2′-O-methoxy (2′O-Me) modification. In an embodiment, the nucleotide having the 2′OMe modification is any one of nucleotide positions 10-13 or 22-25., e.g., (i) wherein the nucleotide position corresponds to 10-13 or 22-25 of SEQ ID NO: 622 or (ii) wherein the nucleotide position corresponds to 10-13 or 22-25 according to the CtNS.

[1028] (c) In an embodiment, one of [DH Domain]-[L3] comprises a nucleotide that does not have a phosphorothioate (PS) modification. In an embodiment, the nucleotide that does not comprise the PS modification is any one of nucleotide positions 10-13 or 22-25., e.g., (i) wherein the nucleotide position corresponds to 10-13 or 22-25 of SEQ ID NO: 622 or (ii) wherein the nucleotide position corresponds to 10-13 or 22-25 according to the CtNS.

### Design Guidance 3

[1029] In an embodiment, a TREM comprises a sequence of Formula (I): [L1]-[ASt Domain1]-[L2]-[DH Domain]-[L3]-[ACH Domain]-[VL Domain]-[TH Domain]-[L4]-[ASt Domain2], wherein independently, [L1] and [VL Domain], are optional; and the [ACH Domain] does not comprise a 2′-nucleotide sugar modification (e.g., 2′-ribose modification).

[1030] (a) In an embodiment, the [ACH Domain] comprises a nucleotide having an internucleotide modification. In an embodiment, the nucleotide having the internucleotide modification is present on any one of nucleotide positions 32-28, e.g., (i) wherein the nucleotide position corresponds to any one of 32-38 of SEQ ID NO: 622 or (ii) wherein the nucleotide position corresponds to any one of 32-38 according to the CtNS.

[1031] (b) In an embodiment, the [ACH Domain] comprises a nucleotide having a phosphorothioate (PS) modification. In an embodiment, the nucleotide having the PS modification is present on any one of nucleotide positions 32-28, e.g., (i) wherein the nucleotide position corresponds to any one of 32-38 of SEQ ID NO: 622 or (ii) wherein the nucleotide position corresponds to any one of 32-38 according to the CtNS.

[1032] (c) In an embodiment, the [ACH Domain] comprises a nucleotide that does not have a 2′-nucleotide sugar modification. In an embodiment, the [ACH Domain] comprises a nucleotide that does not have a 2′-O-methoxy (2′O-Me) modification.

[1033] (d) In an embodiment, the [ACH Domain] comprises a nucleotide having an internucleotide modification (e.g., a PS modification) and a nucleotide that does not have a 2′-nucleotide sugar modification (e.g., a 2′O-Me modification).

[1034] (e) In an embodiment, the [ACH Domain] comprises a nucleotide having a 2′-fluoro (2′F) modification. In an embodiment, the nucleotide having the 2′F modification is nucleotide position 33, e.g., (i) wherein the nucleotide position corresponds to 33 of SEQ ID NO: 622 or (ii) wherein the nucleotide position corresponds to 33 according to the CtNS.

[1035] (f) In an embodiment, the [ACH Domain] comprises a nucleotide having an (i) internucleotide modification (e.g., a PS modification); (ii) a nucleotide having a 2′F modification; and (iii) a nucleotide that does not have a 2′OMe modification. In an embodiment, the nucleotide having the 2′F modification is nucleotide position 33, e.g., (i) wherein the nucleotide position corresponds to 33 of SEQ ID NO: 622 or (ii) wherein the nucleotide position corresponds to 33 according to the CtNS.

[1036] (g) In an embodiment, the [ACH Domain] comprises a nucleotide having a phosphorothioate (PS) modification on the anticodon, e.g., at any one of positions 34-36, (i) wherein the nucleotide position corresponds to any one of 34-36 of SEQ ID NO: 622 or (ii) wherein the nucleotide position corresponds to any one of 34-36 according to the CtNS.

### Design Guidance 4

[1037] In an embodiment, a TREM comprises a sequence of Formula (I): [L1]-[ASt Domain1]-[L2]-[DH Domain]-[L3]-[ACH Domain]-[VL Domain]-[TH Domain]-[L4]-[ASt Domain2], wherein independently, [L1] and [VL Domain], are optional; and the [VL Domain] comprises a nucleotide having a non-naturally occurring modification.

[1038] (a) In an embodiment, the [VL Domain] comprises a nucleotide having a 2′-nucleotide sugar modification., e.g., (i) wherein the nucleotide having the 2′-nucleotide sugar modification corresponds to any one of 44-48 of SEQ ID NO: 622 or (ii) wherein the nucleotide having the 2′-nucleotide sugar modification corresponds to any one of V1-V27 and 46-48 according to the CtNS.

[1039] (b) In an embodiment, the [VL Domain] comprises a nucleotide having a 2′-OMe modification. In an embodiment, the 2′OMe modification is present on any one of nucleotide positions within the [VL Domain]., e.g., (i) wherein the nucleotide position corresponds to any one of 44-48 of SEQ ID NO: 622 or (ii) wherein the nucleotide position corresponds to any one of V1-V27 and 46-48 according to the CtNS.

[1040] (b) In an embodiment, the [VL Domain] comprises a nucleotide having a 2′-F modification. In an embodiment, the F modification is present on any one of nucleotide positions within the [VL Domain]., e.g., (i) wherein the nucleotide position corresponds to any one of 44-48 of SEQ ID NO: 622 or (ii) wherein the nucleotide position corresponds to any one of V1-V27 and 46-48 according to the CtNS.

[1041] (d) In an embodiment, the [VL Domain] comprises a nucleotide that does not have an internucleotide modification. In an embodiment, the [VL Domain] comprises a nucleotide that does not have a PS modification, e.g., (i) wherein the nucleotide position corresponds to any one of 44-48 of SEQ ID NO: 622 or (ii) wherein the nucleotide position corresponds to any one of V1-V27 and 46-48 according to the CtNS.

[1042] (e) In an embodiment, the [VL Domain] comprises (i) a nucleotide having a 2′-OMe modification; (ii) a nucleotide having a 2′-F modification; and (iii) a nucleotide that does not have an internucleotide modification (e.g., a PS modification). In an embodiment, the nucleotide having the 2′OMe modification, the nucleotide having the 2′F modification, and the nucleotide not having the internucleotide modification (e.g., the PS modification) are present on any one of nucleotide positions within the [VL Domain]., e.g., (i) wherein the nucleotide positions correspond to any one of 44-48 of SEQ ID NO: 622 or (ii) wherein the nucleotide positions correspond to any one of V1-V27 and 46-48 according to the CtNS.

### Design Guidance 5

[1043] In an embodiment, a TREM comprises a sequence of Formula (I): [L1]-[ASt Domain1]-[L2]-[DH Domain]-[L3]-[ACH Domain]-[VL Domain]-[TH Domain]-[L4]-[ASt Domain2], wherein independently. [L1] and [VL Domain], are optional; and one of [TH Domain] comprises a nucleotide having a non-naturally occurring modification. In an embodiment, the nucleotide having a non-naturally occurring modification is present on any one of nucleotide positions 49-65., e.g., (i) wherein the nucleotide position corresponds to 49-65 of SEQ ID NO: 622 or (ii) wherein the nucleotide position corresponds to 49-65 according to the CtNS. In an embodiment, the [TH Domain] comprises a nucleotide having a 2′-nucleotide sugar modification. In an embodiment, the nucleotide having the 2′-nucleotide sugar modification is any one of nucleotide positions 49-65, e.g., (i) wherein the nucleotide position corresponds to 49-65 of SEQ ID NO: 622 or (ii) wherein the nucleotide position corresponds to 49-65 according to the CtNS.

[1044] (a) In an embodiment, the nucleotide having a non-naturally occurring modification is any one of nucleotide positions 49-53 and 61-65, e.g., (i) wherein the nucleotide position corresponds to 49-53 and 61-65 of SEQ ID NO: 622 or (ii) wherein the nucleotide position corresponds to 49-53 and 61-65 according to the CtNS.

[1045] (b) In an embodiment, the [TH Domain] comprises a nucleotide having a 2′-OMe modification. In an embodiment, the nucleotide having the 2′-OMe modification is any one of nucleotide positions 49-53, 61-62, and 64-65, e.g., (i) wherein the nucleotide position corresponds to 49-53, 61-62, and 64-65 of SEQ ID NO: 622 or (ii) wherein the nucleotide position corresponds to 49-53, 61-62, and 64-65 according to the CtNS.

[1046] (c) In an embodiment, the [TH Domain] comprises a nucleotide having a 2′-F modification. In an embodiment, the nucleotide having the 2′-F modification is nucleotide position 63, e.g., (i) wherein the nucleotide position corresponds to 63 of SEQ ID NO: 622 or (ii) wherein the nucleotide position corresponds to 63 according to the CtNS.

[1047] (d) In an embodiment, the [TH Domain] comprises a nucleotide that does not have an internucleotide modification (e.g., a PS modification). In an embodiment, the nucleotide not having an internucleotide modification (e.g., a PS modification) is any one of nucleotide positions 49-53 and 61-65, e.g., (i) wherein the nucleotide position corresponds to 49-53 and 61-65 of SEQ ID NO: 622 or (ii) wherein the nucleotide position corresponds to 49-53 and 61-65 according to the CtNS.

### Design Guidance 6

[1048] In an embodiment, a TREM comprises a sequence of Formula (I): [L1]-[ASt Domain1]-[L2]-[DH Domain]-[L3]-[ACH Domain]-[VL Domain]-[TH Domain]-[L4]-[ASt Domain2], wherein independently, [L1] and [VL Domain], are optional; and each of [DH Domain] and the [TH Domain] comprises a nucleotide having a non-naturally occurring modification.

[1049] (a) In an embodiment, the [DH Domain] comprises a nucleotide having a non-naturally occurring modification at any one of nucleotide positions 14-21 (e.g., 14-20, e.g., 16-18), e.g., (i) wherein the nucleotide position corresponds to 14-21 (e.g., 14-20, e.g., 16-18) of SEQ ID NO: 622 or (ii) wherein the nucleotide position corresponds to 14-21 (e.g., 14-20, e.g., 16-18) according to the CtNS. In an embodiment, the non-naturally occurring modification is a 2′-nucleotide sugar modification (e.g., 2′-OMe).

[1050] (b) In an embodiment, the [TH Domain] comprises a nucleotide having a non-naturally occurring modification at any one of nucleotide positions 54-60, e.g., (i) wherein the nucleotide position corresponds to 54-60 of SEQ ID NO: 622 or (ii) wherein the nucleotide position corresponds to 54-60 according to the CtNS. In an embodiment, the non-naturally occurring modification is a 2′-nucleotide sugar modification (e.g., 2′-F).

[1051] (c) In an embodiment, the [TH Domain] comprises a nucleotide having a 2′OMe at any one of nucleotide positions 54-60 (e.g., 54, 56, 57, or 59), e.g., (i) wherein the nucleotide position corresponds to 54-60 (e.g., 54, 56, 57, or 59), of SEQ ID NO: 622 or (ii) wherein the nucleotide position corresponds to 54-60 (e.g., 54, 56, 57, or 59), according to the CtNS.

[1052] (d) In an embodiment, the [TH Domain] comprises a nucleotide having a 2′-F at any one of nucleotide positions 54-60 (e.g., 57, 58, or 60), e.g., (i) wherein the nucleotide position corresponds to 54-60 (e.g., 57, 58, or 60) of SEQ ID NO: 622 or (ii) wherein the nucleotide position corresponds to 54-60 (e.g., 57, 58, or 60) according to the CtNS.

[1053] (e) In an embodiment, the TREM comprises a non-naturally occurring modification in both of the [DH Domain] and the [TH Domain], wherein (i) the [DH Domain] comprises a nucleotide having a non-naturally occurring modification at any one of nucleotide positions 14-21 (e.g., 14-20, e.g., 16-18), e.g., (i) wherein the nucleotide position corresponds to 14-21 (e.g., 14-20, e.g., 16-18) of SEQ ID NO: 622 or (ii) wherein the nucleotide position corresponds to 14-21 (e.g., 14-20, e.g., 16-18) according to the CtNS (ii) the [TH Domain] comprises a nucleotide having a non-naturally occurring modification at any one of nucleotide positions 54-60, e.g., (i) wherein the nucleotide position corresponds to 54-60 of SEQ ID NO: 622 or (ii) wherein the nucleotide position corresponds to 54-60 according to the CtNS. In some embodiments, the non-naturally occurring modification is selected from a 2′OMe or 2′F modification.

[1054] Table 21 below summarizes a set of representative TREMs described herein correlated to the Design Guidances outlined above, e.g., Design Guidances 1-6.

TABLE 21
Exemplary TREMs described herein correlated
to Design Guidances described herein

| TREM | SEQ ID | Design Guidance | | | | | |
|---|---|---|---|---|---|---|---|
| NO. | NO. | 1 | 2 | 3 | 4 | 5 | 6 |
| 1 | 622 | | | | | | |
| 2 | 623 | | | | | | |
| 3 | 624 | | | | | | |
| 5 | 626 | | c | c | d | | |
| 6 | 627 | | c | c | d | | |
| 7 | 629 | | c | c | d | | |
| 8 | 630 | | c | c | d | | |
| 10 | 631 | | c | c | d | | |
| 11 | 632 | | c | c | d | | |
| 12 | 633 | | c | c | d | | a |
| 13 | 634 | | c | c | d | | |
| 14 | 635 | | c | c | d | | b |
| 15 | 636 | abe | abc | c | d | | |
| 16 | 637 | abe | c | c | d | | a |
| 17 | 638 | abe | c | c | d | | a |
| 18 | 639 | abe | c | c | d | | a |
| 19 | 640 | abe | c | c | d | | |
| 20 | 641 | abe | c | c | abde | ab | |
| 21 | 642 | abe | c | c | d | ab | |
| 22 | 643 | abe | c | c | d | ab | |
| 23 | 644 | abe | c | c | d | ab | |
| 24 | 645 | abe | c | c | d | | |
| 25 | 646 | | abc | c | d | | a |
| 26 | 647 | | abc | c | d | | a |
| 27 | 648 | | abc | c | d | | a |
| 28 | 649 | | abc | c | d | | |
| 29 | 650 | abe | c | c | d | ab | |
| 30 | 651 | | abc | c | abde | ab | |
| 31 | 652 | | abc | c | d | ab | |
| 32 | 653 | | abc | c | d | ab | |
| 33 | 654 | | abc | c | d | ab | |
| 34 | 655 | | abc | c | d | | |
| 35 | 656 | | c | c | d | | a |
| 36 | 657 | | c | c | d | | a |
| 37 | 658 | | c | c | d | | a |
| 38 | 659 | | c | c | abde | ab | a |
| 39 | 660 | | c | c | d | ab | a |
| 40 | 661 | | c | c | d | ab | a |
| 41 | 662 | | c | c | d | ab | a |
| 42 | 663 | | c | c | d | | a |
| 43 | 664 | | c | c | d | | a |
| 44 | 665 | | c | c | d | | a |
| 45 | 666 | | c | c | abde | ab | a |
| 46 | 667 | | c | c | d | ab | a |
| 47 | 668 | abe | c | c | d | ab | |
| 48 | 669 | | c | c | d | ab | a |
| 49 | 670 | | c | c | d | ab | a |
| 50 | 671 | | c | c | d | | a |
| 51 | 672 | | c | c | d | | a |
| 52 | 673 | | c | c | abde | ab | a |
| 53 | 674 | | c | c | d | ab | a |
| 54 | 675 | | c | c | d | ab | a |
| 55 | 676 | | c | c | d | ab | a |
| 56 | 677 | | c | c | d | | a |
| 57 | 678 | | c | c | abde | ab | |
| 58 | 679 | | c | c | d | ab | |
| 59 | 680 | | c | c | d | ab | |
| 60 | 681 | | c | c | d | ab | |
| 61 | 682 | abe | c | c | d | ab | a |
| 63 | 684 | | c | c | d | | |
| 64 | 685 | | c | c | abde | ab | |
| 65 | 686 | | c | c | abde | ab | |
| 66 | 687 | | c | c | abde | ab | |
| 67 | 688 | | c | c | abde | ab | |
| 68 | 689 | | c | c | d | ab | |
| 69 | 690 | | c | c | d | ab | |
| 70 | 691 | | c | c | d | ab | |
| 71 | 692 | | c | c | d | ab | |
| 72 | 693 | | c | c | d | ab | |
| 73 | 694 | | c | c | d | ab | |
| 74 | 695 | | c | c | d | | a |
| 75 | 696 | | c | c | d | | a |
| 76 | 697 | | abc | c | d | | |
| 77 | 698 | | c | c | d | ab | |
| 78 | 699 | abe | c | c | d | ab | a |
| 81 | 702 | | c | c | d | | a |
| 82 | 703 | | c | c | d | | a |
| 83 | 704 | | abc | c | d | | |
| 84 | 705 | | c | c | d | ab | |
| 85 | 706 | | c | c | d | | abce |
| 86 | 707 | | c | c | d | | abce |
| 87 | 708 | | abc | c | d | | bc |
| 88 | 709 | | c | c | d | ab | bc |
| 89 | 710 | abe | c | c | d | | |
| 90 | 711 | abe | c | c | d | | |
| 91 | 712 | abe | c | c | d | | |
| 92 | 713 | | c | c | d | | |
| 93 | 714 | | c | c | d | ab | |
| 94 | 715 | | c | c | d | ab | |
| 95 | 716 | | c | c | d | ab | |
| 96 | 717 | | c | c | d | ab | |

### TREM, TREM Core Fragment and TREM Fragment Fusions

[1055] In an embodiment, a TREM, a TREM core fragment or a TREM fragment disclosed herein comprises an additional moiety, e.g., a fusion moiety. In an embodiment, the fusion moiety can be used for purification, to alter folding of the TREM, TREM core fragment or TREM fragment, or as a targeting moiety. In an embodiment, the fusion moiety can comprise a tag, a linker, can be cleavable or can include a binding site for an enzyme. In an embodiment, the fusion moiety can be disposed at the N terminal of the TREM or at the C terminal of the TREM, TREM core fragment or TREM fragment. In an embodiment, the fusion moiety can be encoded by the same or different nucleic acid molecule that encodes the TREM, TREM core fragment or TREM fragment.

### TREM Consensus Sequence

[1056] In an embodiment, a TREM disclosed herein comprises a consensus sequence provided herein.

[1057] In an embodiment, a TREM disclosed herein comprises a consensus sequence of Formula I zzz, wherein zzz indicates any of the twenty amino acids and Formula I corresponds to all species.

[1058] In an embodiment, a TREM disclosed herein comprises a consensus sequence of Formula

[1059] II zzz, wherein zzz indicates any of the twenty amino acids and Formula II corresponds to mammals.

[1060] In an embodiment, a TREM disclosed herein comprises a consensus sequence of Formula III zzz, wherein zzz indicates any of the twenty amino acids and Formula III corresponds to humans.

[1061] In an embodiment, zzz indicates any of the twenty amino acids: alanine, arginine, asparagine, aspartate, cysteine, glutamine, glutamate, glycine, histidine, isoleucine, methionine, leucine, lysine, phenylalanine, proline, serine, threonine, tryptophan, tyrosine, or valine.

[1062] In an embodiment, a TREM disclosed herein comprises a property selected from the following:
[1063] a) under physiological conditions residue R₀ forms a linker region, e.g., a Linker 1 region;
[1064] b) under physiological conditions residues R₁-R₂-R₃-R₄-R₅-R₆-R₇ and residues R₆₅-R₆₆-R₆₇-R₆₈-R₆₉-R₇₀-R₇₁ form a stem region, e.g., an AStD stem region;
[1065] c) under physiological conditions residues R₈-R₉ forms a linker region, e.g., a Linker 2 region;
[1066] d) under physiological conditions residues-R₁₀-R₁₁-R₁₂-R₁₃-R₁₄ R₁₅-R₁₆-R₁₇-R₁₈-R₁₉-R₂₀-R₂₁-R₂₂-R₂₃-R₂₄-R₂₅-R₂₆-R₂₇-R₂₈ form a stem-loop region, e.g., a D arm Region;
[1067] e) under physiological conditions residue-R₂₉ forms a linker region, e.g., a Linker 3 Region;
[1068] f) under physiological conditions residues-R₃₀-R₃₁-R₃₂-R₃₃-R₃₄-R₃₅-R₃₆-R₃₇-R₃₈-R₃₉-R₄₀-R₄₁-R₄₂-R₄₃-R₄₄-R₄₅-R₄₆ form a stem-loop region, e.g., an AC arm region;
[1069] g) under physiological conditions residue-[R₄₇]ₓ comprises a variable region, e.g., as described herein;
[1070] h) under physiological conditions residues-R₄₈-R₄₉-R₅₀-R₅₁-R₅₂-R₅₃-R₅₄-R₅₅-R₅₆-R₅₇-R₅₈-R₅₉-R₆₀-R₆₁-R₆₂-R₆₃-R₆₄ form a stem-loop region, e.g., a T arm Region; or
[1071] i) under physiological conditions residue R₇₂ forms a linker region, e.g., a Linker 4 region.

### Alanine TREM Consensus Sequence

[1072] In an embodiment, a TREM disclosed herein comprises the sequence of Formula I_{ALA} (SEQ ID NO: 562),
[1073] R₀-R₁-R₂-R₃-R₄-R₅-R₆-R₇-R₈-R₉-R₁₀-R₁₁-R₁₂-R₁₃-R₁₄-R₁₅-R₁₆-R₁₇-R₁₈-R₁₉-R₂₀-R₂₁-R₂₂-R₂₃-R₂₄-R₂₅-R₂₆-R₂₇-R₂₈-R₂₉-R₃₀-R₃₁-R₃₂-R₃₃-R₃₄-R₃₅-R₃₆-R₃₇-R₃₈-R₃₉-R₄₀-R₄₁-R₄₂-R₄₃-R₄₄-R₄₅-R₄₆-[R₄₇]ₓ-R₄₈-R₄₉-R₅₀-R₅₁-R₅₂-R₅₃-R₅₄-R₅₅-R₅₆-R₅₇-R₅₈-R₅₉-R₆₀-R₆₁-R₆₂-R₆₃-R₆₄-R₆₅-R₆₆-R₆₇-R₆₈-R₆₉-R₇₀-R₇₁-R₇₂, wherein R is a ribonucleotide residue and the consensus for Ala is: R₀=absent; R₁₄, R₅₇=are independently A or absent; R₂₆=A, C, G or absent; R₅, R₆, R₁₅, R₁₆, R₂₁, R₃₀, R₃₁, R₃₂, R₃₄, R₃₇, R₄₁, R₄₂, R₄₃, R₄₄, R₄₅, R₄₈, R₄₉, R₅₀, R₅₈, R₅₉, R₆₃, R₆₄, R₆₆, R₆₇=are independently N or absent; R₁, R₃₅, R₆₅=are independently A, C, U or absent; R₁, R₉, R₂₀, R₃₈, R₄₀, R₅₁, R₅₂, R₅₆=are independently A, G or absent; R₇, R₂₂, R₂₅, R₂₇, R₂₉, R₄₆, R₅₃, R₇₂=are independently A, G, U or absent; R₂₄, R₆₉=are independently A, U or absent; R₇₀, R₇₁=are independently C or absent; R₃, R₄=are independently C, G or absent; R₁₂, R₃₃, R₃₆, R₆₂, R₆₈=are independently C, G, U or absent; R₁₃, R₁₇, R₂₈, R₃₉, R₅₅, R₀, R₆₁=are independently C, U or absent; R₁₀, R₁₉, R₂₃=are independently G or absent; R₂=G, U or absent; R₈, R₁₈, R₅₄=are independently U or absent; [R₄₇]ₓ=N or absent; wherein, e.g., x=1-271 (e.g., x=1-250, x=1-225, x=1-200, x=1-175, x=1-150, x=1-125, x=1-100, x=1-75, x=1-50, x=1-40, x=1-30, x=1-29, x=1-28, x=1-27, x=1-26, x=1-25, x=1-24, x=1-23, x=1-22, x=1-21, x=1-20, x=1-19, x=1-18, x=1-17, x=1-16, x=1-15, x=1-14, x=1-13, x=1-12, x=1-11, x=1-10, x=10-271, x=20-271, x=30-271, x=40-271, x=50-271, x=60-271, x=70-271, x=80-271, x=100-271, x=125-271, x=150-271, x=175-271, x=200-271, x=225-271, x=1, x=2, x=3, x=4, x=5, x=6, x=7, x=8, x=9, x=10, x=11, x=12, x=13, x=14, x=15, x=16, x=17, x=18, x=19, x=20, x=21, x=22, x=23, x=24, x=25, x=26, x=27, x=28, x=29, x=30, x=40, x=50, x=60, x=70, x=80, x=90, x=100, x=110, x=125, x=150, x=175, x=200, x=225, x=250, or x=271), provided that the TREM has one or both of the following properties: no more than 15% of the residues are N; or no more than 20 residues are absent.

[1074] In an embodiment, a TREM disclosed herein comprises the sequence of Formula II_{ALA} (SEQ ID NO: 563),
[1075] R₀-R₁-R₂-R₃-R₄-R₅-R₆-R₇-R₈-R₉-R₁₀-R₁₁-R₁₂-R₁₃-R₁₄-R₁₅-R₁₆-R₁₇-R₁₈-R₁₉-R₂₀-R₂₁-R₂₂-R₂₃-R₂₄-R₂₅-R₂₆-R₂₇-R₂₈-R₂₉-R₃₀-R₃₁-R₃₂-R₃₃-R₃₄-R₃₅-R₃₆-R₃₇-R₃₈-R₃₉-R₄₀-R₄₁-R₄₂-R₄₃-R₄₄-R₄₅-R₄₆-[R₄₇]ₓ-R₄₈-R₄₉-R₅₀-R₅₁-R₅₂-R₅₃-R₅₄-R₅₅-R₅₆-R₅₇-R₅₈-R₅₉-R₆₀-R₆₁-R₆₂-R₆₃-R₆₄-R₆₅-R₆₆-R₆₇-R₆₈-R₆₉-R₇₀-R₇₁-R₇₂

[1076] wherein R is a ribonucleotide residue and the consensus for Ala is:
[1077] R₀, R₁₈=are absent;
[1078] R₁₄, R₂₄, R₅₇=are independently A or absent;
[1079] R₁₅, R₂₆, R₆₄=are independently A, C, G or absent;
[1080] R₁₆, R₃₁, R₅₀, R₅₉=are independently N or absent;
[1081] R₁₁, R₃₂, R₃₇, R₄₁, R₄₃, R₄₅, R₄₉, R₆₅, R₆₆=are independently A, C, U or absent;
[1082] R₁, R₅, R₉, R₂₅, R₂₇, R₃₈, R₄₀, R₄₆, R₅₁, R₅₆=are independently A, G or absent;
[1083] R₇, R₂₂, R₂₉, R₄₂, R₄₄, R₅₃, R₆₃, R₇₂=are independently A, G, U or absent;
[1084] R₆, R₃₅, R₆₉=are independently A, U or absent;
[1085] R₅₅, R₆₀, R₀, R₇₁=are independently C or absent;
[1086] R₃=C, G or absent;
[1087] R₁₂, R₃₆, R₄₈=are independently C, G, U or absent;
[1088] R₁₃, R₁₇, R₂₈, R₃₀, R₃₄, R₃₉, R₅₅, R₆₁, R₆₂, R₆₇, R₆₈=are independently C, U or absent;
[1089] R₄, R₁₀, R₁₉, R₂₀, R₂₃, R₅₂=are independently G or absent;
[1090] R₂, R₈, R₃₃=are independently G, U or absent;
[1091] R₂₁, R₅₄=are independently U or absent;
[1092] [R₄₇]ₓ=N or absent;
[1093] wherein, e.g., x=1-271 (e.g., x=1-250, x=1-225, x=1-200, x=1-175, x=1-150, x=1-125, x=1-100, x=1-75, x=1-50, x=1-40, x=1-30, x=1-29, x=1-28, x=1-27, x=1-26, x=1-25, x=1-24, x=1-23, x=1-22, x=1-21, x=1-20, x=1-19, x=1-18, x=1-17, x=1-16, x=1-15, x=1-14, x=1-13, x=1-12, x=1-11, x=1-10, x=10-271, x=20-271, x=30-271, x=40-271, x=50-271, x=60-271, x=70-271, x=80-271, x=100-271, x=125-271, x=150-271, x=175-271, x=200-271, x=225-271, x=1, x=2, x=3, x=4, x=5, x=6, x=7, x=8, x=9, x=10, x=11, x=12, x=13, x=14, x=15, x=16, x=17, x=18, x=19, x=20, x=21, x=22, x=23, x=24, x=25, x=26, x=27, x=28, x=29, x=30, x=40, x=50, x=60, x=70, x=80, x=90, x=100, x=110, x=125, x=150, x=175, x=200, x=225, x=250, or x=271), provided that the TREM has one or both of the following properties: no more than 15% of the residues are N; or no more than 20 residues are absent.

[1094] In an embodiment, a TREM disclosed herein comprises the sequence of Formula III_{ALA} (SEQ ID NO: 564),
[1095] R₀-R₁-R₂-R₃-R₄-R₅-R₆-R₇-R₈-R₉-R₁₀-R₁₁-R₁₂-R₁₃-R₁₄-R₁₅-R₁₆-R₁₇-R₁₈-R₁₉-R₂₀-R₂₁-R₂₂-R₂₃-R₂₄-R₂₅-R₂₆-R₂₇-R₂₈-R₂₉-R₃₀-R₃₁-R₃₂-R₃₃-R₃₄-R₃₅-R₃₆-R₃₇-R₃₈-R₃₉-R₄₀-R₄₁-R₄₂-R₄₃-R₄₄-R₄₅-R₄₆-[R₄₇]ₓ-R₄₈-R₄₉-R₅₀-R₅₁-R₅₂-R₅₃-R₅₄-R₅₅-R₅₆-R₅₇-R₅₈-R₅₉-R₆₀-R₆₁-R₆₂-R₆₃-R₆₄-R₆₅-R₆₆-R₆₇-R₆₈-R₆₉-R₇₀-R₇₁-R₇₂

[1096] wherein R is a ribonucleotide residue and the consensus for Ala is:
[1097] R₀, R₁₈=are absent;
[1098] R₁₄, R₂₄, R₅₇, R₇₂=are independently A or absent;
[1099] R₁₅, R₂₆, R₆₄=are independently A, C, G or absent;
[1100] R₁₆, R₃₁, R₅₀=are independently N or absent;
[1101] R₁₁, R₃₂, R₃₇, R₄₁, R₄₃, R₄₅, R₄₉, R₆₅, R₆₆=are independently A, C, U or absent;
[1102] R₅, R₉, R₂₅, R₂₇, R₃₈, R₄₀, R₄₆, R₅₁, R₅₆=are independently A, G or absent;
[1103] R₇, R₂₂, R₂₉, R₄₂, R₄₄, R₅₃, R₆₃=are independently A, G, U or absent;
[1104] R₆, R₃₅=are independently A, U or absent;
[1105] R₅₅, R₆₀, R₆₁, R₇₀, R₇₁=are independently C or absent;
[1106] R₁₂, R₄₈, R₅₉=are independently C, G, U or absent;
[1107] R₁₃, R₁₇, R₂₈, R₃₀, R₃₄, R₃₉, R₅₈, R₆₂, R₆₇, R₆₈=are independently C, U or absent;
[1108] R₁, R₂, R₃, R₄, R₁₀, R₁₉, R₂₀, R₂₃, R₅₂=are independently G or absent;
[1109] R₃₃, R₃₆=are independently G, U or absent;
[1110] R₈, R₂₁, R₅₄, R₆₉=are independently U or absent;
[1111] [R₄₇]ₓ=N or absent;
[1112] wherein, e.g., x=1-271 (e.g., x=1-250, x=1-225, x=1-200, x=1-175, x=1-150, x=1-125, x=1-100, x=1-75, x=1-50, x=1-40, x=1-30, x=1-29, x=1-28, x=1-27, x=1-26, x=1-25, x=1-24, x=1-23, x=1-22, x=1-21, x=1-20, x=1-19, x=1-18, x=1-17, x=1-16, x=1-15, x=1-14, x=1-13, x=1-12, x=1-11, x=1-10, x=10-271, x=20-271, x=30-271, x=40-271, x=50-271, x=60-271, x=70-271, x=80-271, x=100-271, x=125-271, x=150-271, x=175-271, x=200-271, x=225-271, x=1, x=2, x=3, x=4, x=5, x=6, x=7, x=8, x=9, x=10, x=11, x=12, x=13, x=14, x=15, x=16, x=17, x=18, x=19, x=20, x=21, x=22, x=23, x=24, x=25, x=26, x=27, x=28, x=29, x=30, x=40, x=50, x=60, x=70, x=80, x=90, x=100, x=110, x=125, x=150, x=175, x=200, x=225, x=250, or x=271), provided that the TREM has one or both of the following properties: no more than 15% of the residues are N; or no more than 20 residues are absent.

### Arginine TREM Consensus Sequence

[1113] In an embodiment, a TREM disclosed herein comprises the sequence of Formula I ARG (SEQ ID NO: 565),
[1114] R₀-R₁-R₂-R₃-R₄-R₅-R₆-R₇-R₈-R₉-R₁₀-R₁₁-R₁₂-R₁₃-R₁₄-R₁₅-R₁₆-R₁₇-R₁₈-R₁₉-R₂₀-R₂₁-R₂₂-R₂₃-R₂₄-R₂₅-R₂₆-R₂₇-R₂₈-R₂₉-R₃₀-R₃₁-R₃₂-R₃₃-R₃₄-R₃₅-R₃₆-R₃₇-R₃₈-R₃₉-R₄₀-R₄₁-R₄₂-R₄₃-R₄₄-R₄₅-R₄₆-[R₄₇]ₓ-R₄₈-R₄₉-R₅₀-R₅₁-R₅₂-R₅₃-R₅₄-R₅₅-R₅₆-R₅₇-R₅₈-R₅₉-R₆₀-R₆₁-R₆₂-R₆₃-R₆₄-R₆₅-R₆₆-R₆₇-R₆₈-R₆₉-R₇₀-R₇₁-R₇₂
   wherein R is a ribonucleotide residue and the consensus for Arg is:

[1115] R₅₇=A or absent;

[1116] R₉, R₂₇=are independently A, C, G or absent;
[1117] R₁, R₂, R₃, R₄, R₅, R₆, R₇, R₁₁, R₁₂, R₁₆, R₂₁, R₂₂, R₂₃, R₂₅, R₂₆, R₂₉, R₃₀, R₃₁, R₃₂, R₃₃, R₃₄, R₃₇, R₄₂, R₄₄, R₄₅,
[1118] R₄₆, R₄₈, R₄₉, R₅₀, R₅₁, R₅₈, R₆₂, R₆₃, R₆₄, R₆₅, R₆₆, R₆₇, R₆₈, R₆₉, R₇₀, R₇₁=are independently N or
[1119] absent;
[1120] R₁₃, R₁₇, R₄₁=are independently A, C, U or absent;
[1121] R₁₉, R₂₀, R₂₄, R₄₀, R₅₆=are independently A, G or absent;
[1122] R₁₄, R₁₅, R₇₂=are independently A, G, U or absent;
[1123] R₁₈=A, U or absent;
[1124] R₃₈=C or absent;
[1125] R₃₅, R₄₃, R₆₁=are independently C, G, U or absent;
[1126] R₂₈, R₅₅, R₅₉, R₆₀=are independently C, U or absent;
[1127] R₀, R₁₀, R₅₂=are independently G or absent;
[1128] R₈, R₃₉=are independently G, U or absent;
[1129] R₃₆, R₅₃, R₅₄=are independently U or absent;
[1130] [R₄₇]ₓ=N or absent;
[1131] wherein, e.g., x=1-271 (e.g., x=1-250, x=1-225, x=1-200, x=1-175, x=1-150, x=1-125, x=1-100, x=1-75, x=1-50, x=1-40, x=1-30, x=1-29, x=1-28, x=1-27, x=1-26, x=1-25, x=1-24, x=1-23, x=1-22, x=1-21, x=1-20, x=1-19, x=1-18, x=1-17, x=1-16, x=1-15, x=1-14, x=1-13, x=1-12, x=1-11, x=1-10, x=10-271, x=20-271, x=30-271, x=40-271, x=50-271, x=60-271, x=70-271, x=80-271, x=100-271, x=125-271, x=150-271, x=175-271, x=200-271, x=225-271, x=1, x=2, x=3, x=4, x=5, x=6, x=7, x=8, x=9, x=10, x=11, x=12, x=13, x=14, x=15, x=16, x=17, x=18, x=19, x=20, x=21, x=22, x=23, x=24, x=25, x=26, x=27, x=28, x=29, x=30, x=40, x=50, x=60, x=70, x=80, x=90, x=100, x=110, x=125, x=150, x=175, x=200, x=225, x=250, or x=271), provided that the TREM has one or both of the following properties: no more than 15% of the residues are N; or no more than 20 residues are absent.

[1132] In an embodiment, a TREM disclosed herein comprises the sequence of Formula II ARG (SEQ ID NO: 566),
[1133] R₀-R₁-R₂-R₃-R₄-R₅-R₆-R₇-R₈-R₉-R₁₀-R₁₁-R₁₂-R₁₃-R₁₄-R₁₅-R₁₆-R₁₇-R₁₈-R₁₉-R₂₀-R₂₁-R₂₂-R₂₃-R₂₄-R₂₅-R₂₆-R₂₇-R₂₈-R₂₉-R₃₀-R₃₁-R₃₂-R₃₃-R₃₄-R₃₅-R₃₆-R₃₇-R₃₈-R₃₉-R₄₀-R₄₁-R₄₂-R₄₃-R₄₄-R₄₅-R₄₆-[R₄₇]ₓ-R₄₈-R₄₉-R₅₀-R₅₁-R₅₂-R₅₃-R₅₄-R₅₅-R₅₆-R₅₇-R₅₈-R₅₉-R₆₀-R₆₁-R₆₂-R₆₃-R₆₄-R₆₅-R₆₆-R₆₇-R₆₈-R₆₉-R₇₀-R₇₁-R₇₂

[1134] wherein R is a ribonucleotide residue and the consensus for Arg is:
[1135] R₁₈=absent;
[1136] R₂₄, R₅₇=are independently A or absent;
[1137] R₄₁=A, C or absent;
[1138] R₃, R₇, R₃₄, R₅₀=are independently A, C, G or absent;
[1139] R₂, R₅, R₆, R₁₂, R₂₆, R₃₂, R₃₇, R₄₄, R₅₈, R₆₆, R₆₇, R₆₈, R₇₀=are independently N or absent;
[1140] R₄₉, R₇₁=are independently A, C, U or absent;
[1141] R₁, R₁₅, R₁₉, R₂₅, R₂₇, R₄₀, R₄₅, R₄₆, R₅₆, R₇₂=are independently A, G or absent;
[1142] R₁₄, R₂₉, R₆₃=are independently A, G, U or absent;
[1143] R₁₆, R₂₁=are independently A, U or absent;
[1144] R₃₈, R₆₁=are independently C or absent;
[1145] R₃₃, R₄₈=are independently C, G or absent;
[1146] R₄, R₉, R₁₁, R₄₃, R₆₂, R₆₄, R₆₉=are independently C, G, U or absent;
[1147] R₁₃, R₂₂, R₂₈, R₃₀, R₃₁, R₃₅, R₅₅, R₆₀, R₆₅=are independently C, U or absent;
[1148] R₀, R₁₀, R₂₀, R₂₃, R₅₁, R₅₂=are independently G or absent;
[1149] R₈, R₃₉, R₄₂=are independently G, U or absent;
[1150] R₁₇, R₃₆, R₅₃, R₅₄, R₅₉=are independently U or absent;
[1151] [R₄₇]ₓ=N or absent;
[1152] wherein, e.g., x=1-271 (e.g., x=1-250, x=1-225, x=1-200, x=1-175, x=1-150, x=1-125, x=1-100, x=1-75, x=1-50, x=1-40, x=1-30, x=1-29, x=1-28, x=1-27, x=1-26, x=1-25, x=1-24, x=1-23, x=1-22, x=1-21, x=1-20, x=1-19, x=1-18, x=1-17, x=1-16, x=1-15, x=1-14, x=1-13, x=1-12, x=1-11, x=1-10, x=10-271, x=20-271, x=30-271, x=40-271, x=50-271, x=60-271, x=70-271, x=80-271, x=100-271, x=125-271, x=150-271, x=175-271, x=200-271, x=225-271, x=1, x=2, x=3, x=4, x=5, x=6, x=7, x=8, x=9, x=10, x=11, x=12, x=13, x=14, x=15, x=16, x=17, x=18, x=19, x=20, x=21, x=22, x=23, x=24, x=25, x=26, x=27, x=28, x=29, x=30, x=40, x=50, x=60, x=70, x=80, x=90, x=100, x=110, x=125, x=150, x=175, x=200, x=225, x=250, or x=271), provided that the TREM has one or both of the following properties: no more than 15% of the residues are N; or no more than 20 residues are absent.

[1153] In an embodiment, a TREM disclosed herein comprises the sequence of Formula III ARG (SEQ ID NO: 567),
[1154] R₀-R₁-R₂-R₃-R₄-R₅-R₆-R₇-R₈-R₉-R₁₀-R₁₁-R₁₂-R₁₃-R₁₄-R₁₅-R₁₆-R₁₇-R₁₈-R₁₉-R₂₀-R₂₁-R₂₂-R₂₃-R₂₄-R₂₅-R₂₆-R₂₇-R₂₈-R₂₉-R₃₀-R₃₁-R₃₂-R₃₃-R₃₄-R₃₅-R₃₆-R₃₇-R₃₈-R₃₉-R₄₀-R₄₁-R₄₂-R₄₃-R₄₄-R₄₅-R₄₆-[R₄₇]ₓ-R₄₈-R₄₉-R₅₀-R₅₁-R₅₂-R₅₃-R₅₄-R₅₅-R₅₆-R₅₇-R₅₈-R₅₉-R₆₀-R₆₁-R₆₂-R₆₃-R₆₄-R₆₅-R₆₆-R₆₇-R₆₈-R₆₉-R₇₀-R₇₁-R₇₂

[1155] wherein R is a ribonucleotide residue and the consensus for Arg is:
[1156] R₁₈=is absent;
[1157] R₁₅, R₂₁, R₂₄, R₄₁, R₅₇=are independently A or absent;
[1158] R₃₄, R₄₄=are independently A, C or absent;
[1159] R₃, R₅, R₅₅=are independently A, C, G or absent;
[1160] R₂, R₆, R₆₆, R₇₀=are independently N or absent;
[1161] R₃₇, R₄₉=are independently A, C, U or absent;
[1162] R₁, R₂₅, R₂₉, R₄₀, R₄₅, R₄₆, R₅₀=are independently A, G or absent;
[1163] R₁₄, R₆₃, R₆₈=are independently A, G, U or absent;
[1164] R₁₆=A, U or absent;
[1165] R₃₈, R₆₁=are independently C or absent;
[1166] R₇, R₁₁, R₁₂, R₂₆, R₄₈=are independently C, G or absent;
[1167] R₆₄, R₆₇, R₆₉=are independently C, G, U or absent;
[1168] R₄, R₁₃, R₂₂, R₂₈, R₃₀, R₃₁, R₃₅, R₄₃, R₅₅, R₆₀, R₆₂, R₆₅, R₇₁=are independently C, U or absent;
[1169] R₀, R₁₀, R₁₉, R₂₀, R₂₃, R₂₇, R₃₃, R₅₁, R$2, R₅₆, R₇₂=are independently G or absent;
[1170] R₈, R₉, R₃₂, R₃₉, R₄₂=are independently G, U or absent;
[1171] R₁₇, R₃₆, R₅₃, R₅₄, R₅₉=are independently U or absent;
[1172] [R₄₇]ₓ=N or absent;
[1173] wherein, e.g., x=1-271 (e.g., x=1-250, x=1-225, x=1-200, x=1-175, x=1-150, x=1-125, x=1-100, x=1-75, x=1-50, x=1-40, x=1-30, x=1-29, x=1-28, x=1-27, x=1-26, x=1-25, x=1-24, x=1-23, x=1-22, x=1-21, x=1-20, x=1-19, x=1-18, x=1-17, x=1-16, x=1-15, x=1-14, x=1-13, x=1-12, x=1-11, x=1-10, x=10-271, x=20-271, x=30-271, x=40-271, x=50-271, x=60-271, x=70-271, x=80-271, x=100-271, x=125-271, x=150-271, x=175-271, x=200-271, x=225-271, x=1, x=2, x=3, x=4, x=5, x=6, x=7, x=8, x=9, x=10, x=11, x=12, x=13, x=14, x=15, x=16, x=17, x=18, x=19, x=20, x=21, x=22, x=23, x=24, x=25, x=26, x=27, x=28, x=29, x=30, x=40, x=50, x=60, x=70, x=80, x=90, x=100, x=110, x=125, x=150, x=175, x=200, x=225, x=250, or x=271), provided that the TREM has one or both of the following properties: no more than 15% of the residues are N; or no more than 20 residues are absent.

### Asparagine TREM Consensus Sequence

[1174] In an embodiment, a TREM disclosed herein comprises the sequence of Formula I ASN (SEQ ID NO: 568),
[1175] R₀-R₁-R₂-R₃-R₄-R₅-R₆-R₇-R₈-R₉-R₁₀-R₁₁-R₁₂-R₁₃-R₁₄-R₁₅-R₁₆-R₁₇-R₁₈-R₁₉-R₂₀-R₂₁-R₂₂-R₂₃-R₂₄-R₂₅-R₂₆-R₂₇-R₂₈-R₂₉-R₃₀-R₃₁-R₃₂-R₃₃-R₃₄-R₃₅-R₃₆-R₃₇-R₃₈-R₃₉-R₄₀-R₄₁-R₄₂-R₄₃-R₄₄-R₄₅-R₄₆-[R₄₇]ₓ-R₄₈-R₄₉-R₅₀-R₅₁-R₅₂-R₅₃-R₅₄-R₅₅-R₅₆-R₅₇-R₅₈-R₅₉-R₆₀-R₆₁-R₆₂-R₆₃-R₆₄-R₆₅-R₆₆-R₆₇-R₆₈-R₆₉-R₇₀-R₇₁-R₇₂

[1176] wherein R is a ribonucleotide residue and the consensus for Asn is:
[1177] R₀, R₁₈=are absent;
[1178] R₄₁=A or absent;
[1179] R₁₄, R₄₈, R₅₆=are independently A, C, G or absent;
[1180] R₂, R₄, R₅, R₆, R₁₂, R₁₇, R₂₆, R₂₉, R₃₀, R₃₁, R₄₄, R₄₅, R₄₆, R₄₉, R so, R₅₈, R₆₂, R₆₃, R₆₅, R₆₆, R₆₇, R₆₈, R₇₀, R₇₁=are independently N or absent;
[1181] R₁, R₁₃, R₂₂, R₄₂, R₅₅, R₅₉=are independently A, C, U or absent;
[1182] R₉, R₁₅, R₂₄, R₂₇, R₃₄, R₃₇, R₅₁, R₇₂=are independently A, G or absent;
[1183] R₁, R₇, R₂₅, R₆₉=are independently A, G, U or absent;
[1184] R₄₀, R₅₇=are independently A, U or absent;
[1185] R₆₀=C or absent;
[1186] R₃₃=C, G or absent;
[1187] R₂₁, R₃₂, R₄₃, R₆₄=are independently C, G, U or absent;
[1188] R₃, R₁₆, R₂₈, R₃₅, R₃₆, R₆₁=are independently C, U or absent;
[1189] R₁₀, R₁₉, R₂₀, R₅₂=are independently G or absent;
[1190] R₅₄=G, U or absent;
[1191] R₈, R₂₃, R₃₈, R₃₉, R₅₃=are independently U or absent;
[1192] [R₄₇]ₓ=N or absent;
[1193] wherein, e.g., x=1-271 (e.g., x=1-250, x=1-225, x=1-200, x=1-175, x=1-150, x=1-125, x=1-100, x=1-75, x=1-50, x=1-40, x=1-30, x=1-29, x=1-28, x=1-27, x=1-26, x=1-25, x=1-24, x=1-23, x=1-22, x=1-21, x=1-20, x=1-19, x=1-18, x=1-17, x=1-16, x=1-15, x=1-14, x=1-13, x=1-12, x=1-11, x=1-10, x=10-271, x=20-271, x=30-271, x=40-271, x=50-271, x=60-271, x=70-271, x=80-271, x=100-271, x=125-271, x=150-271, x=175-271, x=200-271, x=225-271, x=1, x=2, x=3, x=4, x=5, x=6, x=7, x=8, x=9, x=10, x=11, x=12, x=13, x=14, x=15, x=16, x=17, x=18, x=19, x=20, x=21, x=22, x=23, x=24, x=25, x=26, x=27, x=28, x=29, x=30, x=40, x=50, x=60, x=70, x=80, x=90, x=100, x=110, x=125, x=150, x=175, x=200, x=225, x=250, or x=271), provided that the TREM has one or both of the following properties: no more than 15% of the residues are N; or no more than 20 residues are absent.

[1194] In an embodiment, a TREM disclosed herein comprises the sequence of Formula II ASN (SEQ ID NO: 569),
[1195] R₀-R₁-R₂-R₃-R₄-R₅-R₆-R₇-R₈-R₉-R₁₀-R₁₁-R₁₂-R₁₃-R₁₄-R₁₅-R₁₆-R₁₇-R₁₈-R₁₉-R₂₀-R₂₁-R₂₂-R₂₃-R₂₄-R₂₅-R₂₆-R₂₇-R₂₈-R₂₉-R₃₀-R₃₁-R₃₂-R₃₃-R₃₄-R₃₅-R₃₆-R₃₇-R₃₈-R₃₉-R₄₀-R₄₁-R₄₂-R₄₃-R₄₄-R₄₅-R₄₆-[R₄₇]ₓ-R₄₈-R₄₉-R₅₀-R₅₁-R₅₂-R₅₃-R₅₄-R₅₅-R₅₆-R₅₇-R₅₈-R₅₉-R₆₀-R₆₁-R₆₂-R₆₃-R₆₄-R₆₅-R₆₆-R₆₇-R₆₈-R₆₉-R₇₀-R₇₁-R₇₂

[1196] wherein R is a ribonucleotide residue and the consensus for Asn is:
[1197] R₀, R₁₈=are absent
[1198] R₂₄, R₄₁, R₄₆, R₆₂=are independently A or absent;
[1199] R₅₉=A, C or absent;
[1200] R₁₄, R₅₆, R₆₆=are independently A, C, G or absent;
[1201] R₁₇, R₂₉=are independently N or absent;
[1202] R₁₁, R₂₆, R₄₂, R₅₅=are independently A, C, U or absent;
[1203] R₁, R₉, R₁₂, R₁₅, R₂₅, R₃₄, R₃₇, R₄₈, R$1, R₆₇, R₆₈, R₆₉, R₇₀, R₇₂=are independently A, G or absent;
[1204] R₄₄, R₄₅, R₅₅=are independently A, G, U or absent;
[1205] R₄₀, R₅₇=are independently A, U or absent;
[1206] R₅, R₂₈, R₆₀=are independently C or absent;
[1207] R₃₃, R₆₅=are independently C, G or absent;
[1208] R₂₁, R₄₃, R₇₁=are independently C, G, U or absent;
[1209] R₃, R₆, R₁₃, R₂₂, R₃₂, R₃₅, R₃₆, R₆₁, R₆₃, R₆₄=are independently C, U or absent;
[1210] R₇, R₁₀, R₁₉, R₂₀, R₂₇, R₄₉, R₅₂=are independently G or absent;
[1211] R₅₄=G, U or absent;
[1212] R₂, R₄, R₈, R₁₆, R₂₃, R₃₀, R₃₁, R₃₈, R₃₉, R₅₀, R₅₃=are independently U or absent;
[1213] [R₄₇]ₓ=N or absent;
[1214] wherein, e.g., x=1-271 (e.g., x=1-250, x=1-225, x=1-200, x=1-175, x=1-150, x=1-125, x=1-100, x=1-75, x=1-50, x=1-40, x=1-30, x=1-29, x=1-28, x=1-27, x=1-26, x=1-25, x=1-24, x=1-23, x=1-22, x=1-21, x=1-20, x=1-19, x=1-18, x=1-17, x=1-16, x=1-15, x=1-14, x=1-13, x=1-12, x=1-11, x=1-10, x=10-271, x=20-271, x=30-271, x=40-271, x=50-271, x=60-271, x=70-271, x=80-271, x=100-271, x=125-271, x=150-271, x=175-271, x=200-271, x=225-271, x=1, x=2, x=3, x=4, x=5, x=6, x=7, x=8, x=9, x=10, x=11, x=12, x=13, x=14, x=15, x=16, x=17, x=18, x=19, x=20, x=21, x=22, x=23, x=24, x=25, x=26, x=27, x=28, x=29, x=30, x=40, x=50, x=60, x=70, x=80, x=90, x=100, x=110, x=125, x=150, x=175, x=200, x=225, x=250, or x=271), provided that the TREM has one or both of the following properties: no more than 15% of the residues are N; or no more than 20 residues are absent.

[1215] In an embodiment, a TREM disclosed herein comprises the sequence of Formula III ASN (SEQ ID NO: 570),
[1216] R₀-R₁-R₂-R₃-R₄-R₅-R₆-R₇-R₈-R₉-R₁₀-R₁₁-R₁₂-R₁₃-R₁₄-R₁₅-R₁₆-R₁₇-R₁₈-R₁₉-R₂₀-R₂₁-R₂₂-R₂₃-R₂₄-R₂₅-R₂₆-R₂₇-R₂₈-R₂₉-R₃₀-R₃₁-R₃₂-R₃₃-R₃₄-R₃₅-R₃₆-R₃₇-R₃₈-R₃₉-R₄₀-R₄₁-R₄₂-R₄₃-R₄₄-R₄₅-R₄₆-[R₄₇]ₓ-R₄₈-R₄₉-R₅₀-R₅₁-R₅₂-R₅₃-R₅₄-R₅₅-R₅₆-R₅₇-R₅₈-R₅₉-R₆₀-R₆₁-R₆₂-R₆₃-R₆₄-R₆₅-R₆₆-R₆₇-R₆₈-R₆₉-R₇₀-R₇₁-R₇₂

[1217] wherein R is a ribonucleotide residue and the consensus for Asn is:
[1218] R₀, R₁₈=are absent
[1219] R₂₄, R₄₀, R₄₁, R₄₆, R₆₂=are independently A or absent;
[1220] R₅₉=A, C or absent;
[1221] R₁₄, R₅₆, R₆₆=are independently A, C, G or absent;
[1222] R₁₁, R₂₆, R₄₂, R₅₅=are independently A, C, U or absent;
[1223] R₁, R₉, R₁₂, R₁₅, R₃₄, R₃₇, R₄₈, R₅₁, R₆₇, R₆₈, R₆₉, R₇₀=are independently A, G or absent;
[1224] R₄₄, R₄₅, R₅₅=are independently A, G, U or absent;
[1225] R₅₇=A, U or absent;
[1226] R₅, R₂₈, R₆₀=are independently C or absent;
[1227] R₃₃, R₆₅=are independently C, G or absent;
[1228] R₁₇, R₂₁, R₂₉=are independently C, G, U or absent;
[1229] R₃, R₆, R₁₃, R₂₂, R₃₂, R₃₅, R₃₆, R₄₃, R₆₁, R₆₃, R₆₄, R₇₁=are independently C, U or absent;
[1230] R₇, R₁₀, R₁₉, R₂₀, R₂₅, R₂₇, R₄₉, R $2, R₇₂=are independently G or absent;
[1231] R₅₄=G, U or absent;
[1232] R₂, R₄, R&, R₁₆, R₂₃, R₃₀, R₃₁, R₃₈, R₃₉, R₅₀, R₅₃=are independently U or absent;
[1233] [R₄₇]ₓ=N or absent;
[1234] wherein, e.g., x=1-271 (e.g., x=1-250, x=1-225, x=1-200, x=1-175, x=1-150, x=1-125, x=1-100, x=1-75, x=1-50, x=1-40, x=1-30, x=1-29, x=1-28, x=1-27, x=1-26, x=1-25, x=1-24, x=1-23, x=1-22, x=1-21, x=1-20, x=1-19, x=1-18, x=1-17, x=1-16, x=1-15, x=1-14, x=1-13, x=1-12, x=1-11, x=1-10, x=10-271, x=20-271, x=30-271, x=40-271, x=50-271, x=60-271, x=70-271, x=80-271, x=100-271, x=125-271, x=150-271, x=175-271, x=200-271, x=225-271, x=1, x=2, x=3, x=4, x=5, x=6, x=7, x=8, x=9, x=10, x=11, x=12, x=13, x=14, x=15, x=16, x=17, x=18, x=19, x=20, x=21, x=22, x=23, x=24, x=25, x=26, x=27, x=28, x=29, x=30, x=40, x=50, x=60, x=70, x=80, x=90, x=100, x=110, x=125, x=150, x=175, x=200, x=225, x=250, or x=271), provided that the TREM has one or both of the following properties: no more than 15% of the residues are N; or no more than 20 residues are absent.

### Aspartate TREM Consensus Sequence

[1235] In an embodiment, a TREM disclosed herein comprises the sequence of Formula I ASP (SEQ ID NO: 571),
[1236] R₀-R₁-R₂-R₃-R₄-R₅-R₆-R₇-R₈-R₉-R₁₀-R₁₁-R₁₂-R₁₃-R₁₄-R₁₅-R₁₆-R₁₇-R₁₈-R₁₉-R₂₀-R₂₁-R₂₂-R₂₃-R₂₄-R₂₅-R₂₆-R₂₇-R₂₈-R₂₉-R₃₀-R₃₁-R₃₂-R₃₃-R₃₄-R₃₅-R₃₆-R₃₇-R₃₈-R₃₉-R₄₀-R₄₁-R₄₂-R₄₃-R₄₄-R₄₅-R₄₆-[R₄₇]ₓ-R₄₈-R₄₉-R₅₀-R₅₁-R₅₂-R₅₃-R₅₄-R₅₅-R₅₆-R₅₇-R₅₈-R₅₉-R₆₀-R₆₁-R₆₂-R₆₃-R₆₄-R₆₅-R₆₆-R₆₇-R₆₈-R₆₉-R₇₀-R₇₁-R₇₂ wherein R is a ribonucleotide residue and the consensus for Asp is:
[1237] R₀=absent
[1238] R₂₄, R₇₁=are independently A, C or absent;
[1239] R₃₃, R₄₆=are independently A, C, G or absent;
[1240] R₂, R₃, R₄, R₅, R₆, R₁₂, R₁₆, R₂₂, R₂₆, R₂₉, R₃₁, R₃₂, R₄₄, R₄₈, R₄₉, R₅₈, R₆₃, R₆₄, R₆₆, R₆₇, R₆₈, R₆₉=are
[1241] independently N or absent;
[1242] R₁₃, R₂₁, R₃₄, R₄₁, R₅₇, R₆₅=are independently A, C, U or absent;
[1243] R₉, R₁₀, R₁₄, R₁₅, R₂₀, R₂₇, R₃₇, R₄₀, R₅₁, R₅₆, R₇₂=are independently A, G or absent;
[1244] R₇, R₂₅, R₄₂=are independently A, G, U or absent;
[1245] R₃₉=C or absent;
[1246] R₅₀, R₆₂=are independently C, G or absent;
[1247] R₃₀, R₄₃, R₄₅, R₅₅, R₇₀=are independently C, G, U or absent;
[1248] R&, R₁₁, R₁₇, R₁₈, R₂₈, R₃₅, R₅₃, R₅₉, R₆₆, R₆₁=are independently C, U or absent;
[1249] R₁₉, R₅₂=are independently G or absent;
[1250] R₁=G, U or absent;
[1251] R₂₃, R₃₆, R₃₈, R₅₄=are independently U or absent;
[1252] [R₄₇]ₓ=N or absent;
[1253] wherein, e.g., x=1-271 (e.g., x=1-250, x=1-225, x=1-200, x=1-175, x=1-150, x=1-125, x=1-100, x=1-75, x=1-50, x=1-40, x=1-30, x=1-29, x=1-28, x=1-27, x=1-26, x=1-25, x=1-24, x=1-23, x=1-22, x=1-21, x=1-20, x=1-19, x=1-18, x=1-17, x=1-16, x=1-15, x=1-14, x=1-13, x=1-12, x=1-11, x=1-10, x=10-271, x=20-271, x=30-271, x=40-271, x=50-271, x=60-271, x=70-271, x=80-271, x=100-271, x=125-271, x=150-271, x=175-271, x=200-271, x=225-271, x=1, x=2, x=3, x=4, x=5, x=6, x=7, x=8, x=9, x=10, x=11, x=12, x=13, x=14, x=15, x=16, x=17, x=18, x=19, x=20, x=21, x=22, x=23, x=24, x=25, x=26, x=27, x=28, x=29, x=30, x=40, x=50, x=60, x=70, x=80, x=90, x=100, x=110, x=125, x=150, x=175, x=200, x=225, x=250, or x=271), provided that the TREM has one or both of the following properties: no more than 15% of the residues are N; or no more than 20 residues are absent.

[1254] In an embodiment, a TREM disclosed herein comprises the sequence of Formula II ASP (SEQ ID NO: 572),
[1255] R₀-R₁-R₂-R₃-R₄-R₅-R₆-R₇-R₈-R₉-R₁₀-R₁₁-R₁₂-R₁₃-R₁₄-R₁₅-R₁₆-R₁₇-R₁₈-R₁₉-R₂₀-R₂₁-R₂₂-R₂₃-R₂₄-R₂₅-R₂₆-R₂₇-R₂₈-R₂₉-R₃₀-R₃₁-R₃₂-R₃₃-R₃₄-R₃₅-R₃₆-R₃₇-R₃₈-R₃₉-R₄₀-R₄₁-R₄₂-R₄₃-R₄₄-R₄₅-R₄₆-[R₄₇]ₓ-R₄₈-R₄₉-R₅₀-R₅₁-R₅₂-R₅₃-R₅₄-R₅₅-R₅₆-R₅₇-R₅₈-R₅₉-R₆₀-R₆₁-R₆₂-R₆₃-R₆₄-R₆₅-R₆₆-R₆₇-R₆₈-R₆₉-R₇₀-R₇₁-R₇₂

[1256] wherein R is a ribonucleotide residue and the consensus for Asp is:
[1257] R₀, R₁₇, R₁₈, R₂₃=are independently absent;
[1258] R₀, R₄₀=are independently A or absent;
[1259] R₂₄, R₇₁=are independently A, C or absent;
[1260] R₆₇, R₆₈=are independently A, C, G or absent;
[1261] R₂, R₆, R₆₆=are independently N or absent;
[1262] R₅₇, R₆₃=are independently A, C, U or absent;
[1263] R₁₀, R₁₄, R₂₇, R₃₃, R₃₇, R₄₄, R₄₆, R₅₁, R₅₆, R₆₄, R₇₂=are independently A, G or absent;
[1264] R₇, R₁₂, R₂₆, R₆₅=are independently A, U or absent;
[1265] R₃₉, R₆₁, R₆₂=are independently C or absent;
[1266] R₃, R₃₁, R₄₅, R₇₀=are independently C, G or absent;
[1267] R₄, R₅, R₂₉, R₄₃, R₅₅=are independently C, G, U or absent;
[1268] R₈, R₁₁, R₁₃, R₃₀, R₃₂, R₃₄, R₃₅, R₄₁, R₄₈, R₅₃, R₅₉, R₆₀=are independently C, U or absent;
[1269] R₁₅, R₁₉, R₂₀, R₂₅, R₄₂, R so, R₅₂=are independently G or absent;
[1270] R₁, R₂₂, R₄₉, R₅₈, R₆₉=are independently G, U or absent;
[1271] R₁₆, R₂₁, R₂₈, R₃₆, R₃₈, R₅₄=are independently U or absent;
[1272] [R₄₇]ₓ=N or absent;
[1273] wherein, e.g., x=1-271 (e.g., x=1-250, x=1-225, x=1-200, x=1-175, x=1-150, x=1-125, x=1-100, x=1-75, x=1-50, x=1-40, x=1-30, x=1-29, x=1-28, x=1-27, x=1-26, x=1-25, x=1-24, x=1-23, x=1-22, x=1-21, x=1-20, x=1-19, x=1-18, x=1-17, x=1-16, x=1-15, x=1-14, x=1-13, x=1-12, x=1-11, x=1-10, x=10-271, x=20-271, x=30-271, x=40-271, x=50-271, x=60-271, x=70-271, x=80-271, x=100-271, x=125-271, x=150-271, x=175-271, x=200-271, x=225-271, x=1, x=2, x=3, x=4, x=5, x=6, x=7, x=8, x=9, x=10, x=11, x=12, x=13, x=14, x=15, x=16, x=17, x=18, x=19, x=20, x=21, x=22, x=23, x=24, x=25, x=26, x=27, x=28, x=29, x=30, x=40, x=50, x=60, x=70, x=80, x=90, x=100, x=110, x=125, x=150, x=175, x=200, x=225, x=250, or x=271), provided that the TREM has one or both of the following properties: no more than 15% of the residues are N; or no more than 20 residues are absent.

[1274] In an embodiment, a TREM disclosed herein comprises the sequence of Formula III ASP (SEQ ID NO: 573),
[1275] R₀-R₁-R₂-R₃-R₄-R₅-R₆-R₇-R₈-R₉-R₁₀-R₁₁-R₁₂-R₁₃-R₁₄-R₁₅-R₁₆-R₁₇-R₁₈-R₁₉-R₂₀-R₂₁-R₂₂-R₂₃-R₂₄-R₂₅-R₂₆-R₂₇-R₂₈-R₂₉-R₃₀-R₃₁-R₃₂-R₃₃-R₃₄-R₃₅-R₃₆-R₃₇-R₃₈-R₃₉-R₄₀-R₄₁-R₄₂-R₄₃-R₄₄-R₄₅-R₄₆-[R₄₇]ₓ-R₄₈-R₄₉-R₅₀-R₅₁-R₅₂-R₅₃-R₅₄-R₅₅-R₅₆-R₅₇-R₅₈-R₅₉-R₆₀-R₆₁-R₆₂-R₆₃-R₆₄-R₆₅-R₆₆-R₆₇-R₆₈-R₆₉-R₇₀-R₇₁-R₇₂

[1276] wherein R is a ribonucleotide residue and the consensus for Asp is:
[1277] R₀, R₁₇, R₁₈, R₂₃=are absent
[1278] R₉, R₁₂, R₄₀, R₆₅, R₇₁=are independently A or absent;
[1279] R₂, R₂₄, R₅₇=are independently A, C or absent;
[1280] R₆, R₁₄, R₂₇, R₄₆, R₅₁, R₅₆, R₆₄, R₆₇, R₆₈=are independently A, G or absent;
[1281] R₃, R₃₁, R₃₅, R₃₉, R₆₁, R₆₂=are independently C or absent;
[1282] R₆₆=C, G or absent;
[1283] R₅, R₈, R₂₉, R₃₀, R₃₂, R₃₄, R₄₁, R₄₃, R₄₈, R₅₅, R₅₉, R₆₀, R₆₃=are independently C, U or absent;
[1284] R₁₀, R₁₅, R₁₉, R₂₀, R₂₅, R₃₃, R₃₇, R₄₂, R₄₄, R₄₅, R₄₉, R₅₀, R₅₂, R₆₉, R₇₀, R₇₂=are independently G or absent;
[1285] R₂₂, R₅₅=are independently G, U or absent;
[1286] R₁, R₄, R₇, R₁₁, R₁₃, R₁₆, R₂₁, R₂₆, R₂₈, R₃₆, R₃₈, R₅₃, R₅₄=are independently U or absent;
[1287] [R₄₇]ₓ=N or absent;
[1288] wherein, e.g., x=1-271 (e.g., x=1-250, x=1-225, x=1-200, x=1-175, x=1-150, x=1-125, x=1-100, x=1-75, x=1-50, x=1-40, x=1-30, x=1-29, x=1-28, x=1-27, x=1-26, x=1-25, x=1-24, x=1-23, x=1-22, x=1-21, x=1-20, x=1-19, x=1-18, x=1-17, x=1-16, x=1-15, x=1-14, x=1-13, x=1-12, x=1-11, x=1-10, x=10-271, x=20-271, x=30-271, x=40-271, x=50-271, x=60-271, x=70-271, x=80-271, x=100-271, x=125-271, x=150-271, x=175-271, x=200-271, x=225-271, x=1, x=2, x=3, x=4, x=5, x=6, x=7, x=8, x=9, x=10, x=11, x=12, x=13, x=14, x=15, x=16, x=17, x=18, x=19, x=20, x=21, x=22, x=23, x=24, x=25, x=26, x=27, x=28, x=29, x=30, x=40, x=50, x=60, x=70, x=80, x=90, x=100, x=110, x=125, x=150, x=175, x=200, x=225, x=250, or x=271), provided that the TREM has one or both of the following properties: no more than 15% of the residues are N; or no more than 20 residues are absent.

### Cysteine TREM Consensus Sequence

[1289] In an embodiment, a TREM disclosed herein comprises the sequence of Formula I cYs (SEQ ID NO: 574),
[1290] R₀-R₁-R₂-R₃-R₄-R₅-R₆-R₇-R₈-R₉-R₁₀-R₁₁-R₁₂-R₁₃-R₁₄-R₁₅-R₁₆-R₁₇-R₁₈-R₁₉-R₂₀-R₂₁-R₂₂-R₂₃-R₂₄-R₂₅-R₂₆-R₂₇-R₂₈-R₂₉-R₃₀-R₃₁-R₃₂-R₃₃-R₃₄-R₃₅-R₃₆-R₃₇-R₃₈-R₃₉-R₄₀-R₄₁-R₄₂-R₄₃-R₄₄-R₄₅-R₄₆-[R₄₇]ₓ-R₄₈-R₄₉-R₅₀-R₅₁-R₅₂-R₅₃-R₅₄-R₅₅-R₅₆-R₅₇-R₅₈-R₅₉-R₆₀-R₆₁-R₆₂-R₆₃-R₆₄-R₆₅-R₆₆-R₆₇-R₆₈-R₆₉-R₇₀-R₇₁-R₇₂

[1291] wherein R is a ribonucleotide residue and the consensus for Cys is:
[1292] R₀=absent
[1293] R₁₄, R₃₉, R₅₇=are independently A or absent;
[1294] R₄₁=A, C or absent;
[1295] R₁₀, R₁₅, R₂₇, R₃₃, R₆₂=are independently A, C, G or absent;
[1296] R₃, R₄, R₅, R₆, R₁₂, R₁₃, R₁₆, R₂₄, R₂₆, R₂₉, R₃₀, R₃₁, R₃₂, R₃₄, R₄₂, R₄₄, R₄₅, R₄₆, R₄₈, R₄₉, R₅₈, R₆₃, R₆₄, R₆₆,
[1297] R₆₇, R₆₈, R₆₉, R₇₀=are independently N or absent;
[1298] R₆₅=A, C, U or absent;
[1299] R₉, R₂₅, R₃₇, R₄₀, R₅₂, R₅₆=are independently A, G or absent;
[1300] R₇, R₂₀, R₅₁=are independently A, G, U or absent;
[1301] R₁₈, R₃₈, R₅₅=are independently C or absent;
[1302] R₂=C, G or absent;
[1303] R₂₁, R₂₈, R₄₃, R₅₀=are independently C, G, U or absent;
[1304] R₁₁, R₂₂, R₂₃, R₃₅, R₃₆, R₅₉, R₆₀, R₆₁, R₇₁, R₇₂=are independently C, U or absent;
[1305] R₁, R₁₉=are independently G or absent;
[1306] R₁₇=G, U or absent;
[1307] R₅, R₅₃, R₅₄=are independently U or absent;
[1308] [R₄₇]ₓ=N or absent;
[1309] wherein, e.g., x=1-271 (e.g., x=1-250, x=1-225, x=1-200, x=1-175, x=1-150, x=1-125, x=1-100, x=1-75, x=1-50, x=1-40, x=1-30, x=1-29, x=1-28, x=1-27, x=1-26, x=1-25, x=1-24, x=1-23, x=1-22, x=1-21, x=1-20, x=1-19, x=1-18, x=1-17, x=1-16, x=1-15, x=1-14, x=1-13, x=1-12, x=1-11, x=1-10, x=10-271, x=20-271, x=30-271, x=40-271, x=50-271, x=60-271, x=70-271, x=80-271, x=100-271, x=125-271, x=150-271, x=175-271, x=200-271, x=225-271, x=1, x=2, x=3, x=4, x=5, x=6, x=7, x=8, x=9, x=10, x=11, x=12, x=13, x=14, x=15, x=16, x=17, x=18, x=19, x=20, x=21, x=22, x=23, x=24, x=25, x=26, x=27, x=28, x=29, x=30, x=40, x=50, x=60, x=70, x=80, x=90, x=100, x=110, x=125, x=150, x=175, x=200, x=225, x=250, or x=271), provided that the TREM has one or both of the following properties: no more than 15% of the residues are N; or no more than 20 residues are absent.

[1310] In an embodiment, a TREM disclosed herein comprises the sequence of Formula II CYs (SEQ ID NO: 575),
[1311] R₀-R₁-R₂-R₃-R₄-R₅-R₆-R₇-R₈-R₉-R₁₀-R₁₁-R₁₂-R₁₃-R₁₄-R₁₅-R₁₆-R₁₇-R₁₈-R₁₉-R₂₀-R₂₁-R₂₂-R₂₃-R₂₄-R₂₅-R₂₆-R₂₇-R₂₈-R₂₉-R₃₀-R₃₁-R₃₂-R₃₃-R₃₄-R₃₅-R₃₆-R₃₇-R₃₈-R₃₉-R₄₀-R₄₁-R₄₂-R₄₃-R₄₄-R₄₅-R₄₆-[R₄₇]ₓ-R₄₈-R₄₉-R₅₀-R₅₁-R₅₂-R₅₃-R₅₄-R₅₅-R₅₆-R₅₇-R₅₈-R₅₉-R₆₀-R₆₁-R₆₂-R₆₃-R₆₄-R₆₅-R₆₆-R₆₇-R₆₈-R₆₉-R₇₀-R₇₁-R₇₂

[1312] wherein R is a ribonucleotide residue and the consensus for Cys is:
[1313] R₀, R₁₈, R₂₃=are absent;
[1314] R₁₄, R₂₄, R₂₆, R₂₉, R₃₉, R₄₁, R₄₅, R₅₇=are independently A or absent;
[1315] R₄₄=A, C or absent;
[1316] R₂₇, R₆₂=are independently A, C, G or absent;
[1317] R₁₆=A, C, G, U or absent;
[1318] R₃₀, R₇₀=are independently A, C, U or absent;
[1319] R₅, R₇, R₉, R₂₅, R₃₄, R₃₇, R₄₀, R₄₆, R₅₂, R₅₆, R₅₈, R₆₆=are independently A, G or absent;
[1320] R₂₀, R₅₁=are independently A, G, U or absent;
[1321] R₃₅, R₃₈, R₄₃, R₅₅, R₆₉=are independently C or absent;
[1322] R₂, R₄, R₁₅=are independently C, G or absent;
[1323] R₁₃=C, G, U or absent;
[1324] R₆, R₁₁, R₂₈, R₃₆, R₄₈, R₄₉, R so, R₆₀, R₆₁, R₆₇, R₆₈, R₇₁, R₇₂=are independently C, U or absent;
[1325] R₁, R₃, R₁₀, R₁₉, R₃₃, R₆₃=are independently G or absent;
[1326] R₈, R₁₇, R₂₁, R₆₄=are independently G, U or absent;
[1327] R₁₂, R₂₂, R₃₁, R₃₂, R₄₂, R₅₃, R₅₄, R₆₅=are independently U or absent;
[1328] R₅₉=U, or absent;
[1329] [R₄₇]ₓ=N or absent;
[1330] wherein, e.g., x=1-271 (e.g., x=1-250, x=1-225, x=1-200, x=1-175, x=1-150, x=1-125, x=1-100, x=1-75, x=1-50, x=1-40, x=1-30, x=1-29, x=1-28, x=1-27, x=1-26, x=1-25, x=1-24, x=1-23, x=1-22, x=1-21, x=1-20, x=1-19, x=1-18, x=1-17, x=1-16, x=1-15, x=1-14, x=1-13, x=1-12, x=1-11, x=1-10, x=10-271, x=20-271, x=30-271, x=40-271, x=50-271, x=60-271, x=70-271, x=80-271, x=100-271, x=125-271, x=150-271, x=175-271, x=200-271, x=225-271, x=1, x=2, x=3, x=4, x=5, x=6, x=7, x=8, x=9, x=10, x=11, x=12, x=13, x=14, x=15, x=16, x=17, x=18, x=19, x=20, x=21, x=22, x=23, x=24, x=25, x=26, x=27, x=28, x=29, x=30, x=40, x=50, x=60, x=70, x=80, x=90, x=100, x=110, x=125, x=150, x=175, x=200, x=225, x=250, or x=271), provided that the TREM has one or both of the following properties: no more than 15% of the residues are N; or no more than 20 residues are absent.

[1331] In an embodiment, a TREM disclosed herein comprises the sequence of Formula III CYS (SEQ ID NO: 576),
[1332] R₀-R₁-R₂-R₃-R₄-R₅-R₆-R₇-R₈-R₉-R₁₀-R₁₁-R₁₂-R₁₃-R₁₄-R₁₅-R₁₆-R₁₇-R₁₈-R₁₉-R₂₀-R₂₁-R₂₂-R₂₃-R₂₄-R₂₅-R₂₆-R₂₇-R₂₈-R₂₉-R₃₀-R₃₁-R₃₂-R₃₃-R₃₄-R₃₅-R₃₆-R₃₇-R₃₈-R₃₉-R₄₀-R₄₁-R₄₂-R₄₃-R₄₄-R₄₅-R₄₆-[R₄₇]ₓ-R₄₈-R₄₉-R₅₀-R₅₁-R₅₂-R₅₃-R₅₄-R₅₅-R₅₆-R₅₇-R₅₈-R₅₉-R₆₀-R₆₁-R₆₂-R₆₃-R₆₄-R₆₅-R₆₆-R₆₇-R₆₈-R₆₉-R₇₀-R₇₁-R₇₂

[1333] wherein R is a ribonucleotide residue and the consensus for Cys is:
[1334] R₀, R₁₈, R₂₃=are absent
[1335] R₁₄, R₂₄, R₂₆, R₂₉, R₃₄, R₃₉, R₄₁, R₄₅, R₅₇, R₅₅=are independently A or absent;
[1336] R₄₄, R₇₀=are independently A, C or absent;
[1337] R₆₂=A, C, G or absent;
[1338] R₁₆=N or absent;
[1339] R₅, R₇, R₉, R₂₀, R₄₀, R₄₆, R₅₁, R$2, R₅₆, R₆₆=are independently A, G or absent;
[1340] R₂₈, R₃₅, R₃₈, R₄₃, R₅₅, R₆₇, R₆₉=are independently C or absent;
[1341] R₄, R₁₅=are independently C, G or absent;
[1342] R₆, R₁₁, R₁₃, R₃₀, R₄₈, R₄₉, R₅₀, R₆₀, R₆₁, R₆₈, R₇₁, R₇₂=are independently C, U or absent;
[1343] R₁, R₂, R₃, R₁₀, R₁₉, R₂₅, R₂₇, R₃₃, R₃₇, R₆₃=are independently G or absent;
[1344] R₈, R₂₁, R₆₄=are independently G, U or absent;
[1345] R₁₂, R₁₇, R₂₂, R₃₁, R₃₂, R₃₆, R₄₂, R₅₃, R₅₄, R₅₉, R₆₅=are independently U or absent;
[1346] [R₄₇]ₓ=N or absent;
[1347] wherein, e.g., x=1-271 (e.g., x=1-250, x=1-225, x=1-200, x=1-175, x=1-150, x=1-125, x=1-100, x=1-75, x=1-50, x=1-40, x=1-30, x=1-29, x=1-28, x=1-27, x=1-26, x=1-25, x=1-24, x=1-23, x=1-22, x=1-21, x=1-20, x=1-19, x=1-18, x=1-17, x=1-16, x=1-15, x=1-14, x=1-13, x=1-12, x=1-11, x=1-10, x=10-271, x=20-271, x=30-271, x=40-271, x=50-271, x=60-271, x=70-271, x=80-271, x=100-271, x=125-271, x=150-271, x=175-271, x=200-271, x=225-271, x=1, x=2, x=3, x=4, x=5, x=6, x=7, x=8, x=9, x=10, x=11, x=12, x=13, x=14, x=15, x=16, x=17, x=18, x=19, x=20, x=21, x=22, x=23, x=24, x=25, x=26, x=27, x=28, x=29, x=30, x=40, x=50, x=60, x=70, x=80, x=90, x=100, x=110, x=125, x=150, x=175, x=200, x=225, x=250, or x=271), provided that the TREM has one or both of the following properties: no more than 15% of the residues are N; or no more than 20 residues are absent.

### Glutamine TREM Consensus Sequence

[1348] In an embodiment, a TREM disclosed herein comprises the sequence of Formula I GLN (SEQ ID NO: 577),
[1349] R₀-R₁-R₂-R₃-R₄-R₅-R₆-R₇-R₈-R₉-R₁₀-R₁₁-R₁₂-R₁₃-R₁₄-R₁₅-R₁₆-R₁₇-R₁₈-R₁₉-R₂₀-R₂₁-R₂₂-R₂₃-R₂₄-R₂₅-R₂₆-R₂₇-R₂₈-R₂₉-R₃₀-R₃₁-R₃₂-R₃₃-R₃₄-R₃₅-R₃₆-R₃₇-R₃₈-R₃₉-R₄₀-R₄₁-R₄₂-R₄₃-R₄₄-R₄₅-R₄₆-[R₄₇]ₓ-R₄₈-R₄₉-R₅₀-R₅₁-R₅₂-R₅₃-R₅₄-R₅₅-R₅₆-R₅₇-R₅₈-R₅₉-R₆₀-R₆₁-R₆₂-R₆₃-R₆₄-R₆₅-R₆₆-R₆₇-R₆₈-R₆₉-R₇₀-R₇₁-R₇₂

[1350] wherein R is a ribonucleotide residue and the consensus for Gln is:
[1351] R₀, R₁₈=are absent;
[1352] R₁₄, R₂₄, R₅₇=are independently A or absent;
[1353] R₉, R₂₆, R₂₇, R₃₃, R₅₆=are independently A, C, G or absent;
[1354] R₂, R₄, R₅, R₆, R₁₂, R₁₃, R₁₆, R₂₁, R₂₂, R₂₅, R₂₉, R₃₀, R₃₁, R₃₂, R₃₄, R₄₁, R₄₂, R₄₄, R₄₅, R₄₆, R₄₈, R₄₉, R₅₀, R₅₈, R₆₂, R₆₃, R₆₆, R₆₇, R₆₈, R₆₉, R₇₀=are independently N or absent;
[1355] R₁₇, R₂₃, R₄₃, R₆₅, R₇₁=are independently A, C, U or absent;
[1356] R₁₅, R₄₀, R₅₁, R₅₂=are independently A, G or absent;
[1357] R₁, R₇, R₇₂=are independently A, G, U or absent;
[1358] R₃, R₁₁, R₃₇, R₆₀, R₆₄=are independently C, G, U or absent;
[1359] R₂₈, R₃₅, R₅₅, R₅₉, R₆₁=are independently C, U or absent;
[1360] R₁₀, R₁₉, R₂₀=are independently G or absent;
[1361] R₃₉=G, U or absent;
[1362] R₈, R₃₆, R₃₈, R₅₃, R₅₄=are independently U or absent;
[1363] [R₄₇]ₓ=N or absent;
[1364] wherein, e.g., x=1-271 (e.g., x=1-250, x=1-225, x=1-200, x=1-175, x=1-150, x=1-125, x=1-100, x=1-75, x=1-50, x=1-40, x=1-30, x=1-29, x=1-28, x=1-27, x=1-26, x=1-25, x=1-24, x=1-23, x=1-22, x=1-21, x=1-20, x=1-19, x=1-18, x=1-17, x=1-16, x=1-15, x=1-14, x=1-13, x=1-12, x=1-11, x=1-10, x=10-271, x=20-271, x=30-271, x=40-271, x=50-271, x=60-271, x=70-271, x=80-271, x=100-271, x=125-271, x=150-271, x=175-271, x=200-271, x=225-271, x=1, x=2, x=3, x=4, x=5, x=6, x=7, x=8, x=9, x=10, x=11, x=12, x=13, x=14, x=15, x=16, x=17, x=18, x=19, x=20, x=21, x=22, x=23, x=24, x=25, x=26, x=27, x=28, x=29, x=30, x=40, x=50, x=60, x=70, x=80, x=90, x=100, x=110, x=125, x=150, x=175, x=200, x=225, x=250, or x=271), provided that the TREM has one or both of the following properties: no more than 15% of the residues are N; or no more than 20 residues are absent.

[1365] In an embodiment, a TREM disclosed herein comprises the sequence of Formula II GLN (SEQ ID NO: 578),
[1366] R₀-R₁-R₂-R₃-R₄-R₅-R₆-R₇-R₈-R₉-R₁₀-R₁₁-R₁₂-R₁₃-R₁₄-R₁₅-R₁₆-R₁₇-R₁₈-R₁₉-R₂₀-R₂₁-R₂₂-R₂₃-R₂₄-R₂₅-R₂₆-R₂₇-R₂₈-R₂₉-R₃₀-R₃₁-R₃₂-R₃₃-R₃₄-R₃₅-R₃₆-R₃₇-R₃₈-R₃₉-R₄₀-R₄₁-R₄₂-R₄₃-R₄₄-R₄₅-R₄₆-[R₄₇]ₓ-R₄₈-R₄₉-R₅₀-R₅₁-R₅₂-R₅₃-R₅₄-R₅₅-R₅₆-R₅₇-R₅₈-R₅₉-R₆₀-R₆₁-R₆₂-R₆₃-R₆₄-R₆₅-R₆₆-R₆₇-R₆₈-R₆₉-R₇₀-R₇₁-R₇₂

[1367] wherein R is a ribonucleotide residue and the consensus for Gln is:
[1368] R₀, R₁₈, R₂₃=are absent
[1369] R₁₄, R₂₄, R₅₇=are independently A or absent;
[1370] R₁₇, R₇₁=are independently A, C or absent;
[1371] R₂₅, R₂₆, R₃₃, R₄₄, R₄₆, R₅₆, R₆₉=are independently A, C, G or absent;
[1372] R₄, R₅, R₁₂, R₂₂, R₂₉, R₃₀, R₄₈, R₄₉, R₆₃, R₆₇, R₆₈=are independently N or absent;
[1373] R₃₁, R₄₃, R₆₂, R₆₅, R₇₀=are independently A, C, U or absent;
[1374] R₁₅, R₂₇, R₃₄, R₄₀, R₄₁, R₅₁, R₅₂=are independently A, G or absent;
[1375] R₂, R₇, R₂₁, R₄₅, R₅₀, R₅₅, R₆₆, R₇₂=are independently A, G, U or absent;
[1376] R₃, R₁₃, R₃₂, R₃₇, R₄₂, R₆₀, R₆₄=are independently C, G, U or absent;
[1377] R₆, R₁₁, R₂₈, R₃₅, R₅₅, R₅₉, R₆₁=are independently C, U or absent;
[1378] R₉, R₁₀, R₁₉, R₂₀=are independently G or absent;
[1379] R₁, R₁₆, R₃₉=are independently G, U or absent;
[1380] R&, R₃₆, R₃₈, R₅₃, R₅₄=are independently U or absent;
[1381] [R₄₇]ₓ=N or absent;
[1382] wherein, e.g., x=1-271 (e.g., x=1-250, x=1-225, x=1-200, x=1-175, x=1-150, x=1-125, x=1-100, x=1-75, x=1-50, x=1-40, x=1-30, x=1-29, x=1-28, x=1-27, x=1-26, x=1-25, x=1-24, x=1-23, x=1-22, x=1-21, x=1-20, x=1-19, x=1-18, x=1-17, x=1-16, x=1-15, x=1-14, x=1-13, x=1-12, x=1-11, x=1-10, x=10-271, x=20-271, x=30-271, x=40-271, x=50-271, x=60-271, x=70-271, x=80-271, x=100-271, x=125-271, x=150-271, x=175-271, x=200-271, x=225-271, x=1, x=2, x=3, x=4, x=5, x=6, x=7, x=8, x=9, x=10, x=11, x=12, x=13, x=14, x=15, x=16, x=17, x=18, x=19, x=20, x=21, x=22, x=23, x=24, x=25, x=26, x=27, x=28, x=29, x=30, x=40, x=50, x=60, x=70, x=80, x=90, x=100, x=110, x=125, x=150, x=175, x=200, x=225, x=250, or x=271), provided that the TREM has one or both of the following properties: no more than 15% of the residues are N; or no more than 20 residues are absent.

[1383] In an embodiment, a TREM disclosed herein comprises the sequence of Formula III GLN (SEQ ID NO: 579),
[1384] R₀-R₁-R₂-R₃-R₄-R₅-R₆-R₇-R₈-R₉-R₁₀-R₁₁-R₁₂-R₁₃-R₁₄-R₁₅-R₁₆-R₁₇-R₁₈-R₁₉-R₂₀-R₂₁-R₂₂-R₂₃-R₂₄-R₂₅-R₂₆-R₂₇-R₂₈-R₂₉-R₃₀-R₃₁-R₃₂-R₃₃-R₃₄-R₃₅-R₃₆-R₃₇-R₃₈-R₃₉-R₄₀-R₄₁-R₄₂-R₄₃-R₄₄-R₄₅-R₄₆-[R₄₇]ₓ-R₄₈-R₄₉-R₅₀-R₅₁-R₅₂-R₅₃-R₅₄-R₅₅-R₅₆-R₅₇-R₅₈-R₅₉-R₆₀-R₆₁-R₆₂-R₆₃-R₆₄-R₆₅-R₆₆-R₆₇-R₆₈-R₆₉-R₇₀-R₇₁-R₇₂

[1385] wherein R is a ribonucleotide residue and the consensus for Gln is:
[1386] R₀, R₁₈, R₂₃=are absent
[1387] R₁₄, R₂₄, R₄₁, R₅₇=are independently A or absent;
[1388] R₁₇, R₇₁=are independently A, C or absent;
[1389] R₅, R₂₅, R₂₆, R₄₆, R₅₆, R₆₉=are independently A, C, G or absent;
[1390] R₄, R₂₂, R₂₉, R₃₀, R₄₈, R₄₉, R₆₃, R₆₈=are independently N or absent;
[1391] R₄₃, R₆₂, R₆₅, R₇₀=are independently A, C, U or absent;
[1392] R₁₅, R₂₇, R₃₃, R₃₄, R₄₀, R₅₁, R₅₂=are independently A, G or absent;
[1393] R₂, R₇, R₁₂, R₄₅, R₅₀, R₅₅, R₆₆=are independently A, G, U or absent;
[1394] R₃₁=A, U or absent;
[1395] R₃₂, R₄₄, R₆₀=are independently C, G or absent;
[1396] R₃, R₁₃, R₃₇, R₄₂, R₆₄, R₆₇=are independently C, G, U or absent;
[1397] R₆, R₁₁, R₂₈, R₃₅, R₅₅, R₅₉, R₆₁=are independently C, U or absent;
[1398] R₉, R₁₀, R₁₉, R₂₀=are independently G or absent;
[1399] R₁, R₂₁, R₃₉, R₇₂=are independently G, U or absent;
[1400] R₈, R₁₆, R₃₆, R₃₈, R₅₃, R₅₄=are independently U or absent;
[1401] [R₄₇]ₓ=N or absent;
[1402] wherein, e.g., x=1-271 (e.g., x=1-250, x=1-225, x=1-200, x=1-175, x=1-150, x=1-125, x=1-100, x=1-75, x=1-50, x=1-40, x=1-30, x=1-29, x=1-28, x=1-27, x=1-26, x=1-25, x=1-24, x=1-23, x=1-22, x=1-21, x=1-20, x=1-19, x=1-18, x=1-17, x=1-16, x=1-15, x=1-14, x=1-13, x=1-12, x=1-11, x=1-10, x=10-271, x=20-271, x=30-271, x=40-271, x=50-271, x=60-271, x=70-271, x=80-271, x=100-271, x=125-271, x=150-271, x=175-271, x=200-271, x=225-271, x=1, x=2, x=3, x=4, x=5, x=6, x=7, x=8, x=9, x=10, x=11, x=12, x=13, x=14, x=15, x=16, x=17, x=18, x=19, x=20, x=21, x=22, x=23, x=24, x=25, x=26, x=27, x=28, x=29, x=30, x=40, x=50, x=60, x=70, x=80, x=90, x=100, x=110, x=125, x=150, x=175, x=200, x=225, x=250, or x=271), provided that the TREM has one or both of the following properties: no more than 15% of the residues are N; or no more than 20 residues are absent.

### Glutamate TREM Consensus Sequence

[1403] In an embodiment, a TREM disclosed herein comprises the sequence of Formula I GLU (SEQ ID NO: 580),
[1404] R₀-R₁-R₂-R₃-R₄-R₅-R₆-R₇-R₈-R₉-R₁₀-R₁₁-R₁₂-R₁₃-R₁₄-R₁₅-R₁₆-R₁₇-R₁₈-R₁₉-R₂₀-R₂₁-R₂₂-R₂₃-R₂₄-R₂₅-R₂₆-R₂₇-R₂₈-R₂₉-R₃₀-R₃₁-R₃₂-R₃₃-R₃₄-R₃₅-R₃₆-R₃₇-R₃₈-R₃₉-R₄₀-R₄₁-R₄₂-R₄₃-R₄₄-R₄₅-R₄₆-[R₄₇]ₓ-R₄₈-R₄₉-R₅₀-R₅₁-R₅₂-R₅₃-R₅₄-R₅₅-R₅₆-R₅₇-R₅₈-R₅₉-R₆₀-R₆₁-R₆₂-R₆₃-R₆₄-R₆₅-R₆₆-R₆₇-R₆₈-R₆₉-R₇₀-R₇₁-R₇₂

[1405] wherein R is a ribonucleotide residue and the consensus for Glu is:
[1406] R₀=absent;
[1407] R₃₄, R₄₃, R₆₈, R₆₉=are independently A, C, G or absent;
[1408] R₁, R₂, R₅, R₆, R₉, R₁₂, R₁₆, R₂₀, R₂₁, R₂₆, R₂₇, R₂₉, R₃₀, R₃₁, R₃₂, R₃₃, R₄₁, R₄₄, R₄₅, R₄₆, R₄₈, R so, R₅₁, R₅₈, R₆₃, R₆₄, R₆₅, R₆₆, R₇₀, R₇₁=are independently N or absent;
[1409] R₁₃, R₁₇, R₂₃, R₆₁=are independently A, C, U or absent;
[1410] R₁₀, R₁₄, R₂₄, R₄₀, R₅₂, R₅₆=are independently A, G or absent;
[1411] R₇, R₁₅, R₂₅, R₆₇, R₇₂=are independently A, G, U or absent;
[1412] R₁₁, R₅₇=are independently A, U or absent;
[1413] R₃₉=C, G or absent;
[1414] R₃, R₄, R₂₂, R₄₂, R₄₉, R₅₅, R₆₂=are independently C, G, U or absent;
[1415] R₁₈, R₂₈, R₃₅, R₃₇, R₅₃, R₅₉, R₆₀=are independently C, U or absent;
[1416] R₁₉=G or absent;
[1417] R₈, R₃₆, R₃₈, R₅₄=are independently U or absent;
[1418] [R₄₇]ₓ=N or absent;
[1419] wherein, e.g., x=1-271 (e.g., x=1-250, x=1-225, x=1-200, x=1-175, x=1-150, x=1-125, x=1-100, x=1-75, x=1-50, x=1-40, x=1-30, x=1-29, x=1-28, x=1-27, x=1-26, x=1-25, x=1-24, x=1-23, x=1-22, x=1-21, x=1-20, x=1-19, x=1-18, x=1-17, x=1-16, x=1-15, x=1-14, x=1-13, x=1-12, x=1-11, x=1-10, x=10-271, x=20-271, x=30-271, x=40-271, x=50-271, x=60-271, x=70-271, x=80-271, x=100-271, x=125-271, x=150-271, x=175-271, x=200-271, x=225-271, x=1, x=2, x=3, x=4, x=5, x=6, x=7, x=8, x=9, x=10, x=11, x=12, x=13, x=14, x=15, x=16, x=17, x=18, x=19, x=20, x=21, x=22, x=23, x=24, x=25, x=26, x=27, x=28, x=29, x=30, x=40, x=50, x=60, x=70, x=80, x=90, x=100, x=110, x=125, x=150, x=175, x=200, x=225, x=250, or x=271), provided that the TREM has one or both of the following properties: no more than 15% of the residues are N; or no more than 20 residues are absent.

[1420] In an embodiment, a TREM disclosed herein comprises the sequence of Formula II GLU (SEQ ID NO: 581),
[1421] R₀-R₁-R₂-R₃-R₄-R₅-R₆-R₇-R₈-R₉-R₁₀-R₁₁-R₁₂-R₁₃-R₁₄-R₁₅-R₁₆-R₁₇-R₁₈-R₁₉-R₂₀-R₂₁-R₂₂-R₂₃-R₂₄-R₂₅-R₂₆-R₂₇-R₂₈-R₂₉-R₃₀-R₃₁-R₃₂-R₃₃-R₃₄-R₃₅-R₃₆-R₃₇-R₃₈-R₃₉-R₄₀-R₄₁-R₄₂-R₄₃-R₄₄-R₄₅-R₄₆-[R₄₇]ₓ-R₄₈-R₄₉-R₅₀-R₅₁-R₅₂-R₅₃-R₅₄-R₅₅-R₅₆-R₅₇-R₅₈-R₅₉-R₆₀-R₆₁-R₆₂-R₆₃-R₆₄-R₆₅-R₆₆-R₆₇-R₆₈-R₆₉-R₇₀-R₇₁-R₇₂

[1422] wherein R is a ribonucleotide residue and the consensus for Glu is:
[1423] R₀, R₁₈, R₂₃=are absent
[1424] R₁₇, R₄₀=are independently A or absent;
[1425] R₂₆, R₂₇, R₃₄, R₄₃, R₆₈, R₆₉, R₇₁=are independently A, C, G or absent;
[1426] R₁, R₂, R₅, R₁₂, R₂₁, R₃₁, R₃₃, R₄₁, R₄₅, R₄₈, R₅₁, R₅₈, R₆₆, R₇₀=are independently N or absent;
[1427] R₄₄, R₆₁=are independently A, C, U or absent;
[1428] R₉, R₁₄, R₂₄, R₂₅, R₅₂, R₅₆, R₆₃=are independently A, G or absent;
[1429] R₇, R₁₅, R₄₆, R₅₀, R₆₇, R₇₂=are independently A, G, U or absent;
[1430] R₂₉, R₅₇=are independently A, U or absent;
[1431] R₆₀=C or absent;
[1432] R₃₉=C, G or absent;
[1433] R₃, R₆, R₂₀, R₃₀, R₃₂, R₄₂, R₅₅, R₆₂, R₆₅=are independently C, G, U or absent;
[1434] R₄, R₈, R₁₆, R₂₈, R₃₅, R₃₇, R₄₉, R₅₃, R₅₉=are independently C, U or absent;
[1435] R₁₀, R₁₉=are independently G or absent;
[1436] R₂₂, R₆₄=are independently G, U or absent;
[1437] R₁₁, R₁₃, R₃₆, R₃₈, R₅₄=are independently U or absent;
[1438] [R₄₇]ₓ=N or absent;
[1439] wherein, e.g., x=1-271 (e.g., x=1-250, x=1-225, x=1-200, x=1-175, x=1-150, x=1-125, x=1-100, x=1-75, x=1-50, x=1-40, x=1-30, x=1-29, x=1-28, x=1-27, x=1-26, x=1-25, x=1-24, x=1-23, x=1-22, x=1-21, x=1-20, x=1-19, x=1-18, x=1-17, x=1-16, x=1-15, x=1-14, x=1-13, x=1-12, x=1-11, x=1-10, x=10-271, x=20-271, x=30-271, x=40-271, x=50-271, x=60-271, x=70-271, x=80-271, x=100-271, x=125-271, x=150-271, x=175-271, x=200-271, x=225-271, x=1, x=2, x=3, x=4, x=5, x=6, x=7, x=8, x=9, x=10, x=11, x=12, x=13, x=14, x=15, x=16, x=17, x=18, x=19, x=20, x=21, x=22, x=23, x=24, x=25, x=26, x=27, x=28, x=29, x=30, x=40, x=50, x=60, x=70, x=80, x=90, x=100, x=110, x=125, x=150, x=175, x=200, x=225, x=250, or x=271), provided that the TREM has one or both of the following properties: no more than 15% of the residues are N; or no more than 20 residues are absent.

[1440] In an embodiment, a TREM disclosed herein comprises the sequence of Formula III GLU (SEQ ID NO: 582),
[1441] R₀-R₁-R₂-R₃-R₄-R₅-R₆-R₇-R₈-R₉-R₁₀-R₁₁-R₁₂-R₁₃-R₁₄-R₁₅-R₁₆-R₁₇-R₁₈-R₁₉-R₂₀-R₂₁-R₂₂-R₂₃-R₂₄-R₂₅-R₂₆-R₂₇-R₂₈-R₂₉-R₃₀-R₃₁-R₃₂-R₃₃-R₃₄-R₃₅-R₃₆-R₃₇-R₃₈-R₃₉-R₄₀-R₄₁-R₄₂-R₄₃-R₄₄-R₄₅-R₄₆-[R₄₇]ₓ-R₄₈-R₄₉-R₅₀-R₅₁-R₅₂-R₅₃-R₅₄-R₅₅-R₅₆-R₅₇-R₅₈-R₅₉-R₆₀-R₆₁-R₆₂-R₆₃-R₆₄-R₆₅-R₆₆-R₆₇-R₆₈-R₆₉-R₇₀-R₇₁-R₇₂

[1442] wherein R is a ribonucleotide residue and the consensus for Glu is:
[1443] R₀, R₁₇, R₁₈, R₂₃=are absent
[1444] R₁₄, R₂₇, R₄₀, R₇₁=are independently A or absent;
[1445] R₄₄=A, C or absent;
[1446] R₄₃=A, C, G or absent;
[1447] R₁, R₃₁, R₃₃, R₄₅, R₅₁, R₆₆=are independently N or absent;
[1448] R₂₁, R₄₁=are independently A, C, U or absent;
[1449] R₇, R₂₄, R₂₅, R₅₀, R₅₂, R₅₆, R₆₃, R₆₈, R₇₀=are independently A, G or absent;
[1450] R₅, R₄₆=are independently A, G, U or absent;
[1451] R₂₉, R₅₇, R₆₇, R₇₂=are independently A, U or absent;
[1452] R₂, R₃₉, R₆₀=are independently C or absent;
[1453] R₃, R₁₂, R₂₀, R₂₆, R₃₄, R₆₉=are independently C, G or absent;
[1454] R₆, R₃₀, R₄₂, R₄₈, R₆₅=are independently C, G, U or absent;
[1455] R₄, R₁₆, R₂₈, R₃₅, R₃₇, R₄₉, R₅₃, R₅₅, R₅₅, R₆₁, R₆₂=are independently C, U or absent;
[1456] R₀, R₁₀, R₁₉, R₆₄=are independently G or absent;
[1457] R₁₅, R₂₂, R₃₂=are independently G, U or absent;
[1458] R₈, R₁₁, R₁₃, R₃₆, R₃₈, R₅₄, R₅₉=are independently U or absent;
[1459] [R₄₇]ₓ=N or absent;
[1460] wherein, e.g., x=1-271 (e.g., x=1-250, x=1-225, x=1-200, x=1-175, x=1-150, x=1-125, x=1-100, x=1-75, x=1-50, x=1-40, x=1-30, x=1-29, x=1-28, x=1-27, x=1-26, x=1-25, x=1-24, x=1-23, x=1-22, x=1-21, x=1-20, x=1-19, x=1-18, x=1-17, x=1-16, x=1-15, x=1-14, x=1-13, x=1-12, x=1-11, x=1-10, x=10-271, x=20-271, x=30-271, x=40-271, x=50-271, x=60-271, x=70-271, x=80-271, x=100-271, x=125-271, x=150-271, x=175-271, x=200-271, x=225-271, x=1, x=2, x=3, x=4, x=5, x=6, x=7, x=8, x=9, x=10, x=11, x=12, x=13, x=14, x=15, x=16, x=17, x=18, x=19, x=20, x=21, x=22, x=23, x=24, x=25, x=26, x=27, x=28, x=29, x=30, x=40, x=50, x=60, x=70, x=80, x=90, x=100, x=110, x=125, x=150, x=175, x=200, x=225, x=250, or x=271), provided that the TREM has one or both of the following properties: no more than 15% of the residues are N; or no more than 20 residues are absent.

### Glycine TREM Consensus Sequence

[1461] In an embodiment, a TREM disclosed herein comprises the sequence of Formula I GLY (SEQ ID NO: 583),
[1462] R₀-R₁-R₂-R₃-R₄-R₅-R₆-R₇-R₈-R₉-R₁₀-R₁₁-R₁₂-R₁₃-R₁₄-R₁₅-R₁₆-R₁₇-R₁₈-R₁₉-R₂₀-R₂₁-R₂₂-R₂₃-R₂₄-R₂₅-R₂₆-R₂₇-R₂₈-R₂₉-R₃₀-R₃₁-R₃₂-R₃₃-R₃₄-R₃₅-R₃₆-R₃₇-R₃₈-R₃₉-R₄₀-R₄₁-R₄₂-R₄₃-R₄₄-R₄₅-R₄₆-[R₄₇]ₓ-R₄₈-R₄₉-R₅₀-R₅₁-R₅₂-R₅₃-R₅₄-R₅₅-R₅₆-R₅₇-R₅₈-R₅₉-R₆₀-R₆₁-R₆₂-R₆₃-R₆₄-R₆₅-R₆₆-R₆₇-R₆₈-R₆₉-R₇₀-R₇₁-R₇₂

[1463] wherein R is a ribonucleotide residue and the consensus for Gly is:
[1464] R₀=absent;
[1465] R₂₄=A or absent;
[1466] R₃, R₉, R₄₀, R₅₀, R₅₁=are independently A, C, G or absent;
[1467] R₄, R₅, R₆, R₇, R₁₂, R₁₆, R₂₁, R₂₂, R₂₆, R₂₉, R₃₀, R₃₁, R₃₂, R₃₃, R₃₄, R₄₁, R₄₂, R₄₃, R₄₄, R₄₅, R₄₆, R₄₈, R₄₉, R₅₈, R
[1468] 63, R₆₄, R₆₅, R₆₆, R₆₇, R₆₈=are independently N or absent;
[1469] R₅₉=A, C, U or absent;
[1470] R₁, R₁₀, R₁₄, R₁₅, R₂₇, R₅₆=are independently A, G or absent;
[1471] R₂₀, R₂₅=are independently A, G, U or absent;
[1472] R₅₇, R₇₂=are independently A, U or absent;
[1473] R₃₈, R₃₉, R₆₀=are independently C or absent;
[1474] R₅₂=C, G or absent;
[1475] R₂, R₁₉, R₃₇, R₅₄, R₅₅, R₆₁, R₆₂, R₆₉, R₇₀=are independently C, G, U or absent;
[1476] R₁₁, R₁₃, R₁₇, R₂₈, R₃₅, R₃₆, R₇₁=are independently C, U or absent;
[1477] R₈, R₁₈, R₂₃, R₅₃=are independently U or absent;
[1478] [R₄₇]ₓ=N or absent;
[1479] wherein, e.g., x=1-271 (e.g., x=1-250, x=1-225, x=1-200, x=1-175, x=1-150, x=1-125, x=1-100, x=1-75, x=1-50, x=1-40, x=1-30, x=1-29, x=1-28, x=1-27, x=1-26, x=1-25, x=1-24, x=1-23, x=1-22, x=1-21, x=1-20, x=1-19, x=1-18, x=1-17, x=1-16, x=1-15, x=1-14, x=1-13, x=1-12, x=1-11, x=1-10, x=10-271, x=20-271, x=30-271, x=40-271, x=50-271, x=60-271, x=70-271, x=80-271, x=100-271, x=125-271, x=150-271, x=175-271, x=200-271, x=225-271, x=1, x=2, x=3, x=4, x=5, x=6, x=7, x=8, x=9, x=10, x=11, x=12, x=13, x=14, x=15, x=16, x=17, x=18, x=19, x=20, x=21, x=22, x=23, x=24, x=25, x=26, x=27, x=28, x=29, x=30, x=40, x=50, x=60, x=70, x=80, x=90, x=100, x=110, x=125, x=150, x=175, x=200, x=225, x=250, or x=271), provided that the TREM has one or both of the following properties: no more than 15% of the residues are N; or no more than 20 residues are absent.

[1480] In an embodiment, a TREM disclosed herein comprises the sequence of Formula II GLY (SEQ ID NO: 584),
[1481] R₀-R₁-R₂-R₃-R₄-R₅-R₆-R₇-R₈-R₉-R₁₀-R₁₁-R₁₂-R₁₃-R₁₄-R₁₅-R₁₆-R₁₇-R₁₈-R₁₉-R₂₀-R₂₁-R₂₂-R₂₃-R₂₄-R₂₅-R₂₆-R₂₇-R₂₈-R₂₉-R₃₀-R₃₁-R₃₂-R₃₃-R₃₄-R₃₅-R₃₆-R₃₇-R₃₈-R₃₉-R₄₀-R₄₁-R₄₂-R₄₃-R₄₄-R₄₅-R₄₆-[R₄₇]ₓ-R₄₈-R₄₉-R₅₀-R₅₁-R₅₂-R₅₃-R₅₄-R₅₅-R₅₆-R₅₇-R₅₈-R₅₉-R₆₀-R₆₁-R₆₂-R₆₃-R₆₄-R₆₅-R₆₆-R₆₇-R₆₈-R₆₉-R₇₀-R₇₁-R₇₂

[1482] wherein R is a ribonucleotide residue and the consensus for Gly is:
[1483] R₀, R₁₈, R₂₃=are absent
[1484] R₂₄, R₂₇, R₄₀, R₇₂=are independently A or absent;
[1485] R₂₆=A, C or absent;
[1486] R₃, R₇, R₆₈=are independently A, C, G or absent;
[1487] R₅, R₃₀, R₄₁, R₄₂, R₄₄, R₄₉, R₆₇=are independently A, C, G, U or absent;
[1488] R₃₁, R₃₂, R₃₄=are independently A, C, U or absent;
[1489] R₀, R₁₀, R₁₄, R₁₅, R₃₃, R₅₀, R₅₆=are independently A, G or absent;
[1490] R₁₂, R₁₆, R₂₂, R₂₅, R₂₉, R₄₆=are independently A, G, U or absent;
[1491] R₅₇=A, U or absent;
[1492] R₁₇, R₃₈, R₃₉, R₆₀, R₆₁, R₇₁=are independently C or absent;
[1493] R₆, R₅₂, R₆₄, R₆₆=are independently C, G or absent;
[1494] R₂, R₄, R₃₇, R₄₈, R₅₅, R₆₅=are independently C, G, U or absent;
[1495] R₁₃, R₃₅, R₄₃, R₆₂, R₆₉=are independently C, U or absent;
[1496] R₁, R₁₉, R₂₀, R₅₁, R₇₀=are independently G or absent;
[1497] R₂₁, R₄₅, R₆₃=are independently G, U or absent;
[1498] R₈, R₁₁, R₂₈, R₃₆, R₅₃, R₅₄, R₅₈, R₅₉=are independently U or absent;
[1499] [R₄₇]ₓ=N or absent;
[1500] wherein, e.g., x=1-271 (e.g., x=1-250, x=1-225, x=1-200, x=1-175, x=1-150, x=1-125, x=1-100, x=1-75, x=1-50, x=1-40, x=1-30, x=1-29, x=1-28, x=1-27, x=1-26, x=1-25, x=1-24, x=1-23, x=1-22, x=1-21, x=1-20, x=1-19, x=1-18, x=1-17, x=1-16, x=1-15, x=1-14, x=1-13, x=1-12, x=1-11, x=1-10, x=10-271, x=20-271, x=30-271, x=40-271, x=50-271, x=60-271, x=70-271, x=80-271, x=100-271, x=125-271, x=150-271, x=175-271, x=200-271, x=225-271, x=1, x=2, x=3, x=4, x=5, x=6, x=7, x=8, x=9, x=10, x=11, x=12, x=13, x=14, x=15, x=16, x=17, x=18, x=19, x=20, x=21, x=22, x=23, x=24, x=25, x=26, x=27, x=28, x=29, x=30, x=40, x=50, x=60, x=70, x=80, x=90, x=100, x=110, x=125, x=150, x=175, x=200, x=225, x=250, or x=271), provided that the TREM has one or both of the following properties: no more than 15% of the residues are N; or no more than 20 residues are absent.

[1501] In an embodiment, a TREM disclosed herein comprises the sequence of Formula III GLY (SEQ ID NO: 585),
[1502] R₀-R₁-R₂-R₃-R₄-R₅-R₆-R₇-R₈-R₉-R₁₀-R₁₁-R₁₂-R₁₃-R₁₄-R₁₅-R₁₆-R₁₇-R₁₈-R₁₉-R₂₀-R₂₁-R₂₂-R₂₃-R₂₄-R₂₅-R₂₆-R₂₇-R₂₈-R₂₉-R₃₀-R₃₁-R₃₂-R₃₃-R₃₄-R₃₅-R₃₆-R₃₇-R₃₈-R₃₉-R₄₀-R₄₁-R₄₂-R₄₃-R₄₄-R₄₅-R₄₆-[R₄₇]ₓ-R₄₈-R₄₉-R₅₀-R₅₁-R₅₂-R₅₃-R₅₄-R₅₅-R₅₆-R₅₇-R₅₈-R₅₉-R₆₀-R₆₁-R₆₂-R₆₃-R₆₄-R₆₅-R₆₆-R₆₇-R₆₈-R₆₉-R₇₀-R₇₁-R₇₂

[1503] wherein R is a ribonucleotide residue and the consensus for Gly is:
[1504] R₀, R₁₈, R₂₃=are absent
[1505] R₂₄, R₂₇, R₄₀, R₇₂=are independently A or absent;
[1506] R₂₆=A, C or absent;
[1507] R₃, R₇, R₄₉, R₆₈=are independently A, C, G or absent;
[1508] R₅, R₃₀, R₄₁, R₄₄, R₆₇=are independently N or absent;
[1509] R₃₁, R₃₂, R₃₄=are independently A, C, U or absent;
[1510] R₉, R₁₀, R₁₄, R₁₅, R₃₃, R₅₀, R₅₆=are independently A, G or absent;
[1511] R₁₂, R₂₅, R₂₉, R₄₂, R₄₆=are independently A, G, U or absent;
[1512] R₁₆, R₅₇=are independently A, U or absent;
[1513] R₁₇, R₃₈, R₃₉, R₆₀, R₆₁, R₇₁=are independently C or absent;
[1514] R₆, R₅₂, R₆₄, R₆₆=are independently C, G or absent;
[1515] R₃₇, R₄₈, R₆₅=are independently C, G, U or absent;
[1516] R₂, R₄, R₁₃, R₃₅, R₄₃, R₅₅, R₆₂, R₆₉=are independently C, U or absent;
[1517] R₁, R₁₉, R₂₀, R₅₁, R₇₀=are independently G or absent;
[1518] R₂₁, R₂₂, R₄₅, R₆₃=are independently G, U or absent;
[1519] R₈, R₁₁, R₂₈, R₃₆, R₅₃, R₅₄, R₅₈, R₅₉=are independently U or absent;
[1520] [R₄₇]ₓ=N or absent;
[1521] wherein, e.g., x=1-271 (e.g., x=1-250, x=1-225, x=1-200, x=1-175, x=1-150, x=1-125, x=1-100, x=1-75, x=1-50, x=1-40, x=1-30, x=1-29, x=1-28, x=1-27, x=1-26, x=1-25, x=1-24, x=1-23, x=1-22, x=1-21, x=1-20, x=1-19, x=1-18, x=1-17, x=1-16, x=1-15, x=1-14, x=1-13, x=1-12, x=1-11, x=1-10, x=10-271, x=20-271, x=30-271, x=40-271, x=50-271, x=60-271, x=70-271, x=80-271, x=100-271, x=125-271, x=150-271, x=175-271, x=200-271, x=225-271, x=1, x=2, x=3, x=4, x=5, x=6, x=7, x=8, x=9, x=10, x=11, x=12, x=13, x=14, x=15, x=16, x=17, x=18, x=19, x=20, x=21, x=22, x=23, x=24, x=25, x=26, x=27, x=28, x=29, x=30, x=40, x=50, x=60, x=70, x=80, x=90, x=100, x=110, x=125, x=150, x=175, x=200, x=225, x=250, or x=271), provided that the TREM has one or both of the following properties: no more than 15% of the residues are N; or no more than 20 residues are absent.

### Histidine TREM Consensus Sequence

[1522] In an embodiment, a TREM disclosed herein comprises the sequence of Formula I HIS (SEQ ID NO: 586),
[1523] R₀-R₁-R₂-R₃-R₄-R₅-R₆-R₇-R₈-R₉-R₁₀-R₁₁-R₁₂-R₁₃-R₁₄-R₁₅-R₁₆-R₁₇-R₁₈-R₁₉-R₂₀-R₂₁-R₂₂-R₂₃-R₂₄-R₂₅-R₂₆-R₂₇-R₂₈-R₂₉-R₃₀-R₃₁-R₃₂-R₃₃-R₃₄-R₃₅-R₃₆-R₃₇-R₃₈-R₃₉-R₄₀-R₄₁-R₄₂-R₄₃-R₄₄-R₄₅-R₄₆-[R₄₇]ₓ-R₄₈-R₄₉-R₅₀-R₅₁-R₅₂-R₅₃-R₅₄-R₅₅-R₅₆-R₅₇-R₅₈-R₅₉-R₆₀-R₆₁-R₆₂-R₆₃-R₆₄-R₆₅-R₆₆-R₆₇-R₆₈-R₆₉-R₇₀-R₇₁-R₇₂

[1524] wherein R is a ribonucleotide residue and the consensus for His is:
[1525] R₂₃=absent;
[1526] R₁₄, R₂₄, R₅₇=are independently A or absent;
[1527] R₇₂=A, C or absent;
[1528] R₉, R₂₇, R₄₃, R₄₈, R₆₉=are independently A, C, G or absent;
[1529] R₃, R₄, R₅, R₆, R₁₂, R₂₅, R₂₆, R₂₉, R₃₀, R₃₁, R₃₄, R₄₂, R₄₅, R₄₆, R₄₉, R so, R₅₈, R₆₂, R₆₃, R₆₆, R₆₇, R₆₈=are independently N or absent;
[1530] R₁₃, R₂₁, R₄₁, R₄₄, R₆₅=are independently A, C, U or absent;
[1531] R₄₀, R₅₁, R₅₆, R₇₀=are independently A, G or absent;
[1532] R₇, R₃₂=are independently A, G, U or absent;
[1533] R₅₅, R₆₀=are independently C or absent;
[1534] R₁₁, R₁₆, R₃₃, R₆₄=are independently C, G, U or absent;
[1535] R₂, R₁₇, R₂₂, R₂₈, R₃₅, R₅₃, R₅₉, R₆₁, R₇₁=are independently C, U or absent;
[1536] R₁, R₁₀, R₁₅, R₁₉, R₂₀, R₃₇, R₃₉, R₅₂=are independently G or absent;
[1537] R₀=G, U or absent;
[1538] R₈, R₁₈, R₃₆, R₃₈, R₅₄=are independently U or absent;
[1539] [R₄₇]ₓ=N or absent;
[1540] wherein, e.g., x=1-271 (e.g., x=1-250, x=1-225, x=1-200, x=1-175, x=1-150, x=1-125, x=1-100, x=1-75, x=1-50, x=1-40, x=1-30, x=1-29, x=1-28, x=1-27, x=1-26, x=1-25, x=1-24, x=1-23, x=1-22, x=1-21, x=1-20, x=1-19, x=1-18, x=1-17, x=1-16, x=1-15, x=1-14, x=1-13, x=1-12, x=1-11, x=1-10, x=10-271, x=20-271, x=30-271, x=40-271, x=50-271, x=60-271, x=70-271, x=80-271, x=100-271, x=125-271, x=150-271, x=175-271, x=200-271, x=225-271, x=1, x=2, x=3, x=4, x=5, x=6, x=7, x=8, x=9, x=10, x=11, x=12, x=13, x=14, x=15, x=16, x=17, x=18, x=19, x=20, x=21, x=22, x=23, x=24, x=25, x=26, x=27, x=28, x=29, x=30, x=40, x=50, x=60, x=70, x=80, x=90, x=100, x=110, x=125, x=150, x=175, x=200, x=225, x=250, or x=271), provided that the TREM has one or both of the following properties: no more than 15% of the residues are N; or no more than 20 residues are absent.

[1541] In an embodiment, a TREM disclosed herein comprises the sequence of Formula II HIS (SEQ ID NO: 587),
[1542] R₀-R₁-R₂-R₃-R₄-R₅-R₆-R₇-R₈-R₉-R₁₀-R₁₁-R₁₂-R₁₃-R₁₄-R₁₅-R₁₆-R₁₇-R₁₈-R₁₉-R₂₀-R₂₁-R₂₂-R₂₃-R₂₄-R₂₅-R₂₆-R₂₇-R₂₈-R₂₉-R₃₀-R₃₁-R₃₂-R₃₃-R₃₄-R₃₅-R₃₆-R₃₇-R₃₈-R₃₉-R₄₀-R₄₁-R₄₂-R₄₃-R₄₄-R₄₅-R₄₆-[R₄₇]ₓ-R₄₈-R₄₉-R₅₀-R₅₁-R₅₂-R₅₃-R₅₄-R₅₅-R₅₆-R₅₇-R₅₈-R₅₉-R₆₀-R₆₁-R₆₂-R₆₃-R₆₄-R₆₅-R₆₆-R₆₇-R₆₈-R₆₉-R₇₀-R₇₁-R₇₂

[1543] wherein R is a ribonucleotide residue and the consensus for His is:
[1544] R₀, R₁₇, R₁₈, R₂₃=are absent;
[1545] R₇, R₁₂, R₁₄, R₂₄, R₂₇, R₄₅, R₅₇, R₅₈, R₆₃, R₆₇, R₇₂=are independently A or absent;
[1546] R₃=A, C, U or absent;
[1547] R₄, R₄₃, R₅₆, R₇₀=are independently A, G or absent;
[1548] R₄₉=A, U or absent;
[1549] R₂, R₂₈, R₃₀, R₄₁, R₄₂, R₄₄, R₄₈, R₅₅, R₆₀, R₆₆, R₇₁=are independently C or absent;
[1550] R₂₅=C, G or absent;
[1551] R₉=C, G, U or absent;
[1552] R₈, R₁₃, R₂₆, R₃₃, R₃₅, R₅₀, R₅₃, R₆₁, R₆₈=are independently C, U or absent;
[1553] R₁, R₆, R₁₀, R₁₅, R₁₉, R₂₀, R₃₂, R₃₄, R₃₇, R₃₉, R₄₀, R₄₆, R₅₁, R $2, R₆₂, R₆₄, R₆₉=are independently G or
[1554] absent;
[1555] R₁₆=G, U or absent;
[1556] R₅, R₁₁, R₂₁, R₂₂, R₂₉, R₃₁, R₃₆, R₃₈, R₅₄, R₅₉, R₆₅=are independently U or absent;
[1557] [R₄₇]ₓ=N or absent;
[1558] wherein, e.g., x=1-271 (e.g., x=1-250, x=1-225, x=1-200, x=1-175, x=1-150, x=1-125, x=1-100, x=1-75, x=1-50, x=1-40, x=1-30, x=1-29, x=1-28, x=1-27, x=1-26, x=1-25, x=1-24, x=1-23, x=1-22, x=1-21, x=1-20, x=1-19, x=1-18, x=1-17, x=1-16, x=1-15, x=1-14, x=1-13, x=1-12, x=1-11, x=1-10, x=10-271, x=20-271, x=30-271, x=40-271, x=50-271, x=60-271, x=70-271, x=80-271, x=100-271, x=125-271, x=150-271, x=175-271, x=200-271, x=225-271, x=1, x=2, x=3, x=4, x=5, x=6, x=7, x=8, x=9, x=10, x=11, x=12, x=13, x=14, x=15, x=16, x=17, x=18, x=19, x=20, x=21, x=22, x=23, x=24, x=25, x=26, x=27, x=28, x=29, x=30, x=40, x=50, x=60, x=70, x=80, x=90, x=100, x=110, x=125, x=150, x=175, x=200, x=225, x=250, or x=271), provided that the TREM has one or both of the following properties: no more than 15% of the residues are N; or no more than 20 residues are absent.

[1559] In an embodiment, a TREM disclosed herein comprises the sequence of Formula III HIS (SEQ ID NO: 588),
[1560] R₀-R₁-R₂-R₃-R₄-R₅-R₆-R₇-R₈-R₉-R₁₀-R₁₁-R₁₂-R₁₃-R₁₄-R₁₅-R₁₆-R₁₇-R₁₈-R₁₉-R₂₀-R₂₁-R₂₂-R₂₃-R₂₄-R₂₅-R₂₆-R₂₇-R₂₈-R₂₉-R₃₀-R₃₁-R₃₂-R₃₃-R₃₄-R₃₅-R₃₆-R₃₇-R₃₈-R₃₉-R₄₀-R₄₁-R₄₂-R₄₃-R₄₄-R₄₅-R₄₆-[R₄₇]ₓ-R₄₈-R₄₉-R₅₀-R₅₁-R₅₂-R₅₃-R₅₄-R₅₅-R₅₆-R₅₇-R₅₈-R₅₉-R₆₀-R₆₁-R₆₂-R₆₃-R₆₄-R₆₅-R₆₆-R₆₇-R₆₈-R₆₉-R₇₀-R₇₁-R₇₂

[1561] wherein R is a ribonucleotide residue and the consensus for His is:
[1562] R₀, R₁₇, R₁₈, R₂₃=are absent
[1563] R₇, R₁₂, R₁₄, R₂₄, R₂₇, R₄₅, R₅₇, R₅₈, R₆₃, R₆₇, R₇₂=are independently A or absent;
[1564] R₃=A, C or absent;
[1565] R₄, R₄₃, R₅₆, R₇₀=are independently A, G or absent;
[1566] R₄₉=A, U or absent;
[1567] R₂, R₂₈, R₃₀, R₄₁, R₄₂, R₄₄, R₄₈, R₅₅, R₆₀, R₆₆, R₇₁=are independently C or absent;
[1568] R₈, R₉, R₂₆, R₃₃, R₃₅, R₅₀, R₆₁, R₆₈=are independently C, U or absent;
[1569] R₁, R₆, R₁₀, R₁₅, R₁₉, R₂₀, R₂₅, R₃₂, R₃₄, R₃₇, R₃₉, R₄₀, R₄₆, R$1, R₅₂, R₆₂, R₆₄, R₆₉=are independently G
[1570] or absent;
[1571] R₅, R₁₁, R₁₃, R₁₆, R₂₁, R₂₂, R₂₉, R₃₁, R₃₆, R₃₈, R₅₃, R₅₄, R₅₉, R₆₅=are independently U or absent;
[1572] [R₄₇]ₓ=N or absent;
[1573] wherein, e.g., x=1-271 (e.g., x=1-250, x=1-225, x=1-200, x=1-175, x=1-150, x=1-125, x=1-100, x=1-75, x=1-50, x=1-40, x=1-30, x=1-29, x=1-28, x=1-27, x=1-26, x=1-25, x=1-24, x=1-23, x=1-22, x=1-21, x=1-20, x=1-19, x=1-18, x=1-17, x=1-16, x=1-15, x=1-14, x=1-13, x=1-12, x=1-11, x=1-10, x=10-271, x=20-271, x=30-271, x=40-271, x=50-271, x=60-271, x=70-271, x=80-271, x=100-271, x=125-271, x=150-271, x=175-271, x=200-271, x=225-271, x=1, x=2, x=3, x=4, x=5, x=6, x=7, x=8, x=9, x=10, x=11, x=12, x=13, x=14, x=15, x=16, x=17, x=18, x=19, x=20, x=21, x=22, x=23, x=24, x=25, x=26, x=27, x=28, x=29, x=30, x=40, x=50, x=60, x=70, x=80, x=90, x=100, x=110, x=125, x=150, x=175, x=200, x=225, x=250, or x=271), provided that the TREM has one or both of the following properties: no more than 15% of the residues are N; or no more than 20 residues are absent.

### Isoleucine TREM Consensus Sequence

[1574] In an embodiment, a TREM disclosed herein comprises the sequence of Formula I ILE (SEQ ID NO: 589),
[1575] R₀-R₁-R₂-R₃-R₄-R₅-R₆-R₇-R₈-R₉-R₁₀-R₁₁-R₁₂-R₁₃-R₁₄-R₁₅-R₁₆-R₁₇-R₁₈-R₁₉-R₂₀-R₂₁-R₂₂-R₂₃-R₂₄-R₂₅-R₂₆-R₂₇-R₂₈-R₂₉-R₃₀-R₃₁-R₃₂-R₃₃-R₃₄-R₃₅-R₃₆-R₃₇-R₃₈-R₃₉-R₄₀-R₄₁-R₄₂-R₄₃-R₄₄-R₄₅-R₄₆-[R₄₇]ₓ-R₄₈-R₄₉-R₅₀-R₅₁-R₅₂-R₅₃-R₅₄-R₅₅-R₅₆-R₅₇-R₅₈-R₅₉-R₆₀-R₆₁-R₆₂-R₆₃-R₆₄-R₆₅-R₆₆-R₆₇-R₆₈-R₆₉-R₇₀-R₇₁-R₇₂

[1576] wherein R is a ribonucleotide residue and the consensus for Ile is:
[1577] R₂₃=absent;
[1578] R₃₈, R₄₁, R₅₇, R₇₂=are independently A or absent;
[1579] R₁, R₂₆=are independently A, C, G or absent;
[1580] R₀, R₃, R₄, R₆, R₁₆, R₃₁, R₃₂, R₃₄, R₃₇, R₄₂, R₄₃, R₄₄, R₄₅, R₄₆, R₄₈, R₄₉, Rso, R₅₈, R₅₉, R₆₂, R₆₃, R₆₄, R₆₆, R₆₇, R₆₈, R₆₉=are independently N or absent;
[1581] R₂₂, R₆₁, R₆₅=are independently A, C, U or absent;
[1582] R₉, R₁₄, R₁₅, R₂₄, R₂₇, R₄₀=are independently A, G or absent;
[1583] R₇, R₂₅, R₂₉, R₅₁, R₅₆=are independently A, G, U or absent;
[1584] R₁₈, R₅₄=are independently A, U or absent;
[1585] R₆₀=C or absent;
[1586] R₂, R₅₂, R₇₀=are independently C, G or absent;
[1587] R₅, R₁₂, R₂₁, R₃₀, R₃₃, R₇₁=are independently C, G, U or absent;
[1588] R₁₁, R₁₃, R₁₇, R₂₈, R₃₅, R₅₃, R₅₅=are independently C, U or absent;
[1589] R₁₀, R₁₉, R₂₀=are independently G or absent;
[1590] R₈, R₃₆, R₃₉=are independently U or absent;
[1591] [R₄₇]ₓ=N or absent;
[1592] wherein, e.g., x=1-271 (e.g., x=1-250, x=1-225, x=1-200, x=1-175, x=1-150, x=1-125, x=1-100, x=1-75, x=1-50, x=1-40, x=1-30, x=1-29, x=1-28, x=1-27, x=1-26, x=1-25, x=1-24, x=1-23, x=1-22, x=1-21, x=1-20, x=1-19, x=1-18, x=1-17, x=1-16, x=1-15, x=1-14, x=1-13, x=1-12, x=1-11, x=1-10, x=10-271, x=20-271, x=30-271, x=40-271, x=50-271, x=60-271, x=70-271, x=80-271, x=100-271, x=125-271, x=150-271, x=175-271, x=200-271, x=225-271, x=1, x=2, x=3, x=4, x=5, x=6, x=7, x=8, x=9, x=10, x=11, x=12, x=13, x=14, x=15, x=16, x=17, x=18, x=19, x=20, x=21, x=22, x=23, x=24, x=25, x=26, x=27, x=28, x=29, x=30, x=40, x=50, x=60, x=70, x=80, x=90, x=100, x=110, x=125, x=150, x=175, x=200, x=225, x=250, or x=271), provided that the TREM has one or both of the following properties: no more than 15% of the residues are N; or no more than 20 residues are absent.

[1593] In an embodiment, a TREM disclosed herein comprises the sequence of Formula II ILE (SEQ ID NO: 590),
[1594] R₀-R₁-R₂-R₃-R₄-R₅-R₆-R₇-R₈-R₉-R₁₀-R₁₁-R₁₂-R₁₃-R₁₄-R₁₅-R₁₆-R₁₇-R₁₈-R₁₉-R₂₀-R₂₁-R₂₂-R₂₃-R₂₄-R₂₅-R₂₆-R₂₇-R₂₈-R₂₉-R₃₀-R₃₁-R₃₂-R₃₃-R₃₄-R₃₅-R₃₆-R₃₇-R₃₈-R₃₉-R₄₀-R₄₁-R₄₂-R₄₃-R₄₄-R₄₅-R₄₆-[R₄₇]ₓ-R₄₈-R₄₉-R₅₀-R₅₁-R₅₂-R₅₃-R₅₄-R₅₅-R₅₆-R₅₇-R₅₈-R₅₉-R₆₀-R₆₁-R₆₂-R₆₃-R₆₄-R₆₅-R₆₆-R₆₇-R₆₈-R₆₉-R₇₀-R₇₁-R₇₂

[1595] wherein R is a ribonucleotide residue and the consensus for Ile is:
[1596] R₀, R₁₈, R₂₃=are absent
[1597] R₂₄, R₃₈, R₄₀, R₄₁, R₅₇, R₇₂=are independently A or absent;
[1598] R₂₆, R₆₅=are independently A, C or absent;
[1599] R₅₈, R₅₉, R₆₇=are independently N or absent;
[1600] R₂₂=A, C, U or absent;
[1601] R₆, R₉, R₁₄, R₁₅, R₂₉, R₃₄, R₄₃, R₄₆, R₄₈, R₅₀, R₅₁, R₆₃, R₆₉=are independently A, G or absent;
[1602] R₃₇, R₅₆=are independently A, G, U or absent;
[1603] R₅₄=A, U or absent;
[1604] R₂₈, R₃₅, R₆₀, R₆₂, R₇₁=are independently C or absent;
[1605] R₂, R₅₂, R₇₀=are independently C, G or absent;
[1606] R₅=C, G, U or absent;
[1607] R₃, R₄, R₁₁, R₁₃, R₁₇, R₂₁, R₃₀, R₄₂, R₄₄, R₄₅, R₄₉, R₅₃, R₅₅, R₆₁, R₆₄, R₆₆=are independently C, U or
[1608] absent;
[1609] R₁, R₁₀, R₁₉, R₂₀, R₂₅, R₂₇, R₃₁, R₆₈=are independently G or absent;
[1610] R₇, R₁₂, R₃₂=are independently G, U or absent;
[1611] R₈, R₁₆, R₃₃, R₃₆, R₃₉=are independently U or absent;
[1612] [R₄₇]ₓ=N or absent;
[1613] wherein, e.g., x=1-271 (e.g., x=1-250, x=1-225, x=1-200, x=1-175, x=1-150, x=1-125, x=1-100, x=1-75, x=1-50, x=1-40, x=1-30, x=1-29, x=1-28, x=1-27, x=1-26, x=1-25, x=1-24, x=1-23, x=1-22, x=1-21, x=1-20, x=1-19, x=1-18, x=1-17, x=1-16, x=1-15, x=1-14, x=1-13, x=1-12, x=1-11, x=1-10, x=10-271, x=20-271, x=30-271, x=40-271, x=50-271, x=60-271, x=70-271, x=80-271, x=100-271, x=125-271, x=150-271, x=175-271, x=200-271, x=225-271, x=1, x=2, x=3, x=4, x=5, x=6, x=7, x=8, x=9, x=10, x=11, x=12, x=13, x=14, x=15, x=16, x=17, x=18, x=19, x=20, x=21, x=22, x=23, x=24, x=25, x=26, x=27, x=28, x=29, x=30, x=40, x=50, x=60, x=70, x=80, x=90, x=100, x=110, x=125, x=150, x=175, x=200, x=225, x=250, or x=271), provided that the TREM has one or both of the following properties: no more than 15% of the residues are N; or no more than 20 residues are absent.

[1614] In an embodiment, a TREM disclosed herein comprises the sequence of Formula III ILE (SEQ ID NO: 591),
[1615] R₀-R₁-R₂-R₃-R₄-R₅-R₆-R₇-R₈-R₉-R₁₀-R₁₁-R₁₂-R₁₃-R₁₄-R₁₅-R₁₆-R₁₇-R₁₈-R₁₉-R₂₀-R₂₁-R₂₂-R₂₃-R₂₄-R₂₅-R₂₆-R₂₇-R₂₈-R₂₉-R₃₀-R₃₁-R₃₂-R₃₃-R₃₄-R₃₅-R₃₆-R₃₇-R₃₈-R₃₉-R₄₀-R₄₁-R₄₂-R₄₃-R₄₄-R₄₅-R₄₆-[R₄₇]ₓ-R₄₈-R₄₉-R₅₀-R₅₁-R₅₂-R₅₃-R₅₄-R₅₅-R₅₆-R₅₇-R₅₈-R₅₉-R₆₀-R₆₁-R₆₂-R₆₃-R₆₄-R₆₅-R₆₆-R₆₇-R₆₈-R₆₉-R₇₀-R₇₁-R₇₂

[1616] wherein R is a ribonucleotide residue and the consensus for Ile is:
[1617] R₀, R₁₈, R₂₃=are absent
[1618] R₁₄, R₂₄, R₃₈, R₄₀, R₄₁, R₅₇, R₇₂=are independently A or absent;
[1619] R₂₆, R₆₅=are independently A, C or absent;
[1620] R₂₂, R₅₉=are independently A, C, U or absent;
[1621] R₆, R₉, R₁₅, R₃₄, R₄₃, R₄₆, R₅₁, R₅₆, R₆₃, R₆₉=are independently A, G or absent;
[1622] R₃₇=A, G, U or absent;
[1623] R₁₃, R₂₈, R₃₅, R₄₄, R₅₅, R₆₀, R₆₂, R₇₁=are independently C or absent;
[1624] R₂, R₅, R₇₀=are independently C, G or absent;
[1625] R₅₅, R₆₇=are independently C, G, U or absent;
[1626] R₃, R₄, R₁₁, R₁₇, R₂₁, R₃₀, R₄₂, R₄₅, R₄₉, R₅₃, R₆₁, R₆₄, R₆₆=are independently C, U or absent;
[1627] R₁, R₁₀, R₁₉, R₂₀, R₂₅, R₂₇, R₂₉, R₃₁, R₃₂, R₄₈, R₅₀, R₅₂, R₆₈=are independently G or absent;
[1628] R₇, R₁₂=are independently G, U or absent;
[1629] R₅, R₁₆, R₃₃, R₃₆, R₃₉, R₅₄=are independently U or absent;
[1630] [R₄₇]ₓ=N or absent;
[1631] wherein, e.g., x=1-271 (e.g., x=1-250, x=1-225, x=1-200, x=1-175, x=1-150, x=1-125, x=1-100, x=1-75, x=1-50, x=1-40, x=1-30, x=1-29, x=1-28, x=1-27, x=1-26, x=1-25, x=1-24, x=1-23, x=1-22, x=1-21, x=1-20, x=1-19, x=1-18, x=1-17, x=1-16, x=1-15, x=1-14, x=1-13, x=1-12, x=1-11, x=1-10, x=10-271, x=20-271, x=30-271, x=40-271, x=50-271, x=60-271, x=70-271, x=80-271, x=100-271, x=125-271, x=150-271, x=175-271, x=200-271, x=225-271, x=1, x=2, x=3, x=4, x=5, x=6, x=7, x=8, x=9, x=10, x=11, x=12, x=13, x=14, x=15, x=16, x=17, x=18, x=19, x=20, x=21, x=22, x=23, x=24, x=25, x=26, x=27, x=28, x=29, x=30, x=40, x=50, x=60, x=70, x=80, x=90, x=100, x=110, x=125, x=150, x=175, x=200, x=225, x=250, or x=271), provided that the TREM has one or both of the following properties: no more than 15% of the residues are N; or no more than 20 residues are absent.

### Methionine TREM Consensus Sequence

[1632] In an embodiment, a TREM disclosed herein comprises the sequence of Formula I MET (SEQ ID NO: 592),
[1633] R₀-R₁-R₂-R₃-R₄-R₅-R₆-R₇-R₈-R₉-R₁₀-R₁₁-R₁₂-R₁₃-R₁₄-R₁₅-R₁₆-R₁₇-R₁₈-R₁₉-R₂₀-R₂₁-R₂₂-R₂₃-R₂₄-R₂₅-R₂₆-R₂₇-R₂₈-R₂₉-R₃₀-R₃₁-R₃₂-R₃₃-R₃₄-R₃₅-R₃₆-R₃₇-R₃₈-R₃₉-R₄₀-R₄₁-R₄₂-R₄₃-R₄₄-R₄₅-R₄₆-[R₄₇]ₓ-R₄₈-R₄₉-R₅₀-R₅₁-R₅₂-R₅₃-R₅₄-R₅₅-R₅₆-R₅₇-R₅₈-R₅₉-R₆₀-R₆₁-R₆₂-R₆₃-R₆₄-R₆₅-R₆₆-R₆₇-R₆₈-R₆₉-R₇₀-R₇₁-R₇₂

[1634] wherein R is a ribonucleotide residue and the consensus for Met is:
[1635] R₀, R₂₃=are absent;
[1636] R₁₄, R₃₈, R₄₀, R₅₇=are independently A or absent;
[1637] R₆₀=A, C or absent;
[1638] R₃₃, R₄₈, R₇₀=are independently A, C, G or absent;
[1639] R₁, R₃, R₄, R₅, R₆, R₁₁, R₁₂, R₁₆, R₁₇, R₂₁, R₂₂, R₂₆, R₂₇, R₂₉, R₃₀, R₃₁, R₃₂, R₄₂, R₄₄, R₄₅, R₄₆, R₄₉, R₅₀, R₅₈, R₆₂, R₆₃, R₆₆, R₆₇, R₆₈, R₆₉, R₇₁=are independently N or absent;
[1640] R₁₈, R₃₅, R₄₁, R₅₉, R₆₅=are independently A, C, U or absent;
[1641] R₉, R₁₅, R₅₁=are independently A, G or absent;
[1642] R₇, R₂₄, R₂₅, R₃₄, R₅₃, R₅₆=are independently A, G, U or absent;
[1643] R₇₂=A, U or absent;
[1644] R₃₇=C or absent;
[1645] R₁₀, R₅₅=are independently C, G or absent;
[1646] R₂, R₁₃, R₂₈, R₄₃, R₆₄=are independently C, G, U or absent;
[1647] R₃₆, R₆₁=are independently C, U or absent;
[1648] R₁₉, R₂₀, R₅₂=are independently G or absent;
[1649] R₈, R₃₉, R₅₄=are independently U or absent;
[1650] [R₄₇]ₓ=N or absent;
[1651] wherein, e.g., x=1-271 (e.g., x=1-250, x=1-225, x=1-200, x=1-175, x=1-150, x=1-125, x=1-100, x=1-75, x=1-50, x=1-40, x=1-30, x=1-29, x=1-28, x=1-27, x=1-26, x=1-25, x=1-24, x=1-23, x=1-22, x=1-21, x=1-20, x=1-19, x=1-18, x=1-17, x=1-16, x=1-15, x=1-14, x=1-13, x=1-12, x=1-11, x=1-10, x=10-271, x=20-271, x=30-271, x=40-271, x=50-271, x=60-271, x=70-271, x=80-271, x=100-271, x=125-271, x=150-271, x=175-271, x=200-271, x=225-271, x=1, x=2, x=3, x=4, x=5, x=6, x=7, x=8, x=9, x=10, x=11, x=12, x=13, x=14, x=15, x=16, x=17, x=18, x=19, x=20, x=21, x=22, x=23, x=24, x=25, x=26, x=27, x=28, x=29, x=30, x=40, x=50, x=60, x=70, x=80, x=90, x=100, x=110, x=125, x=150, x=175, x=200, x=225, x=250, or x=271), provided that the TREM has one or both of the following properties: no more than 15% of the residues are N; or no more than 20 residues are absent.

[1652] In an embodiment, a TREM disclosed herein comprises the sequence of Formula II MET (SEQ ID NO: 593),
[1653] R₀-R₁-R₂-R₃-R₄-R₅-R₆-R₇-R₈-R₉-R₁₀-R₁₁-R₁₂-R₁₃-R₁₄-R₁₅-R₁₆-R₁₇-R₁₈-R₁₉-R₂₀-R₂₁-R₂₂-R₂₃-R₂₄-R₂₅-R₂₆-R₂₇-R₂₈-R₂₉-R₃₀-R₃₁-R₃₂-R₃₃-R₃₄-R₃₅-R₃₆-R₃₇-R₃₈-R₃₉-R₄₀-R₄₁-R₄₂-R₄₃-R₄₄-R₄₅-R₄₆-[R₄₇]ₓ-R₄₈-R₄₉-R₅₀-R₅₁-R₅₂-R₅₃-R₅₄-R₅₅-R₅₆-R₅₇-R₅₈-R₅₉-R₆₀-R₆₁-R₆₂-R₆₃-R₆₄-R₆₅-R₆₆-R₆₇-R₆₈-R₆₉-R₇₀-R₇₁-R₇₂

[1654] wherein R is a ribonucleotide residue and the consensus for Met is:
[1655] R₀, R₁₈, R₂₂, R₂₃=are absent
[1656] R₁₄, R₂₄, R₃₈, R₄₀, R₄₁, R₅₇, R₇₂=are independently A or absent;
[1657] R₅₉, R₆₀, R₆₂, R₆₅=are independently A, C or absent;
[1658] R₆, R₄₅, R₆₇=are independently A, C, G or absent;
[1659] R₄=N or absent;
[1660] R₂₁, R₄₂=are independently A, C, U or absent;
[1661] R₁, R₉, R₂₇, R₂₉, R₃₂, R₄₆, R₅₁=are independently A, G or absent;
[1662] R₁₇, R₄₉, R₅₃, R₅₆, R₅₅=are independently A, G, U or absent;
[1663] R₆₃=A, U or absent;
[1664] R₃, R₁₃, R₃₇=are independently C or absent;
[1665] R₄₈, R₅₅, R₆₄, R₇₀=are independently C, G or absent;
[1666] R₂, R₅, R₆₆, R₆₈=are independently C, G, U or absent;
[1667] R₁₁, R₁₆, R₂₆, R₂₈, R₃₀, R₃₁, R₃₅, R₃₆, R₄₃, R₄₄, R₆₁, R₇₁=are independently C, U or absent;
[1668] R₁₀, R₁₂, R₁₅, R₁₉, R₂₀, R₂₅, R₃₃, R₅₂, R₆₉=are independently G or absent;
[1669] R₇, R₃₄, R₅₀=are independently G, U or absent;
[1670] R₈, R₃₉, R₅₄=are independently U or absent;
[1671] [R₄₇]ₓ=N or absent;
[1672] wherein, e.g., x=1-271 (e.g., x=1-250, x=1-225, x=1-200, x=1-175, x=1-150, x=1-125, x=1-100, x=1-75, x=1-50, x=1-40, x=1-30, x=1-29, x=1-28, x=1-27, x=1-26, x=1-25, x=1-24, x=1-23, x=1-22, x=1-21, x=1-20, x=1-19, x=1-18, x=1-17, x=1-16, x=1-15, x=1-14, x=1-13, x=1-12, x=1-11, x=1-10, x=10-271, x=20-271, x=30-271, x=40-271, x=50-271, x=60-271, x=70-271, x=80-271, x=100-271, x=125-271, x=150-271, x=175-271, x=200-271, x=225-271, x=1, x=2, x=3, x=4, x=5, x=6, x=7, x=8, x=9, x=10, x=11, x=12, x=13, x=14, x=15, x=16, x=17, x=18, x=19, x=20, x=21, x=22, x=23, x=24, x=25, x=26, x=27, x=28, x=29, x=30, x=40, x=50, x=60, x=70, x=80, x=90, x=100, x=110, x=125, x=150, x=175, x=200, x=225, x=250, or x=271), provided that the TREM has one or both of the following properties: no more than 15% of the residues are N; or no more than 20 residues are absent.

[1673] In an embodiment, a TREM disclosed herein comprises the sequence of Formula III MET (SEQ ID NO: 594),
[1674] R₀-R₁-R₂-R₃-R₄-R₅-R₆-R₇-R₈-R₉-R₁₀-R₁₁-R₁₂-R₁₃-R₁₄-R₁₅-R₁₆-R₁₇-R₁₈-R₁₉-R₂₀-R₂₁-R₂₂-R₂₃-R₂₄-R₂₅-R₂₆-R₂₇-R₂₈-R₂₉-R₃₀-R₃₁-R₃₂-R₃₃-R₃₄-R₃₅-R₃₆-R₃₇-R₃₈-R₃₉-R₄₀-R₄₁-R₄₂-R₄₃-R₄₄-R₄₅-R₄₆-[R₄₇]ₓ-R₄₈-R₄₉-R₅₀-R₅₁-R₅₂-R₅₃-R₅₄-R₅₅-R₅₆-R₅₇-R₅₈-R₅₉-R₆₀-R₆₁-R₆₂-R₆₃-R₆₄-R₆₅-R₆₆-R₆₇-R₆₈-R₆₉-R₇₀-R₇₁-R₇₂

[1675] wherein R is a ribonucleotide residue and the consensus for Met is:
[1676] R₀, R₁₈, R₂₂, R₂₃=are absent
[1677] R₁₄, R₂₄, R₃₈, R₄₀, R₄₁, R₅₇, R₇₂=are independently A or absent;
[1678] R₅₉, R₆₂, R₆₅=are independently A, C or absent;
[1679] R₆, R₆₇=are independently A, C, G or absent;
[1680] R₄, R₂₁=are independently A, C, U or absent;
[1681] R₁, R₉, R₂₇, R₂₉, R₃₂, R₄₅, R₄₆, R₅₁=are independently A, G or absent;
[1682] R₁₇, R₅₆, R₅₅=are independently A, G, U or absent;
[1683] R₄₉, R₅₃, R₆₃=are independently A, U or absent;
[1684] R₃, R₁₃, R₂₆, R₃₇, R₄₃, R₆₀=are independently C or absent;
[1685] R₂, R₄₈, R₅₅, R₆₄, R₇₀=are independently C, G or absent;
[1686] R₅, R₆₆=are independently C, G, U or absent;
[1687] R₁₁, R₁₆, R₂₈, R₃₀, R₃₁, R₃₅, R₃₆, R₄₂, R₄₄, R₆₁, R₇₁=are independently C, U or absent;
[1688] R₁₀, R₁₂, R₁₅, R₁₉, R₂₀, R₂₅, R₃₃, R₅₂, R₆₉=are independently G or absent;
[1689] R₇, R₃₄, R₅₀, R₆₈=are independently G, U or absent;
[1690] R₈, R₃₉, R₅₄=are independently U or absent;
[1691] [R₄₇]ₓ=N or absent;
[1692] wherein, e.g., x=1-271 (e.g., x=1-250, x=1-225, x=1-200, x=1-175, x=1-150, x=1-125, x=1-100, x=1-75, x=1-50, x=1-40, x=1-30, x=1-29, x=1-28, x=1-27, x=1-26, x=1-25, x=1-24, x=1-23, x=1-22, x=1-21, x=1-20, x=1-19, x=1-18, x=1-17, x=1-16, x=1-15, x=1-14, x=1-13, x=1-12, x=1-11, x=1-10, x=10-271, x=20-271, x=30-271, x=40-271, x=50-271, x=60-271, x=70-271, x=80-271, x=100-271, x=125-271, x=150-271, x=175-271, x=200-271, x=225-271, x=1, x=2, x=3, x=4, x=5, x=6, x=7, x=8, x=9, x=10, x=11, x=12, x=13, x=14, x=15, x=16, x=17, x=18, x=19, x=20, x=21, x=22, x=23, x=24, x=25, x=26, x=27, x=28, x=29, x=30, x=40, x=50, x=60, x=70, x=80, x=90, x=100, x=110, x=125, x=150, x=175, x=200, x=225, x=250, or x=271), provided that the TREM has one or both of the following properties: no more than 15% of the residues are N; or no more than 20 residues are absent.

### Leucine TREM Consensus Sequence

[1693] In an embodiment, a TREM disclosed herein comprises the sequence of Formula I LEU (SEQ ID NO: 595),
[1694] R₀-R₁-R₂-R₃-R₄-R₅-R₆-R₇-R₈-R₉-R₁₀-R₁₁-R₁₂-R₁₃-R₁₄-R₁₅-R₁₆-R₁₇-R₁₈-R₁₉-R₂₀-R₂₁-R₂₂-R₂₃-R₂₄-R₂₅-R₂₆-R₂₇-R₂₈-R₂₉-R₃₀-R₃₁-R₃₂-R₃₃-R₃₄-R₃₅-R₃₆-R₃₇-R₃₈-R₃₉-R₄₀-R₄₁-R₄₂-R₄₃-R₄₄-R₄₅-R₄₆-[R₄₇]ₓ-R₄₈-R₄₉-R₅₀-R₅₁-R₅₂-R₅₃-R₅₄-R₅₅-R₅₆-R₅₇-R₅₈-R₅₉-R₆₀-R₆₁-R₆₂-R₆₃-R₆₄-R₆₅-R₆₆-R₆₇-R₆₈-R₆₉-R₇₀-R₇₁-R₇₂

[1695] wherein R is a ribonucleotide residue and the consensus for Leu is:
[1696] R₀=absent;
[1697] R₃₈, R₅₇=are independently A or absent;
[1698] R₆₀=A, C or absent;
[1699] R₁, R₁₃, R₂₇, R₄₈, R₅₁, R₅₆=are independently A, C, G or absent;
[1700] R₂, R₃, R₄, R₅, R₆, R₇, R₀, R₁₀, R₁₁, R₁₂, R₁₆, R₂₃, R₂₆, R₂₈, R₂₉, R₃₀, R₃₁, R₃₂, R₃₃, R₃₄, R₃₇, R₄₁, R₄₂, R₄₃, R₄₄, R₄₅, R₄₆, R₄₉, R₅₀, R₅₈, R₆₂, R₆₃, R₆₅, R₆₆, R₆₇, R₆₈, R₆₉, R₇₀=are independently N or absent;
[1701] R₁₇, R₁₈, R₂₁, R₂₂, R₂₅, R₃₅, R₅₅=are independently A, C, U or absent;
[1702] R₁₄, R₁₅, R₃₉, R₇₂=are independently A, G or absent;
[1703] R₂₄, R₄₀=are independently A, G, U or absent;
[1704] R₅₂, R₆₁, R₆₄, R₇₁=are independently C, G, U or absent;
[1705] R₃₆, R₅₃, R₅₉=are independently C, U or absent;
[1706] R₁₉=G or absent;
[1707] R₂₀=G, U or absent;
[1708] R₅, R₅₄=are independently U or absent;
[1709] [R₄₇]ₓ=N or absent;
[1710] wherein, e.g., x=1-271 (e.g., x=1-250, x=1-225, x=1-200, x=1-175, x=1-150, x=1-125, x=1-100, x=1-75, x=1-50, x=1-40, x=1-30, x=1-29, x=1-28, x=1-27, x=1-26, x=1-25, x=1-24, x=1-23, x=1-22, x=1-21, x=1-20, x=1-19, x=1-18, x=1-17, x=1-16, x=1-15, x=1-14, x=1-13, x=1-12, x=1-11, x=1-10, x=10-271, x=20-271, x=30-271, x=40-271, x=50-271, x=60-271, x=70-271, x=80-271, x=100-271, x=125-271, x=150-271, x=175-271, x=200-271, x=225-271, x=1, x=2, x=3, x=4, x=5, x=6, x=7, x=8, x=9, x=10, x=11, x=12, x=13, x=14, x=15, x=16, x=17, x=18, x=19, x=20, x=21, x=22, x=23, x=24, x=25, x=26, x=27, x=28, x=29, x=30, x=40, x=50, x=60, x=70, x=80, x=90, x=100, x=110, x=125, x=150, x=175, x=200, x=225, x=250, or x=271), provided that the TREM has one or both of the following properties: no more than 15% of the residues are N; or no more than 20 residues are absent.

[1711] In an embodiment, a TREM disclosed herein comprises the sequence of Formula II LEU (SEQ ID NO: 596),
[1712] R₀-R₁-R₂-R₃-R₄-R₅-R₆-R₇-R₈-R₉-R₁₀-R₁₁-R₁₂-R₁₃-R₁₄-R₁₅-R₁₆-R₁₇-R₁₈-R₁₉-R₂₀-R₂₁-R₂₂-R₂₃-R₂₄-R₂₅-R₂₆-R₂₇-R₂₈-R₂₉-R₃₀-R₃₁-R₃₂-R₃₃-R₃₄-R₃₅-R₃₆-R₃₇-R₃₈-R₃₉-R₄₀-R₄₁-R₄₂-R₄₃-R₄₄-R₄₅-R₄₆-[R₄₇]ₓ-R₄₈-R₄₉-R₅₀-R₅₁-R₅₂-R₅₃-R₅₄-R₅₅-R₅₆-R₅₇-R₅₈-R₅₉-R₆₀-R₆₁-R₆₂-R₆₃-R₆₄-R₆₅-R₆₆-R₆₇-R₆₈-R₆₉-R₇₀-R₇₁-R₇₂

[1713] wherein R is a ribonucleotide residue and the consensus for Leu is:
[1714] R₀=absent
[1715] R₃₈, R₅₇, R₇₂=are independently A or absent;
[1716] R₆₀=A, C or absent;
[1717] R₄, R₅, R₄₈, R so, R₅₆, R₆₉=are independently A, C, G or absent;
[1718] R₆, R₃₃, R₄₁, R₄₃, R₄₆, R₄₉, R₅₈, R₆₃, R₆₆, R₇₀=are independently N or absent;
[1719] R₁₁, R₁₂, R₁₇, R₂₁, R₂₂, R₂₈, R₃₁, R₃₇, R₄₄, R₅₅=are independently A, C, U or absent;
[1720] R₁, R₉, R₁₄, R₁₅, R₂₄, R₂₇, R₃₄, R₃₉=are independently A, G or absent;
[1721] R₇, R₂₉, R₃₂, R₄₀, R₄₅=are independently A, G, U or absent;
[1722] R₂₅=A, U or absent;
[1723] R₁₃=C, G or absent;
[1724] R₂, R₃, R₁₆, R₂₆, R₃₀, R₅₂, R₆₂, R₆₄, R₆₅, R₆₇, R₆₈=are independently C, G, U or absent;
[1725] R₁₈, R₃₅, R₄₂, R₅₃, R₅₉, R₆₁, R₇₁=are independently C, U or absent;
[1726] R₁₉, R₅₁=are independently G or absent;
[1727] R₁₀, R₂₀=are independently G, U or absent;
[1728] R₈, R₂₃, R₃₆, R₅₄=are independently U or absent;
[1729] [R₄₇]ₓ=N or absent;
[1730] wherein, e.g., x=1-271 (e.g., x=1-250, x=1-225, x=1-200, x=1-175, x=1-150, x=1-125, x=1-100, x=1-75, x=1-50, x=1-40, x=1-30, x=1-29, x=1-28, x=1-27, x=1-26, x=1-25, x=1-24, x=1-23, x=1-22, x=1-21, x=1-20, x=1-19, x=1-18, x=1-17, x=1-16, x=1-15, x=1-14, x=1-13, x=1-12, x=1-11, x=1-10, x=10-271, x=20-271, x=30-271, x=40-271, x=50-271, x=60-271, x=70-271, x=80-271, x=100-271, x=125-271, x=150-271, x=175-271, x=200-271, x=225-271, x=1, x=2, x=3, x=4, x=5, x=6, x=7, x=8, x=9, x=10, x=11, x=12, x=13, x=14, x=15, x=16, x=17, x=18, x=19, x=20, x=21, x=22, x=23, x=24, x=25, x=26, x=27, x=28, x=29, x=30, x=40, x=50, x=60, x=70, x=80, x=90, x=100, x=110, x=125, x=150, x=175, x=200, x=225, x=250, or x=271), provided that the TREM has one or both of the following properties: no more than 15% of the residues are N; or no more than 20 residues are absent.

[1731] In an embodiment, a TREM disclosed herein comprises the sequence of Formula III LEU (SEQ ID NO: 597),
[1732] R₀-R₁-R₂-R₃-R₄-R₅-R₆-R₇-R₈-R₉-R₁₀-R₁₁-R₁₂-R₁₃-R₁₄-R₁₅-R₁₆-R₁₇-R₁₈-R₁₉-R₂₀-R₂₁-R₂₂-R₂₃-R₂₄-R₂₅-R₂₆-R₂₇-R₂₈-R₂₉-R₃₀-R₃₁-R₃₂-R₃₃-R₃₄-R₃₅-R₃₆-R₃₇-R₃₈-R₃₉-R₄₀-R₄₁-R₄₂-R₄₃-R₄₄-R₄₅-R₄₆-[R₄₇]ₓ-R₄₈-R₄₉-R₅₀-R₅₁-R₅₂-R₅₃-R₅₄-R₅₅-R₅₆-R₅₇-R₅₈-R₅₉-R₆₀-R₆₁-R₆₂-R₆₃-R₆₄-R₆₅-R₆₆-R₆₇-R₆₈-R₆₉-R₇₀-R₇₁-R₇₂

[1733] wherein R is a ribonucleotide residue and the consensus for Leu is:
[1734] R₀=absent
[1735] R₃₈, R₅₇, R₇₂=are independently A or absent;
[1736] R₆₀=A, C or absent;
[1737] R₄, R₅, R₄₈, R so, R₅₆, R₅₈, R₆₉=are independently A, C, G or absent;
[1738] R₆, R₃₃, R₄₃, R₄₆, R₄₉, R₆₃, R₆₆, R₇₀=are independently N or absent;
[1739] R₁₁, R₁₂, R₁₇, R₂₁, R₂₂, R₂₈, R₃₁, R₃₇, R₄₁, R₄₄, R₅₅=are independently A, C, U or absent;
[1740] R₁, R₉, R₁₄, R₁₅, R₂₄, R₂₇, R₃₄, R₃₉=are independently A, G or absent;
[1741] R₇, R₂₉, R₃₂, R₄₀, R₄₅=are independently A, G, U or absent;
[1742] R₂₅=A, U or absent;
[1743] R₁₃=C, G or absent;
[1744] R₂, R₃, R₁₆, R₃₀, R₅₂, R₆₂, R₆₄, R₆₇, R₆₈=are independently C, G, U or absent;
[1745] R₁₈, R₃₅, R₄₂, R₅₃, R₅₉, R₆₁, R₆₅, R₇₁=are independently C, U or absent;
[1746] R₁₉, R₅₁=are independently G or absent;
[1747] R₁₀, R₂₀, R₂₆=are independently G, U or absent;
[1748] R₈, R₂₃, R₃₆, R₅₄=are independently U or absent;
[1749] [R₄₇]ₓ=N or absent;
[1750] wherein, e.g., x=1-271 (e.g., x=1-250, x=1-225, x=1-200, x=1-175, x=1-150, x=1-125, x=1-100, x=1-75, x=1-50, x=1-40, x=1-30, x=1-29, x=1-28, x=1-27, x=1-26, x=1-25, x=1-24, x=1-23, x=1-22, x=1-21, x=1-20, x=1-19, x=1-18, x=1-17, x=1-16, x=1-15, x=1-14, x=1-13, x=1-12, x=1-11, x=1-10, x=10-271, x=20-271, x=30-271, x=40-271, x=50-271, x=60-271, x=70-271, x=80-271, x=100-271, x=125-271, x=150-271, x=175-271, x=200-271, x=225-271, x=1, x=2, x=3, x=4, x=5, x=6, x=7, x=8, x=9, x=10, x=11, x=12, x=13, x=14, x=15, x=16, x=17, x=18, x=19, x=20, x=21, x=22, x=23, x=24, x=25, x=26, x=27, x=28, x=29, x=30, x=40, x=50, x=60, x=70, x=80, x=90, x=100, x=110, x=125, x=150, x=175, x=200, x=225, x=250, or x=271), provided that the TREM has one or both of the following properties: no more than 15% of the residues are N; or no more than 20 residues are absent.

### Lysine TREM Consensus Sequence

[1751] In an embodiment, a TREM disclosed herein comprises the sequence of Formula I LYS (SEQ ID NO: 598),
[1752] R₀-R₁-R₂-R₃-R₄-R₅-R₆-R₇-R₈-R₉-R₁₀-R₁₁-R₁₂-R₁₃-R₁₄-R₁₅-R₁₆-R₁₇-R₁₈-R₁₉-R₂₀-R₂₁-R₂₂-R₂₃-R₂₄-R₂₅-R₂₆-R₂₇-R₂₈-R₂₉-R₃₀-R₃₁-R₃₂-R₃₃-R₃₄-R₃₅-R₃₆-R₃₇-R₃₈-R₃₉-R₄₀-R₄₁-R₄₂-R₄₃-R₄₄-R₄₅-R₄₆-[R₄₇]ₓ-R₄₈-R₄₉-R₅₀-R₅₁-R₅₂-R₅₃-R₅₄-R₅₅-R₅₆-R₅₇-R₅₈-R₅₉-R₆₀-R₆₁-R₆₂-R₆₃-R₆₄-R₆₅-R₆₆-R₆₇-R₆₈-R₆₉-R₇₀-R₇₁-R₇₂

[1753] wherein R is a ribonucleotide residue and the consensus for Lys is:
[1754] R₀=absent
[1755] R₁₄=A or absent;
[1756] R₄₀, R₄₁=are independently A, C or absent;
[1757] R₃₄, R₄₃, R₅₁=are independently A, C, G or absent;
[1758] R₁, R₂, R₃, R₄, R₅, R₆, R₇, R₁₁, R₁₂, R₁₆, R₂₁, R₂₆, R₃₀, R₃₁, R₃₂, R₄₄, R₄₅, R₄₆, R₄₈, R₄₉, R so, R₅₈, R₆₂, R₆₃, R₆₅, R₆₆, R₆₇, R₆₈, R₆₉, R₇₀=are independently N or absent;
[1759] R₁₃, R₁₇, R₅₉, R₇₁=are independently A, C, U or absent;
[1760] R₉, R₁₅, R₁₉, R₂₀, R₂₅, R₂₇, R₅₂, R₅₆=are independently A, G or absent;
[1761] R₂₄, R₂₉, R₇₂=are independently A, G, U or absent;
[1762] R₁₈, R₅₇=are independently A, U or absent;
[1763] R₁₀, R₃₃=are independently C, G or absent;
[1764] R₄₂, R₆₁, R₆₄=are independently C, G, U or absent;
[1765] R₂₈, R₃₅, R₃₆, R₃₇, R₅₃, R₅₅, R₆₀=are independently C, U or absent;
[1766] R₈, R₂₂, R₂₃, R₃₈, R₃₉, R₅₄=are independently U or absent;
[1767] [R₄₇]ₓ=N or absent;
[1768] wherein, e.g., x=1-271 (e.g., x=1-250, x=1-225, x=1-200, x=1-175, x=1-150, x=1-125, x=1-100, x=1-75, x=1-50, x=1-40, x=1-30, x=1-29, x=1-28, x=1-27, x=1-26, x=1-25, x=1-24, x=1-23, x=1-22, x=1-21, x=1-20, x=1-19, x=1-18, x=1-17, x=1-16, x=1-15, x=1-14, x=1-13, x=1-12, x=1-11, x=1-10, x=10-271, x=20-271, x=30-271, x=40-271, x=50-271, x=60-271, x=70-271, x=80-271, x=100-271, x=125-271, x=150-271, x=175-271, x=200-271, x=225-271, x=1, x=2, x=3, x=4, x=5, x=6, x=7, x=8, x=9, x=10, x=11, x=12, x=13, x=14, x=15, x=16, x=17, x=18, x=19, x=20, x=21, x=22, x=23, x=24, x=25, x=26, x=27, x=28, x=29, x=30, x=40, x=50, x=60, x=70, x=80, x=90, x=100, x=110, x=125, x=150, x=175, x=200, x=225, x=250, or x=271), provided that the TREM has one or both of the following properties: no more than 15% of the residues are N; or no more than 20 residues are absent.

[1769] In an embodiment, a TREM disclosed herein comprises the sequence of Formula II LYS (SEQ ID NO: 599),
[1770] R₀-R₁-R₂-R₃-R₄-R₅-R₆-R₇-R₈-R₉-R₁₀-R₁₁-R₁₂-R₁₃-R₁₄-R₁₅-R₁₆-R₁₇-R₁₈-R₁₉-R₂₀-R₂₁-R₂₂-R₂₃-R₂₄-R₂₅-R₂₆-R₂₇-R₂₈-R₂₉-R₃₀-R₃₁-R₃₂-R₃₃-R₃₄-R₃₅-R₃₆-R₃₇-R₃₈-R₃₉-R₄₀-R₄₁-R₄₂-R₄₃-R₄₄-R₄₅-R₄₆-[R₄₇]ₓ-R₄₈-R₄₉-R₅₀-R₅₁-R₅₂-R₅₃-R₅₄-R₅₅-R₅₆-R₅₇-R₅₈-R₅₉-R₆₀-R₆₁-R₆₂-R₆₃-R₆₄-R₆₅-R₆₆-R₆₇-R₆₈-R₆₉-R₇₀-R₇₁-R₇₂

[1771] wherein R is a ribonucleotide residue and the consensus for Lys is:
[1772] R₀, R₁₈, R₂₃=are absent
[1773] R₁₄=A or absent;
[1774] R₄₀, R₄₁, R₄₃=are independently A, C or absent;
[1775] R₃, R₇=are independently A, C, G or absent;
[1776] R₁, R₆, R₁₁, R₃₁, R₄₅, R₄₈, R₄₉, R₆₃, R₆₅, R₆₆, R₆₈=are independently N or absent;
[1777] R₂, R₁₂, R₁₃, R₁₇, R₄₄, R₆₇, R₇₁=are independently A, C, U or absent;
[1778] R₉, R₁₅, R₁₉, R₂₀, R₂₅, R₂₇, R₃₄, R₅₀, R₅₂, R₅₆, R₇₀, R₇₂=are independently A, G or absent;
[1779] R₅, R₂₄, R₂₆, R₂₉, R₃₂, R₄₆, R₆₉=are independently A, G, U or absent;
[1780] R₅₇=A, U or absent;
[1781] R₁₀, R₆₁=are independently C, G or absent;
[1782] R₄, R₁₆, R₂₁, R₃₀, R₅₈, R₆₄=are independently C, G, U or absent;
[1783] R₂₈, R₃₅, R₃₆, R₃₇, R₄₂, R₅₃, R₅₅, R₅₉, R₆₀, R₆₂=are independently C, U or absent;
[1784] R₃₃, R₅₁=are independently G or absent;
[1785] R₈=G, U or absent;
[1786] R₂₂, R₃₈, R₃₉, R₅₄=are independently U or absent;
[1787] [R₄₇]ₓ=N or absent;
[1788] wherein, e.g., x=1-271 (e.g., x=1-250, x=1-225, x=1-200, x=1-175, x=1-150, x=1-125, x=1-100, x=1-75, x=1-50, x=1-40, x=1-30, x=1-29, x=1-28, x=1-27, x=1-26, x=1-25, x=1-24, x=1-23, x=1-22, x=1-21, x=1-20, x=1-19, x=1-18, x=1-17, x=1-16, x=1-15, x=1-14, x=1-13, x=1-12, x=1-11, x=1-10, x=10-271, x=20-271, x=30-271, x=40-271, x=50-271, x=60-271, x=70-271, x=80-271, x=100-271, x=125-271, x=150-271, x=175-271, x=200-271, x=225-271, x=1, x=2, x=3, x=4, x=5, x=6, x=7, x=8, x=9, x=10, x=11, x=12, x=13, x=14, x=15, x=16, x=17, x=18, x=19, x=20, x=21, x=22, x=23, x=24, x=25, x=26, x=27, x=28, x=29, x=30, x=40, x=50, x=60, x=70, x=80, x=90, x=100, x=110, x=125, x=150, x=175, x=200, x=225, x=250, or x=271), provided that the TREM has one or both of the following properties: no more than 15% of the residues are N; or no more than 20 residues are absent.

[1789] In an embodiment, a TREM disclosed herein comprises the sequence of Formula III LYS (SEQ ID NO: 600),
[1790] R₀-R₁-R₂-R₃-R₄-R₅-R₆-R₇-R₈-R₉-R₁₀-R₁₁-R₁₂-R₁₃-R₁₄-R₁₅-R₁₆-R₁₇-R₁₈-R₁₉-R₂₀-R₂₁-R₂₂-R₂₃-R₂₄-R₂₅-R₂₆-R₂₇-R₂₈-R₂₉-R₃₀-R₃₁-R₃₂-R₃₃-R₃₄-R₃₅-R₃₆-R₃₇-R₃₈-R₃₉-R₄₀-R₄₁-R₄₂-R₄₃-R₄₄-R₄₅-R₄₆-[R₄₇]ₓ-R₄₈-R₄₉-R₅₀-R₅₁-R₅₂-R₅₃-R₅₄-R₅₅-R₅₆-R₅₇-R₅₈-R₅₉-R₆₀-R₆₁-R₆₂-R₆₃-R₆₄-R₆₅-R₆₆-R₆₇-R₆₈-R₆₉-R₇₀-R₇₁-R₇₂

[1791] wherein R is a ribonucleotide residue and the consensus for Lys is:
[1792] R₀, R₁₈, R₂₃=absent
[1793] R₉, R₁₄, R₃₄, R₄₁=are independently A or absent;
[1794] R₄₀=A, C or absent;
[1795] R₁, R₃, R₇, R₃₁=are independently A, C, G or absent;
[1796] R₄₈, R₆₅, R₆₈=are independently N or absent;
[1797] R₂, R₁₃, R₁₇, R₄₄, R₆₃, R₆₆=are independently A, C, U or absent;
[1798] R₅, R₁₅, R₁₉, R₂₀, R₂₅, R₂₇, R₂₉, R so, R $2, R₅₆, R₇₀, R₇₂=are independently A, G or absent;
[1799] R₆, R₂₄, R₃₂, R₄₉=are independently A, G, U or absent;
[1800] R₁₂, R₂₆, R₄₆, R₅₇=are independently A, U or absent;
[1801] R₁₁, R₂₈, R₃₅, R₄₃=are independently C or absent;
[1802] R₁₀, R₄₅, R₆₁=are independently C, G or absent;
[1803] R₄, R₂₁, R₆₄=are independently C, G, U or absent;
[1804] R₃₇, R₅₃, R₅₅, R₅₉, R₆₀, R₆₂, R₆₇, R₇₁=are independently C, U or absent;
[1805] R₃₃, R₅₁=are independently G or absent;
[1806] R₈, R₃₀, R₅₅, R₆₉=are independently G, U or absent;
[1807] R₁₆, R₂₂, R₃₆, R₃₈, R₃₉, R₄₂, R₅₄=are independently U or absent;
[1808] [R₄₇]ₓ=N or absent;
[1809] wherein, e.g., x=1-271 (e.g., x=1-250, x=1-225, x=1-200, x=1-175, x=1-150, x=1-125, x=1-100, x=1-75, x=1-50, x=1-40, x=1-30, x=1-29, x=1-28, x=1-27, x=1-26, x=1-25, x=1-24, x=1-23, x=1-22, x=1-21, x=1-20, x=1-19, x=1-18, x=1-17, x=1-16, x=1-15, x=1-14, x=1-13, x=1-12, x=1-11, x=1-10, x=10-271, x=20-271, x=30-271, x=40-271, x=50-271, x=60-271, x=70-271, x=80-271, x=100-271, x=125-271, x=150-271, x=175-271, x=200-271, x=225-271, x=1, x=2, x=3, x=4, x=5, x=6, x=7, x=8, x=9, x=10, x=11, x=12, x=13, x=14, x=15, x=16, x=17, x=18, x=19, x=20, x=21, x=22, x=23, x=24, x=25, x=26, x=27, x=28, x=29, x=30, x=40, x=50, x=60, x=70, x=80, x=90, x=100, x=110, x=125, x=150, x=175, x=200, x=225, x=250, or x=271), provided that the TREM has one or both of the following properties: no more than 15% of the residues are N; or no more than 20 residues are absent.

### Phenylalanine TREM Consensus Sequence

[1810] In an embodiment, a TREM disclosed herein comprises the sequence of Formula I PHE (SEQ ID NO: 601),
[1811] R₀-R₁-R₂-R₃-R₄-R₅-R₆-R₇-R₈-R₉-R₁₀-R₁₁-R₁₂-R₁₃-R₁₄-R₁₅-R₁₆-R₁₇-R₁₈-R₁₉-R₂₀-R₂₁-R₂₂-R₂₃-R₂₄-R₂₅-R₂₆-R₂₇-R₂₈-R₂₉-R₃₀-R₃₁-R₃₂-R₃₃-R₃₄-R₃₅-R₃₆-R₃₇-R₃₈-R₃₉-R₄₀-R₄₁-R₄₂-R₄₃-R₄₄-R₄₅-R₄₆-[R₄₇]ₓ-R₄₈-R₄₉-R₅₀-R₅₁-R₅₂-R₅₃-R₅₄-R₅₅-R₅₆-R₅₇-R₅₈-R₅₉-R₆₀-R₆₁-R₆₂-R₆₃-R₆₄-R₆₅-R₆₆-R₆₇-R₆₈-R₆₉-R₇₀-R₇₁-R₇₂

[1812] wherein R is a ribonucleotide residue and the consensus for Phe is:
[1813] R₀, R₂₃=are absent
[1814] R₉, R₁₄, R₃₈, R₃₉, R₅₇, R₇₂=are independently A or absent;
[1815] R₇₁=A, C or absent;
[1816] R₄₁, R₇₀=are independently A, C, G or absent;
[1817] R₄, R₅, R₆, R₃₀, R₃₁, R₃₂, R₃₄, R₄₂, R₄₄, R₄₅, R₄₆, R₄₈, R₄₉, R₅₈, R₆₂, R₆₃, R₆₆, R₆₇, R₆₈, R₆₉=are
[1818] independently N or absent;
[1819] R₁₆, R₆₁, R₆₅=are independently A, C, U or absent;
[1820] R₁₅, R₂₆, R₂₇, R₂₉, R₄₀, R₅₆=are independently A, G or absent;
[1821] R₇, R₅₁=are independently A, G, U or absent;
[1822] R₂₂, R₂₄=are independently A, U or absent;
[1823] R₅₅, R₆₀=are independently C or absent;
[1824] R₂, R₃, R₂₁, R₃₃, R₄₃, R₅₀, R₆₄=are independently C, G, U or absent;
[1825] R₁₁, R₁₂, R₁₃, R₁₇, R₂₈, R₃₅, R₃₆, R₅₉=are independently C, U or absent;
[1826] R₁₀, R₁₉, R₂₀, R₂₅, R₃₇, R₅₂=are independently G or absent;
[1827] R₁=G, U or absent;
[1828] R₈, R₁₈, R₅₃, R₅₄=are independently U or absent;
[1829] [R₄₇]ₓ=N or absent;
[1830] wherein, e.g., x=1-271 (e.g., x=1-250, x=1-225, x=1-200, x=1-175, x=1-150, x=1-125, x=1-100, x=1-75, x=1-50, x=1-40, x=1-30, x=1-29, x=1-28, x=1-27, x=1-26, x=1-25, x=1-24, x=1-23, x=1-22, x=1-21, x=1-20, x=1-19, x=1-18, x=1-17, x=1-16, x=1-15, x=1-14, x=1-13, x=1-12, x=1-11, x=1-10, x=10-271, x=20-271, x=30-271, x=40-271, x=50-271, x=60-271, x=70-271, x=80-271, x=100-271, x=125-271, x=150-271, x=175-271, x=200-271, x=225-271, x=1, x=2, x=3, x=4, x=5, x=6, x=7, x=8, x=9, x=10, x=11, x=12, x=13, x=14, x=15, x=16, x=17, x=18, x=19, x=20, x=21, x=22, x=23, x=24, x=25, x=26, x=27, x=28, x=29, x=30, x=40, x=50, x=60, x=70, x=80, x=90, x=100, x=110, x=125, x=150, x=175, x=200, x=225, x=250, or x=271), provided that the TREM has one or both of the following properties: no more than 15% of the residues are N; or no more than 20 residues are absent.

[1831] In an embodiment, a TREM disclosed herein comprises the sequence of Formula II PHE (SEQ ID NO: 602),
[1832] R₀-R₁-R₂-R₃-R₄-R₅-R₆-R₇-R₈-R₉-R₁₀-R₁₁-R₁₂-R₁₃-R₁₄-R₁₅-R₁₆-R₁₇-R₁₈-R₁₉-R₂₀-R₂₁-R₂₂-R₂₃-R₂₄-R₂₅-R₂₆-R₂₇-R₂₈-R₂₉-R₃₀-R₃₁-R₃₂-R₃₃-R₃₄-R₃₅-R₃₆-R₃₇-R₃₈-R₃₉-R₄₀-R₄₁-R₄₂-R₄₃-R₄₄-R₄₅-R₄₆-[R₄₇]ₓ-R₄₈-R₄₉-R₅₀-R₅₁-R₅₂-R₅₃-R₅₄-R₅₅-R₅₆-R₅₇-R₅₈-R₅₉-R₆₀-R₆₁-R₆₂-R₆₃-R₆₄-R₆₅-R₆₆-R₆₇-R₆₈-R₆₉-R₇₀-R₇₁-R₇₂

[1833] wherein R is a ribonucleotide residue and the consensus for Phe is:
[1834] R₀, R₁₈, R₂₃=absent
[1835] R₁₄, R₂₄, R₃₈, R₃₉, R₅₇, R₇₂=are independently A or absent;
[1836] R₄₆, R₇₁=are independently A, C or absent;
[1837] R₄, R₇₀=are independently A, C, G or absent;
[1838] R₄₅=A, C, U or absent;
[1839] R₆, R₇, R₁₅, R₂₆, R₂₇, R₃₂, R₃₄, R₄₀, R₄₁, R₅₆, R₆₉=are independently A, G or absent;
[1840] R₂₉=A, G, U or absent;
[1841] R₅, R₉, R₆₇=are independently A, U or absent;
[1842] R₃₅, R₄₉, R₅₅, R₆₀=are independently C or absent;
[1843] R₂₁, R₄₃, R₆₂=are independently C, G or absent;
[1844] R₂, R₃₃, R₆₈=are independently C, G, U or absent;
[1845] R₃, R₁₁, R₁₂, R₁₃, R₂₈, R₃₀, R₃₆, R₄₂, R₄₄, R₄₈, R₅₈, R₅₉, R₆₁, R₆₆=are independently C, U or absent;
[1846] R₁₀, R₁₉, R₂₀, R₂₅, R₃₇, R₅₁, R₅₂, R₆₃, R₆₄=are independently G or absent;
[1847] R₁, R₃₁, R₅₀=are independently G, U or absent;
[1848] R₈, R₁₆, R₁₇, R₂₂, R₅₃, R₅₄, R₆₅=are independently U or absent;
[1849] [R₄₇]ₓ=N or absent;
[1850] wherein, e.g., x=1-271 (e.g., x=1-250, x=1-225, x=1-200, x=1-175, x=1-150, x=1-125, x=1-100, x=1-75, x=1-50, x=1-40, x=1-30, x=1-29, x=1-28, x=1-27, x=1-26, x=1-25, x=1-24, x=1-23, x=1-22, x=1-21, x=1-20, x=1-19, x=1-18, x=1-17, x=1-16, x=1-15, x=1-14, x=1-13, x=1-12, x=1-11, x=1-10, x=10-271, x=20-271, x=30-271, x=40-271, x=50-271, x=60-271, x=70-271, x=80-271, x=100-271, x=125-271, x=150-271, x=175-271, x=200-271, x=225-271, x=1, x=2, x=3, x=4, x=5, x=6, x=7, x=8, x=9, x=10, x=11, x=12, x=13, x=14, x=15, x=16, x=17, x=18, x=19, x=20, x=21, x=22, x=23, x=24, x=25, x=26, x=27, x=28, x=29, x=30, x=40, x=50, x=60, x=70, x=80, x=90, x=100, x=110, x=125, x=150, x=175, x=200, x=225, x=250, or x=271), provided that the TREM has one or both of the following properties: no more than 15% of the residues are N; or no more than 20 residues are absent.

[1851] In an embodiment, a TREM disclosed herein comprises the sequence of Formula III PHE (SEQ ID NO: 603),
[1852] R₀-R₁-R₂-R₃-R₄-R₅-R₆-R₇-R₈-R₉-R₁₀-R₁₁-R₁₂-R₁₃-R₁₄-R₁₅-R₁₆-R₁₇-R₁₈-R₁₉-R₂₀-R₂₁-R₂₂-R₂₃-R₂₄-R₂₅-R₂₆-R₂₇-R₂₈-R₂₉-R₃₀-R₃₁-R₃₂-R₃₃-R₃₄-R₃₅-R₃₆-R₃₇-R₃₈-R₃₉-R₄₀-R₄₁-R₄₂-R₄₃-R₄₄-R₄₅-R₄₆-[R₄₇]ₓ-R₄₈-R₄₉-R₅₀-R₅₁-R₅₂-R₅₃-R₅₄-R₅₅-R₅₆-R₅₇-R₅₈-R₅₉-R₆₀-R₆₁-R₆₂-R₆₃-R₆₄-R₆₅-R₆₆-R₆₇-R₆₈-R₆₉-R₇₀-R₇₁-R₇₂

[1853] wherein R is a ribonucleotide residue and the consensus for Phe is:
[1854] R₀, R₁₈, R₂₂, R₂₃=absent
[1855] R₅, R₇, R₁₄, R₂₄, R₂₆, R₃₂, R₃₄, R₃₈, R₃₉, R₄₁, R₅₇, R₇₂=are independently A or absent;
[1856] R₄₆=A, C or absent;
[1857] R₇₀=A, C, G or absent;
[1858] R₄, R₆, R₁₅, R₅₆, R₆₉=are independently A, G or absent;
[1859] R₀, R₄₅=are independently A, U or absent;
[1860] R₂, R₁₁, R₁₃, R₃₅, R₄₃, R₄₉, R₅₅, R₆₀, R₆₈, R₇₁=are independently C or absent;
[1861] R₃₃=C, G or absent;
[1862] R₃, R₂₈, R₃₆, R₄₈, R₅₈, R₅₉, R₆₁=are independently C, U or absent;
[1863] R₁, R₁₀, R₁₉, R₂₀, R₂₁, R₂₅, R₂₇, R₂₉, R₃₇, R₄₀, R$1, R₅₂, R₆₂, R₆₃, R₆₄=are independently G or absent;
[1864] R₈, R₁₂, R₁₆, R₁₇, R₃₀, R₃₁, R₄₂, R₄₄, R₅₀, R₅₃, R₅₄, R₆₅, R₆₆, R₆₇=are independently U or absent;
[1865] [R₄₇]ₓ=N or absent;
[1866] wherein, e.g., x=1-271 (e.g., x=1-250, x=1-225, x=1-200, x=1-175, x=1-150, x=1-125, x=1-100, x=1-75, x=1-50, x=1-40, x=1-30, x=1-29, x=1-28, x=1-27, x=1-26, x=1-25, x=1-24, x=1-23, x=1-22, x=1-21, x=1-20, x=1-19, x=1-18, x=1-17, x=1-16, x=1-15, x=1-14, x=1-13, x=1-12, x=1-11, x=1-10, x=10-271, x=20-271, x=30-271, x=40-271, x=50-271, x=60-271, x=70-271, x=80-271, x=100-271, x=125-271, x=150-271, x=175-271, x=200-271, x=225-271, x=1, x=2, x=3, x=4, x=5, x=6, x=7, x=8, x=9, x=10, x=11, x=12, x=13, x=14, x=15, x=16, x=17, x=18, x=19, x=20, x=21, x=22, x=23, x=24, x=25, x=26, x=27, x=28, x=29, x=30, x=40, x=50, x=60, x=70, x=80, x=90, x=100, x=110, x=125, x=150, x=175, x=200, x=225, x=250, or x=271), provided that the TREM has one or both of the following properties: no more than 15% of the residues are N; or no more than 20 residues are absent.

### Proline TREM Consensus Sequence

[1867] In an embodiment, a TREM disclosed herein comprises the sequence of Formula I PRO (SEQ ID NO: 604),
[1868] R₀-R₁-R₂-R₃-R₄-R₅-R₆-R₇-R₈-R₉-R₁₀-R₁₁-R₁₂-R₁₃-R₁₄-R₁₅-R₁₆-R₁₇-R₁₈-R₁₉-R₂₀-R₂₁-R₂₂-R₂₃-R₂₄-R₂₅-R₂₆-R₂₇-R₂₈-R₂₉-R₃₀-R₃₁-R₃₂-R₃₃-R₃₄-R₃₅-R₃₆-R₃₇-R₃₈-R₃₉-R₄₀-R₄₁-R₄₂-R₄₃-R₄₄-R₄₅-R₄₆-[R₄₇]ₓ-R₄₈-R₄₉-R₅₀-R₅₁-R₅₂-R₅₃-R₅₄-R₅₅-R₅₆-R₅₇-R₅₈-R₅₉-R₆₀-R₆₁-R₆₂-R₆₃-R₆₄-R₆₅-R₆₆-R₆₇-R₆₈-R₆₉-R₇₀-R₇₁-R₇₂

[1869] wherein R is a ribonucleotide residue and the consensus for Pro is:
[1870] R₀=absent
[1871] R₁₄, R₅₇=are independently A or absent;
[1872] R₇₀, R₇₂=are independently A, C or absent;
[1873] R₉, R₂₆, R₂₇=are independently A, C, G or absent;
[1874] R₄, R₅, R₆, R₁₆, R₂₁, R₂₉, R₃₀, R₃₁, R₃₂, R₃₃, R₃₄, R₃₇, R₄₁, R₄₂, R₄₃, R₄₄, R₄₅, R₄₆, R₄₈, R₄₉, R so, R₅₈, R₆₁, R₆₂,
[1875] R₆₃, R₆₄, R₆₆, R₆₇, R₆₈=are independently N or absent;
[1876] R₃₅, R₆₅=are independently A, C, U or absent;
[1877] R₂₄, R₄₀, R₅₆=are independently A, G or absent;
[1878] R₇, R₂₅, R₅₁=are independently A, G, U or absent;
[1879] R₅₅, R₆₀=are independently C or absent;
[1880] R₁, R₃, R₇₁=are independently C, G or absent;
[1881] R₁₁, R₁₂, R₂₀, R₆₉=are independently C, G, U or absent;
[1882] R₁₃, R₁₇, R₁₈, R₂₂, R₂₃, R₂₈, R₅₉=are independently C, U or absent;
[1883] R₁₀, R₁₅, R₁₉, R₃₈, R₃₉, R₅₂=are independently G or absent;
[1884] R₂=are independently G, U or absent;
[1885] R₈, R₃₆, R₅₃, R₅₄=are independently U or absent;
[1886] [R₄₇]ₓ=N or absent;
[1887] wherein, e.g., x=1-271 (e.g., x=1-250, x=1-225, x=1-200, x=1-175, x=1-150, x=1-125, x=1-100, x=1-75, x=1-50, x=1-40, x=1-30, x=1-29, x=1-28, x=1-27, x=1-26, x=1-25, x=1-24, x=1-23, x=1-22, x=1-21, x=1-20, x=1-19, x=1-18, x=1-17, x=1-16, x=1-15, x=1-14, x=1-13, x=1-12, x=1-11, x=1-10, x=10-271, x=20-271, x=30-271, x=40-271, x=50-271, x=60-271, x=70-271, x=80-271, x=100-271, x=125-271, x=150-271, x=175-271, x=200-271, x=225-271, x=1, x=2, x=3, x=4, x=5, x=6, x=7, x=8, x=9, x=10, x=11, x=12, x=13, x=14, x=15, x=16, x=17, x=18, x=19, x=20, x=21, x=22, x=23, x=24, x=25, x=26, x=27, x=28, x=29, x=30, x=40, x=50, x=60, x=70, x=80, x=90, x=100, x=110, x=125, x=150, x=175, x=200, x=225, x=250, or x=271), provided that the TREM has one or both of the following properties: no more than 15% of the residues are N; or no more than 20 residues are absent.

[1888] In an embodiment, a TREM disclosed herein comprises the sequence of Formula II PRO (SEQ ID NO: 605),
[1889] R₀-R₁-R₂-R₃-R₄-R₅-R₆-R₇-R₈-R₉-R₁₀-R₁₁-R₁₂-R₁₃-R₁₄-R₁₅-R₁₆-R₁₇-R₁₈-R₁₉-R₂₀-R₂₁-R₂₂-R₂₃-R₂₄-R₂₅-R₂₆-R₂₇-R₂₈-R₂₉-R₃₀-R₃₁-R₃₂-R₃₃-R₃₄-R₃₅-R₃₆-R₃₇-R₃₈-R₃₉-R₄₀-R₄₁-R₄₂-R₄₃-R₄₄-R₄₅-R₄₆-[R₄₇]ₓ-R₄₈-R₄₉-R₅₀-R₅₁-R₅₂-R₅₃-R₅₄-R₅₅-R₅₆-R₅₇-R₅₈-R₅₉-R₆₀-R₆₁-R₆₂-R₆₃-R₆₄-R₆₅-R₆₆-R₆₇-R₆₈-R₆₉-R₇₀-R₇₁-R₇₂

[1890] wherein R is a ribonucleotide residue and the consensus for Pro is:
[1891] R₀, R₁₇, R₁₈, R₂₂, R₂₃-absent;
[1892] R₁₄, R₄₅, R₅₆, R₅₇, R₅₅, Ros, R₆₈=are independently A or absent;
[1893] R₆₁=A, C, G or absent;
[1894] R₄₃=N or absent;
[1895] R₃₇=A, C, U or absent;
[1896] R₂₄, R₂₇, R₃₃, R₄₀, R₄₄, R₆₃=are independently A, G or absent;
[1897] R₃, R₁₂, R₃₀, R₃₂, R₄₈, R₅₅, R₆₀, R₇₀, R₇₁, R₇₂=are independently C or absent;
[1898] R₅, R₃₄, R₄₂, R₆₆=are independently C, G or absent;
[1899] R₂₀=C, G, U or absent;
[1900] R₃₅, R₄₁, R₄₉, R₆₂=are independently C, U or absent;
[1901] R₁, R₂, R₆, R₀, R₁₀, R₁₅, R₁₉, R₂₆, R₃₈, R₃₉, R₄₆, R so, R₅₁, R $2, R₆₄, R₆₇, R₆₉=are independently G or absent;
[1902] R₁₁, R₁₆=are independently G, U or absent;
[1903] R₄, R₇, R₈, R₁₃, R₂₁, R₂₅, R₂₈, R₂₉, R₃₁, R₃₆, R₅₃, R₅₄, R₅₉=are independently U or absent;
[1904] [R₄₇]ₓ=N or absent;
[1905] wherein, e.g., x=1-271 (e.g., x=1-250, x=1-225, x=1-200, x=1-175, x=1-150, x=1-125, x=1-100, x=1-75, x=1-50, x=1-40, x=1-30, x=1-29, x=1-28, x=1-27, x=1-26, x=1-25, x=1-24, x=1-23, x=1-22, x=1-21, x=1-20, x=1-19, x=1-18, x=1-17, x=1-16, x=1-15, x=1-14, x=1-13, x=1-12, x=1-11, x=1-10, x=10-271, x=20-271, x=30-271, x=40-271, x=50-271, x=60-271, x=70-271, x=80-271, x=100-271, x=125-271, x=150-271, x=175-271, x=200-271, x=225-271, x=1, x=2, x=3, x=4, x=5, x=6, x=7, x=8, x=9, x=10, x=11, x=12, x=13, x=14, x=15, x=16, x=17, x=18, x=19, x=20, x=21, x=22, x=23, x=24, x=25, x=26, x=27, x=28, x=29, x=30, x=40, x=50, x=60, x=70, x=80, x=90, x=100, x=110, x=125, x=150, x=175, x=200, x=225, x=250, or x=271), provided that the TREM has one or both of the following properties: no more than 15% of the residues are N; or no more than 20 residues are absent.

[1906] In an embodiment, a TREM disclosed herein comprises the sequence of Formula III PRO (SEQ ID NO: 606),
[1907] R₀-R₁-R₂-R₃-R₄-R₅-R₆-R₇-R₈-R₉-R₁₀-R₁₁-R₁₂-R₁₃-R₁₄-R₁₅-R₁₆-R₁₇-R₁₈-R₁₉-R₂₀-R₂₁-R₂₂-R₂₃-R₂₄-R₂₅-R₂₆-R₂₇-R₂₈-R₂₉-R₃₀-R₃₁-R₃₂-R₃₃-R₃₄-R₃₅-R₃₆-R₃₇-R₃₈-R₃₉-R₄₀-R₄₁-R₄₂-R₄₃-R₄₄-R₄₅-R₄₆-[R₄₇]ₓ-R₄₈-R₄₉-R₅₀-R₅₁-R₅₂-R₅₃-R₅₄-R₅₅-R₅₆-R₅₇-R₅₈-R₅₉-R₆₀-R₆₁-R₆₂-R₆₃-R₆₄-R₆₅-R₆₆-R₆₇-R₆₈-R₆₉-R₇₀-R₇₁-R₇₂

[1908] wherein R is a ribonucleotide residue and the consensus for Pro is:
[1909] R₀, R₁₇, R₁₈, R₂₂, R₂₃=absent
[1910] R₁₄, R₄₅, R₅₆, R₅₇, R₅₈, R₆₅, R₆₈=are independently A or absent;
[1911] R₃₇=A, C, U or absent;
[1912] R₂₄, R₂₇, R₄₀=are independently A, G or absent;
[1913] R₃, R₅, R₁₂, R₃₀, R₃₂, R₄₈, R₄₉, R₅₅, R₆₀, R₆₁, R₆₂, R₆₆, R₇₀, R₇₁, R₇₂=are independently C or absent;
[1914] R₃₄, R₄₂=are independently C, G or absent;
[1915] R₄₃=C, G, U or absent;
[1916] R₄₁=C, U or absent;
[1917] R₁, R₂, R₆, R₉, R₁₀, R₁₅, R₁₉, R₂₀, R₂₆, R₃₃, R₃₈, R₃₉, R₄₄, R₄₆, R₅₀, R₅₁, R₅₂, R₆₃, R₆₄, R₆₇, R₆₉=are independently G or absent;
[1918] R₁₆=G, U or absent;
[1919] R₄, R₇, R₈, R₁₁, R₁₃, R₂₁, R₂₅, R₂₈, R₂₉, R₃₁, R₃₅, R₃₆, R₅₃, R₅₄, R₅₉=are independently U or absent;
[1920] [R₄₇]ₓ=N or absent;
[1921] wherein, e.g., x=1-271 (e.g., x=1-250, x=1-225, x=1-200, x=1-175, x=1-150, x=1-125, x=1-100, x=1-75, x=1-50, x=1-40, x=1-30, x=1-29, x=1-28, x=1-27, x=1-26, x=1-25, x=1-24, x=1-23, x=1-22, x=1-21, x=1-20, x=1-19, x=1-18, x=1-17, x=1-16, x=1-15, x=1-14, x=1-13, x=1-12, x=1-11, x=1-10, x=10-271, x=20-271, x=30-271, x=40-271, x=50-271, x=60-271, x=70-271, x=80-271, x=100-271, x=125-271, x=150-271, x=175-271, x=200-271, x=225-271, x=1, x=2, x=3, x=4, x=5, x=6, x=7, x=8, x=9, x=10, x=11, x=12, x=13, x=14, x=15, x=16, x=17, x=18, x=19, x=20, x=21, x=22, x=23, x=24, x=25, x=26, x=27, x=28, x=29, x=30, x=40, x=50, x=60, x=70, x=80, x=90, x=100, x=110, x=125, x=150, x=175, x=200, x=225, x=250, or x=271), provided that the TREM has one or both of the following properties: no more than 15% of the residues are N; or no more than 20 residues are absent.

### Serine TREM Consensus Sequence

[1922] In an embodiment, a TREM disclosed herein comprises the sequence of Formula I SER (SEQ ID NO: 607),
[1923] R₀-R₁-R₂-R₃-R₄-R₅-R₆-R₇-R₈-R₉-R₁₀-R₁₁-R₁₂-R₁₃-R₁₄-R₁₅-R₁₆-R₁₇-R₁₈-R₁₉-R₂₀-R₂₁-R₂₂-R₂₃-R₂₄-R₂₅-R₂₆-R₂₇-R₂₈-R₂₉-R₃₀-R₃₁-R₃₂-R₃₃-R₃₄-R₃₅-R₃₆-R₃₇-R₃₈-R₃₉-R₄₀-R₄₁-R₄₂-R₄₃-R₄₄-R₄₅-R₄₆-[R₄₇]ₓ-R₄₈-R₄₉-R₅₀-R₅₁-R₅₂-R₅₃-R₅₄-R₅₅-R₅₆-R₅₇-R₅₈-R₅₉-R₆₀-R₆₁-R₆₂-R₆₃-R₆₄-R₆₅-R₆₆-R₆₇-R₆₈-R₆₉-R₇₀-R₇₁-R₇₂

[1924] wherein R is a ribonucleotide residue and the consensus for Ser is:
[1925] R₀=absent;
[1926] R₁₄, R₂₄, R₅₇=are independently A or absent;
[1927] R₄₁=A, C or absent;
[1928] R₂, R₃, R₄, R₅, R₆, R₇, R₀, R₁₀, R₁₁, R₁₂, R₁₃, R₁₆, R₂₁, R₂₅, R₂₆, R₂₇, R₂₈, R₃₀, R₃₁, R₃₂, R₃₃, R₃₄, R₃₇, R₄₂, R₄₃, R₄₄, R₄₅, R₄₆, R₄₈, R₄₉, R₅₀, R₆₂, R₆₃, R₆₄, R₆₅, R₆₆, R₆₇, R₆₈, R₆₉, R₇₀=are independently N or absent;
[1929] R₁₈=A, C, U or absent;
[1930] R₁₅, R₄₀, R₅₁, R₅₆=are independently A, G or absent;
[1931] R₁, R₂₉, R₅₅, R₇₂=are independently A, G, U or absent;
[1932] R₃₉=A, U or absent;
[1933] R₆₀=C or absent;
[1934] R₃₈=C, G or absent;
[1935] R₁₇, R₂₂, R₂₃, R₇₁=are independently C, G, U or absent;
[1936] R₈, R₃₅, R₃₆, R₅₅, R₅₉, R₆₁=are independently C, U or absent;
[1937] R₁₉, R₂₀=are independently G or absent;
[1938] R₅₂=G, U or absent;
[1939] R₅₃, R₅₄=are independently U or absent;
[1940] [R₄₇]ₓ=N or absent;
[1941] wherein, e.g., x=1-271 (e.g., x=1-250, x=1-225, x=1-200, x=1-175, x=1-150, x=1-125, x=1-100, x=1-75, x=1-50, x=1-40, x=1-30, x=1-29, x=1-28, x=1-27, x=1-26, x=1-25, x=1-24, x=1-23, x=1-22, x=1-21, x=1-20, x=1-19, x=1-18, x=1-17, x=1-16, x=1-15, x=1-14, x=1-13, x=1-12, x=1-11, x=1-10, x=10-271, x=20-271, x=30-271, x=40-271, x=50-271, x=60-271, x=70-271, x=80-271, x=100-271, x=125-271, x=150-271, x=175-271, x=200-271, x=225-271, x=1, x=2, x=3, x=4, x=5, x=6, x=7, x=8, x=9, x=10, x=11, x=12, x=13, x=14, x=15, x=16, x=17, x=18, x=19, x=20, x=21, x=22, x=23, x=24, x=25, x=26, x=27, x=28, x=29, x=30, x=40, x=50, x=60, x=70, x=80, x=90, x=100, x=110, x=125, x=150, x=175, x=200, x=225, x=250, or x=271), provided that the TREM has one or both of the following properties: no more than 15% of the residues are N; or no more than 20 residues are absent.

[1942] In an embodiment, a TREM disclosed herein comprises the sequence of Formula II SER (SEQ ID NO: 608),
[1943] R₀-R₁-R₂-R₃-R₄-R₅-R₆-R₇-R₈-R₉-R₁₀-R₁₁-R₁₂-R₁₃-R₁₄-R₁₅-R₁₆-R₁₇-R₁₈-R₁₉-R₂₀-R₂₁-R₂₂-R₂₃-R₂₄-R₂₅-R₂₆-R₂₇-R₂₈-R₂₉-R₃₀-R₃₁-R₃₂-R₃₃-R₃₄-R₃₅-R₃₆-R₃₇-R₃₈-R₃₉-R₄₀-R₄₁-R₄₂-R₄₃-R₄₄-R₄₅-R₄₆-[R₄₇]ₓ-R₄₈-R₄₉-R₅₀-R₅₁-R₅₂-R₅₃-R₅₄-R₅₅-R₅₆-R₅₇-R₅₈-R₅₉-R₆₀-R₆₁-R₆₂-R₆₃-R₆₄-R₆₅-R₆₆-R₆₇-R₆₈-R₆₉-R₇₀-R₇₁-R₇₂

[1944] wherein R is a ribonucleotide residue and the consensus for Ser is:
[1945] R₀, R₂₃=absent
[1946] R₁₄, R₂₄, R₄₁, R₅₇=are independently A or absent;
[1947] R₄₄=A, C or absent;
[1948] R₂₅, R₄₅, R₄₈=are independently A, C, G or absent;
[1949] R₂, R₃, R₄, R₅, R₃₇, R₅₀, R₆₂, R₆₆, R₆₇, R₆₉, R₇₀=are independently N or absent;
[1950] R₁₂, R₂₈, R₆₅=are independently A, C, U or absent;
[1951] R₉, R₁₅, R₂₉, R₃₄, R₄₀, R₅₆, R₆₃=are independently A, G or absent;
[1952] R₇, R₂₆, R₃₀, R₃₃, R₄₆, R₅₅, R₇₂=are independently A, G, U or absent;
[1953] R₃₉=A, U or absent;
[1954] R₁₁, R₃₅, R₆₀, R₆₁=are independently C or absent;
[1955] R₁₃, R₃₈=are independently C, G or absent;
[1956] R₆, R₁₇, R₃₁, R₄₃, R₆₄, R₆₈=are independently C, G, U or absent;
[1957] R₃₆, R₄₂, R₄₉, R₅₅, R₅₉, R₇₁=are independently C, U or absent;
[1958] R₁₀, R₁₉, R₂₀, R₂₇, R₅₁=are independently G or absent;
[1959] R₁, R₁₆, R₃₂, R₅₂=are independently G, U or absent;
[1960] R₈, R₁₈, R₂₁, R₂₂, R₅₃, R₅₄=are independently U or absent;
[1961] [R₄₇]ₓ=N or absent;
[1962] wherein, e.g., x=1-271 (e.g., x=1-250, x=1-225, x=1-200, x=1-175, x=1-150, x=1-125, x=1-100, x=1-75, x=1-50, x=1-40, x=1-30, x=1-29, x=1-28, x=1-27, x=1-26, x=1-25, x=1-24, x=1-23, x=1-22, x=1-21, x=1-20, x=1-19, x=1-18, x=1-17, x=1-16, x=1-15, x=1-14, x=1-13, x=1-12, x=1-11, x=1-10, x=10-271, x=20-271, x=30-271, x=40-271, x=50-271, x=60-271, x=70-271, x=80-271, x=100-271, x=125-271, x=150-271, x=175-271, x=200-271, x=225-271, x=1, x=2, x=3, x=4, x=5, x=6, x=7, x=8, x=9, x=10, x=11, x=12, x=13, x=14, x=15, x=16, x=17, x=18, x=19, x=20, x=21, x=22, x=23, x=24, x=25, x=26, x=27, x=28, x=29, x=30, x=40, x=50, x=60, x=70, x=80, x=90, x=100, x=110, x=125, x=150, x=175, x=200, x=225, x=250, or x=271), provided that the TREM has one or both of the following properties: no more than 15% of the residues are N; or no more than 20 residues are absent.

[1963] In an embodiment, a TREM disclosed herein comprises the sequence of Formula III SER (SEQ ID NO: 609),
[1964] R₀-R₁-R₂-R₃-R₄-R₅-R₆-R₇-R₈-R₉-R₁₀-R₁₁-R₁₂-R₁₃-R₁₄-R₁₅-R₁₆-R₁₇-R₁₈-R₁₉-R₂₀-R₂₁-R₂₂-R₂₃-R₂₄-R₂₅-R₂₆-R₂₇-R₂₈-R₂₉-R₃₀-R₃₁-R₃₂-R₃₃-R₃₄-R₃₅-R₃₆-R₃₇-R₃₈-R₃₉-R₄₀-R₄₁-R₄₂-R₄₃-R₄₄-R₄₅-R₄₆-[R₄₇]ₓ-R₄₈-R₄₉-R₅₀-R₅₁-R₅₂-R₅₃-R₅₄-R₅₅-R₅₆-R₅₇-R₅₈-R₅₉-R₆₀-R₆₁-R₆₂-R₆₃-R₆₄-R₆₅-R₆₆-R₆₇-R₆₈-R₆₉-R₇₀-R₇₁-R₇₂

[1965] wherein R is a ribonucleotide residue and the consensus for Ser is:
[1966] R₀, R₂₃=absent
[1967] R₁₄, R₂₄, R₄₁, R₅₇, R₅₅=are independently A or absent;
[1968] R₄₄=A, C or absent;
[1969] R₂₅, R₄₈=are independently A, C, G or absent;
[1970] R₂, R₃, R₅, R₃₇, R₆₆, R₆₇, R₆₉, R₇₀=are independently N or absent;
[1971] R₁₂, R₂₈, R₆₂=are independently A, C, U or absent;
[1972] R₇, R₉, R₁₅, R₂₉, R₃₃, R₃₄, R₄₀, R₄₅, R₅₆, R₆₃=are independently A, G or absent;
[1973] R₄, R₂₆, R₄₆, R₅₀=are independently A, G, U or absent;
[1974] R₃₀, R₃₉=are independently A, U or absent;
[1975] R₁₁, R₁₇, R₃₅, R₆₀, R₆₁=are independently C or absent;
[1976] R₁₃, R₃₈=are independently C, G or absent;
[1977] R₆, R₆₄=are independently C, G, U or absent;
[1978] R₃₁, R₄₂, R₄₃, R₄₉, R₅₅, R₅₉, R₆₅, R₆₈, R₇₁=are independently C, U or absent;
[1979] R₁₀, R₁₉, R₂₀, R₂₇, R₅₁, R₅₂=are independently G or absent;
[1980] R₁, R₁₆, R₃₂, R₇₂=are independently G, U or absent;
[1981] R₈, R₁₈, R₂₁, R₂₂, R₃₆, R₅₃, R₅₄=are independently U or absent;
[1982] [R₄₇]ₓ=N or absent;
[1983] wherein, e.g., x=1-271 (e.g., x=1-250, x=1-225, x=1-200, x=1-175, x=1-150, x=1-125, x=1-100, x=1-75, x=1-50, x=1-40, x=1-30, x=1-29, x=1-28, x=1-27, x=1-26, x=1-25, x=1-24, x=1-23, x=1-22, x=1-21, x=1-20, x=1-19, x=1-18, x=1-17, x=1-16, x=1-15, x=1-14, x=1-13, x=1-12, x=1-11, x=1-10, x=10-271, x=20-271, x=30-271, x=40-271, x=50-271, x=60-271, x=70-271, x=80-271, x=100-271, x=125-271, x=150-271, x=175-271, x=200-271, x=225-271, x=1, x=2, x=3, x=4, x=5, x=6, x=7, x=8, x=9, x=10, x=11, x=12, x=13, x=14, x=15, x=16, x=17, x=18, x=19, x=20, x=21, x=22, x=23, x=24, x=25, x=26, x=27, x=28, x=29, x=30, x=40, x=50, x=60, x=70, x=80, x=90, x=100, x=110, x=125, x=150, x=175, x=200, x=225, x=250, or x=271), provided that the TREM has one or both of the following properties: no more than 15% of the residues are N; or no more than 20 residues are absent.

### Threonine TREM Consensus Sequence

[1984] In an embodiment, a TREM disclosed herein comprises the sequence of Formula I_{THR} (SEQ ID NO: 610),
[1985] R₀-R₁-R₂-R₃-R₄-R₅-R₆-R₇-R₈-R₉-R₁₀-R₁₁-R₁₂-R₁₃-R₁₄-R₁₅-R₁₆-R₁₇-R₁₈-R₁₉-R₂₀-R₂₁-R₂₂-R₂₃-R₂₄-R₂₅-R₂₆-R₂₇-R₂₈-R₂₉-R₃₀-R₃₁-R₃₂-R₃₃-R₃₄-R₃₅-R₃₆-R₃₇-R₃₈-R₃₉-R₄₀-R₄₁-R₄₂-R₄₃-R₄₄-R₄₅-R₄₆-[R₄₇]ₓ-R₄₈-R₄₉-R₅₀-R₅₁-R₅₂-R₅₃-R₅₄-R₅₅-R₅₆-R₅₇-R₅₈-R₅₉-R₆₀-R₆₁-R₆₂-R₆₃-R₆₄-R₆₅-R₆₆-R₆₇-R₆₈-R₆₉-R₇₀-R₇₁-R₇₂

[1986] wherein R is a ribonucleotide residue and the consensus for Thr is:
[1987] R₀, R₂₃=absent
[1988] R₁₄, R₄₁, R₅₇=are independently A or absent;
[1989] R₅₆, R₇₀=are independently A, C, G or absent;
[1990] R₄, R₅, R₆, R₇, R₁₂, R₁₆, R₂₆, R₃₀, R₃₁, R₃₂, R₃₄, R₃₇, R₄₂, R₄₄, R₄₅, R₄₆, R₄₈, R₄₉, R₅₀, R₅₈, R₆₂, R₆₃, R₆₄, R₆₅, R₆₆, R₆₇, R₆₈, R₇₂=are independently N or absent;
[1991] R₁₃, R₁₇, R₂₁, R₃₅, R₆₁=are independently A, C, U or absent;
[1992] R₁, R₉, R₂₄, R₂₇, R₂₉, R₆₉=are independently A, G or absent;
[1993] R₁₅, R₂₅, R₅₁=are independently A, G, U or absent;
[1994] R₄₀, R₅₃=are independently A, U or absent;
[1995] R₃₃, R₄₃=are independently C, G or absent;
[1996] R₂, R₃, R₅₉=are independently C, G, U or absent;
[1997] R₁₁, R₁₈, R₂₂, R₂₈, R₃₆, R₅₄, R₅₅, R₆₀, R₇₁=are independently C, U or absent;
[1998] R₁₀, R₂₀, R₃₈, R₅₂=are independently G or absent;
[1999] R₁₉=G, U or absent;
[2000] R₈, R₃₉=are independently U or absent;
[2001] [R₄₇]ₓ=N or absent;
[2002] wherein, e.g., x=1-271 (e.g., x=1-250, x=1-225, x=1-200, x=1-175, x=1-150, x=1-125, x=1-100, x=1-75, x=1-50, x=1-40, x=1-30, x=1-29, x=1-28, x=1-27, x=1-26, x=1-25, x=1-24, x=1-23, x=1-22, x=1-21, x=1-20, x=1-19, x=1-18, x=1-17, x=1-16, x=1-15, x=1-14, x=1-13, x=1-12, x=1-11, x=1-10, x=10-271, x=20-271, x=30-271, x=40-271, x=50-271, x=60-271, x=70-271, x=80-271, x=100-271, x=125-271, x=150-271, x=175-271, x=200-271, x=225-271, x=1, x=2, x=3, x=4, x=5, x=6, x=7, x=8, x=9, x=10, x=11, x=12, x=13, x=14, x=15, x=16, x=17, x=18, x=19, x=20, x=21, x=22, x=23, x=24, x=25, x=26, x=27, x=28, x=29, x=30, x=40, x=50, x=60, x=70, x=80, x=90, x=100, x=110, x=125, x=150, x=175, x=200, x=225, x=250, or x=271), provided that the TREM has one or both of the following properties: no more than 15% of the residues are N; or no more than 20 residues are absent.

[2003] In an embodiment, a TREM disclosed herein comprises the sequence of Formula II THR (SEQ ID NO: 611),
[2004] R₀-R₁-R₂-R₃-R₄-R₅-R₆-R₇-R₈-R₉-R₁₀-R₁₁-R₁₂-R₁₃-R₁₄-R₁₅-R₁₆-R₁₇-R₁₈-R₁₉-R₂₀-R₂₁-R₂₂-R₂₃-R₂₄-R₂₅-R₂₆-R₂₇-R₂₈-R₂₉-R₃₀-R₃₁-R₃₂-R₃₃-R₃₄-R₃₅-R₃₆-R₃₇-R₃₈-R₃₉-R₄₀-R₄₁-R₄₂-R₄₃-R₄₄-R₄₅-R₄₆-[R₄₇]ₓ-R₄₈-R₄₉-R₅₀-R₅₁-R₅₂-R₅₃-R₅₄-R₅₅-R₅₆-R₅₇-R₅₈-R₅₉-R₆₀-R₆₁-R₆₂-R₆₃-R₆₄-R₆₅-R₆₆-R₆₇-R₆₈-R₆₉-R₇₀-R₇₁-R₇₂

[2005] wherein R is a ribonucleotide residue and the consensus for Thr is:
[2006] R₀, R₁₈, R₂₃=absent
[2007] R₁₄, R₄₁, R₅₇=are independently A or absent;
[2008] R₉, R₄₂, R₄₄, R₄₈, R₅₆, R₇₀=are independently A, C, G or absent;
[2009] R₄, R₆, R₁₂, R₂₆, R₄₉, R₅₈, R₆₃, R₆₄, R₆₆, R₆₈=are independently N or absent;
[2010] R₁₃, R₂₁, R₃₁, R₃₇, R₆₂=are independently A, C, U or absent;
[2011] R₁, R₁₅, R₂₄, R₂₇, R₂₉, R₄₆, R₅₁, R₆₉=are independently A, G or absent;
[2012] R₇, R₂₅, R₄₅, R₅₀, R₆₇=are independently A, G, U or absent;
[2013] R₄₀, R₅₃=are independently A, U or absent;
[2014] R₃₅=C or absent;
[2015] R₃₃, R₄₃=are independently C, G or absent;
[2016] R₂, R₃, R₅, R₁₆, R₃₂, R₃₄, R₅₉, R₆₅, R₇₂=are independently C, G, U or absent;
[2017] R₁₁, R₁₇, R₂₂, R₂₈, R₃₀, R₃₆, R₅₅, R₆₀, R₆₁, R₇₁=are independently C, U or absent;
[2018] R₁₀, R₁₉, R₂₀, R₃₈, R₅₂=are independently G or absent;
[2019] R₈, R₃₉, R₅₄=are independently U or absent;
[2020] [R₄₇]ₓ=N or absent;
[2021] wherein, e.g., x=1-271 (e.g., x=1-250, x=1-225, x=1-200, x=1-175, x=1-150, x=1-125, x=1-100, x=1-75, x=1-50, x=1-40, x=1-30, x=1-29, x=1-28, x=1-27, x=1-26, x=1-25, x=1-24, x=1-23, x=1-22, x=1-21, x=1-20, x=1-19, x=1-18, x=1-17, x=1-16, x=1-15, x=1-14, x=1-13, x=1-12, x=1-11, x=1-10, x=10-271, x=20-271, x=30-271, x=40-271, x=50-271, x=60-271, x=70-271, x=80-271, x=100-271, x=125-271, x=150-271, x=175-271, x=200-271, x=225-271, x=1, x=2, x=3, x=4, x=5, x=6, x=7, x=8, x=9, x=10, x=11, x=12, x=13, x=14, x=15, x=16, x=17, x=18, x=19, x=20, x=21, x=22, x=23, x=24, x=25, x=26, x=27, x=28, x=29, x=30, x=40, x=50, x=60, x=70, x=80, x=90, x=100, x=110, x=125, x=150, x=175, x=200, x=225, x=250, or x=271), provided that the TREM has one or both of the following properties: no more than 15% of the residues are N; or no more than 20 residues are absent.

[2022] In an embodiment, a TREM disclosed herein comprises the sequence of Formula III THR (SEQ ID NO: 612),
[2023] R₀-R₁-R₂-R₃-R₄-R₅-R₆-R₇-R₈-R₉-R₁₀-R₁₁-R₁₂-R₁₃-R₁₄-R₁₅-R₁₆-R₁₇-R₁₈-R₁₉-R₂₀-R₂₁-R₂₂-R₂₃-R₂₄-R₂₅-R₂₆-R₂₇-R₂₈-R₂₉-R₃₀-R₃₁-R₃₂-R₃₃-R₃₄-R₃₅-R₃₆-R₃₇-R₃₈-R₃₉-R₄₀-R₄₁-R₄₂-R₄₃-R₄₄-R₄₅-R₄₆-[R₄₇]ₓ-R₄₈-R₄₉-R₅₀-R₅₁-R₅₂-R₅₃-R₅₄-R₅₅-R₅₆-R₅₇-R₅₈-R₅₉-R₆₀-R₆₁-R₆₂-R₆₃-R₆₄-R₆₅-R₆₆-R₆₇-R₆₈-R₆₉-R₇₀-R₇₁-R₇₂

[2024] wherein R is a ribonucleotide residue and the consensus for Thr is:
[2025] R₀, R₁₈, R₂₃=absent
[2026] R₁₄, R₄₀, R₄₁, R₅₇=are independently A or absent;
[2027] R₄₄=A, C or absent;
[2028] R₉, R₄₂, R₄₈, R₅₆=are independently A, C, G or absent;
[2029] R₄, R₆, R₁₂, R₂₆, R₅₅, R₆₄, R₆₆, R₆₈=are independently N or absent;
[2030] R₁₃, R₂₁, R₃₁, R₃₇, R₄₉, R₆₂=are independently A, C, U or absent;
[2031] R₁, R₁₅, R₂₄, R₂₇, R₂₉, R₄₆, R₅₁, R₆₉=are independently A, G or absent;
[2032] R₇, R₂₅, R₄₅, R₅₀, R₆₃, R₆₇=are independently A, G, U or absent;
[2033] R₅₃=A, U or absent;
[2034] R₃₅=C or absent;
[2035] R₂, R₃₃, R₄₃, R₇₀=are independently C, G or absent;
[2036] R₅, R₁₆, R₃₄, R₅₉, R₆₅=are independently C, G, U or absent;
[2037] R₃, R₁₁, R₂₂, R₂₈, R₃₀, R₃₆, R₅₅, R₆₀, R₆₁, R₇₁=are independently C, U or absent;
[2038] R₁₀, R₁₉, R₂₀, R₃₈, R₅₂=are independently G or absent;
[2039] R₃₂=G, U or absent;
[2040] R₈, R₁₇, R₃₉, R₅₄, R₇₂=are independently U or absent;
[2041] [R₄₇]ₓ=N or absent;
[2042] wherein, e.g., x=1-271 (e.g., x=1-250, x=1-225, x=1-200, x=1-175, x=1-150, x=1-125, x=1-100, x=1-75, x=1-50, x=1-40, x=1-30, x=1-29, x=1-28, x=1-27, x=1-26, x=1-25, x=1-24, x=1-23, x=1-22, x=1-21, x=1-20, x=1-19, x=1-18, x=1-17, x=1-16, x=1-15, x=1-14, x=1-13, x=1-12, x=1-11, x=1-10, x=10-271, x=20-271, x=30-271, x=40-271, x=50-271, x=60-271, x=70-271, x=80-271, x=100-271, x=125-271, x=150-271, x=175-271, x=200-271, x=225-271, x=1, x=2, x=3, x=4, x=5, x=6, x=7, x=8, x=9, x=10, x=11, x=12, x=13, x=14, x=15, x=16, x=17, x=18, x=19, x=20, x=21, x=22, x=23, x=24, x=25, x=26, x=27, x=28, x=29, x=30, x=40, x=50, x=60, x=70, x=80, x=90, x=100, x=110, x=125, x=150, x=175, x=200, x=225, x=250, or x=271), provided that the TREM has one or both of the following properties: no more than 15% of the residues are N; or no more than 20 residues are absent.

### Tryptophan TREM Consensus Sequence

[2043] In an embodiment, a TREM disclosed herein comprises the sequence of Formula I TRP (SEQ ID NO: 613),
[2044] R₀-R₁-R₂-R₃-R₄-R₅-R₆-R₇-R₈-R₉-R₁₀-R₁₁-R₁₂-R₁₃-R₁₄-R₁₅-R₁₆-R₁₇-R₁₈-R₁₉-R₂₀-R₂₁-R₂₂-R₂₃-R₂₄-R₂₅-R₂₆-R₂₇-R₂₈-R₂₉-R₃₀-R₃₁-R₃₂-R₃₃-R₃₄-R₃₅-R₃₆-R₃₇-R₃₈-R₃₉-R₄₀-R₄₁-R₄₂-R₄₃-R₄₄-R₄₅-R₄₆-[R₄₇]ₓ-R₄₈-R₄₉-R₅₀-R₅₁-R₅₂-R₅₃-R₅₄-R₅₅-R₅₆-R₅₇-R₅₈-R₅₉-R₆₀-R₆₁-R₆₂-R₆₃-R₆₄-R₆₅-R₆₆-R₆₇-R₆₈-R₆₉-R₇₀-R₇₁-R₇₂

[2045] wherein R is a ribonucleotide residue and the consensus for Trp is:
[2046] R₀=absent;
[2047] R₂₄, R₃₉, R₄₁, R₅₇=are independently A or absent;
[2048] R₂, R₃, R₂₆, R₂₇, R₄₀, R₄₈=are independently A, C, G or absent;
[2049] R₄, R₅, R₆, R₂₉, R₃₀, R₃₁, R₃₂, R₃₄, R₄₂, R₄₄, R₄₅, R₄₆, R₄₉, R₅₁, R₅₈, R₆₃, R₆₆, R₆₇, R₆₈=are independently N or absent;
[2050] R₁₃, R₁₄, R₁₆, R₁₈, R₂₁, R₆₁, R₆₅, R₇₁=are independently A, C, U or absent;
[2051] R₁, R₉, R₁₀, R₁₅, R₃₃, R₅₀, R₅₆=are independently A, G or absent;
[2052] R₇, R₂₅, R₇₂=are independently A, G, U or absent;
[2053] R₃₇, R₃₈, R₅₅, R₆₀=are independently C or absent;
[2054] R₁₂, R₃₅, R₄₃, R₆₄, R₆₉, R₇₀=are independently C, G, U or absent;
[2055] R₁₁, R₁₇, R₂₂, R₂₈, R₅₉, R₆₂=are independently C, U or absent;
[2056] R₁₉, R₂₀, R₅₂=are independently G or absent;
[2057] R₈, R₂₃, R₃₆, R₅₃, R₅₄=are independently U or absent;
[2058] [R₄₇]ₓ=N or absent;
[2059] wherein, e.g., x=1-271 (e.g., x=1-250, x=1-225, x=1-200, x=1-175, x=1-150, x=1-125, x=1-100, x=1-75, x=1-50, x=1-40, x=1-30, x=1-29, x=1-28, x=1-27, x=1-26, x=1-25, x=1-24, x=1-23, x=1-22, x=1-21, x=1-20, x=1-19, x=1-18, x=1-17, x=1-16, x=1-15, x=1-14, x=1-13, x=1-12, x=1-11, x=1-10, x=10-271, x=20-271, x=30-271, x=40-271, x=50-271, x=60-271, x=70-271, x=80-271, x=100-271, x=125-271, x=150-271, x=175-271, x=200-271, x=225-271, x=1, x=2, x=3, x=4, x=5, x=6, x=7, x=8, x=9, x=10, x=11, x=12, x=13, x=14, x=15, x=16, x=17, x=18, x=19, x=20, x=21, x=22, x=23, x=24, x=25, x=26, x=27, x=28, x=29, x=30, x=40, x=50, x=60, x=70, x=80, x=90, x=100, x=110, x=125, x=150, x=175, x=200, x=225, x=250, or x=271), provided that the TREM has one or both of the following properties: no more than 15% of the residues are N; or no more than 20 residues are absent.

[2060] In an embodiment, a TREM disclosed herein comprises the sequence of Formula II TRP (SEQ ID NO: 614),
[2061] R₀-R₁-R₂-R₃-R₄-R₅-R₆-R₇-R₈-R₉-R₁₀-R₁₁-R₁₂-R₁₃-R₁₄-R₁₅-R₁₆-R₁₇-R₁₈-R₁₉-R₂₀-R₂₁-R₂₂-R₂₃-R₂₄-R₂₅-R₂₆-R₂₇-R₂₈-R₂₉-R₃₀-R₃₁-R₃₂-R₃₃-R₃₄-R₃₅-R₃₆-R₃₇-R₃₈-R₃₉-R₄₀-R₄₁-R₄₂-R₄₃-R₄₄-R₄₅-R₄₆-[R₄₇]ₓ-R₄₈-R₄₉-R₅₀-R₅₁-R₅₂-R₅₃-R₅₄-R₅₅-R₅₆-R₅₇-R₅₈-R₅₉-R₆₀-R₆₁-R₆₂-R₆₃-R₆₄-R₆₅-R₆₆-R₆₇-R₆₈-R₆₉-R₇₀-R₇₁-R₇₂

[2062] wherein R is a ribonucleotide residue and the consensus for Trp is:
[2063] R₀, R₁₈, R₂₂, R₂₃=absent
[2064] R₁₄, R₂₄, R₃₉, R₄₁, R₅₇, R₇₂=are independently A or absent;
[2065] R₃, R₄, R₁₃, R₆₁, R₇₁=are independently A, C or absent;
[2066] R₆, R₄₄=are independently A, C, G or absent;
[2067] R₂₁=A, C, U or absent;
[2068] R₂, R₇, R₁₅, R₂₅, R₃₃, R₃₄, R₄₅, R₅₆, R₆₃=are independently A, G or absent;
[2069] R₅₅=A, G, U or absent;
[2070] R₄₆=A, U or absent;
[2071] R₃₇, R₃₈, R₅₅, R₆₀, R₆₂=are independently C or absent;
[2072] R₁₂, R₂₆, R₂₇, R₃₅, R₄₀, R₄₈, R₆₇=are independently C, G or absent;
[2073] R₃₂, R₄₃, R₆₈=are independently C, G, U or absent;
[2074] R₁₁, R₁₆, R₂₈, R₃₁, R₄₉, R₅₉, R₆₅, R₇₀=are independently C, U or absent;
[2075] R₁, R₉, R₁₀, R₁₉, R₂₀, R₅₀, R₅₂, R₆₉=are independently G or absent;
[2076] R₅, R₈, R₂₉, R₃₀, R₄₂, R₅₁, R₆₄, R₆₆=are independently G, U or absent;
[2077] R₁₇, R₃₆, R₅₃, R₅₄=are independently U or absent;
[2078] [R₄₇]ₓ=N or absent;
[2079] wherein, e.g., x=1-271 (e.g., x=1-250, x=1-225, x=1-200, x=1-175, x=1-150, x=1-125, x=1-100, x=1-75, x=1-50, x=1-40, x=1-30, x=1-29, x=1-28, x=1-27, x=1-26, x=1-25, x=1-24, x=1-23, x=1-22, x=1-21, x=1-20, x=1-19, x=1-18, x=1-17, x=1-16, x=1-15, x=1-14, x=1-13, x=1-12, x=1-11, x=1-10, x=10-271, x=20-271, x=30-271, x=40-271, x=50-271, x=60-271, x=70-271, x=80-271, x=100-271, x=125-271, x=150-271, x=175-271, x=200-271, x=225-271, x=1, x=2, x=3, x=4, x=5, x=6, x=7, x=8, x=9, x=10, x=11, x=12, x=13, x=14, x=15, x=16, x=17, x=18, x=19, x=20, x=21, x=22, x=23, x=24, x=25, x=26, x=27, x=28, x=29, x=30, x=40, x=50, x=60, x=70, x=80, x=90, x=100, x=110, x=125, x=150, x=175, x=200, x=225, x=250, or x=271), provided that the TREM has one or both of the following properties: no more than 15% of the residues are N; or no more than 20 residues are absent.

[2080] In an embodiment, a TREM disclosed herein comprises the sequence of Formula III TRP (SEQ ID NO: 615),
[2081] R₀-R₁-R₂-R₃-R₄-R₅-R₆-R₇-R₈-R₉-R₁₀-R₁₁-R₁₂-R₁₃-R₁₄-R₁₅-R₁₆-R₁₇-R₁₈-R₁₉-R₂₀-R₂₁-R₂₂-R₂₃-R₂₄-R₂₅-R₂₆-R₂₇-R₂₈-R₂₉-R₃₀-R₃₁-R₃₂-R₃₃-R₃₄-R₃₅-R₃₆-R₃₇-R₃₈-R₃₉-R₄₀-R₄₁-R₄₂-R₄₃-R₄₄-R₄₅-R₄₆-[R₄₇]ₓ-R₄₈-R₄₉-R₅₀-R₅₁-R₅₂-R₅₃-R₅₄-R₅₅-R₅₆-R₅₇-R₅₈-R₅₉-R₆₀-R₆₁-R₆₂-R₆₃-R₆₄-R₆₅-R₆₆-R₆₇-R₆₈-R₆₉-R₇₀-R₇₁-R₇₂

[2082] wherein R is a ribonucleotide residue and the consensus for Trp is:
[2083] R₀, R₁₈, R₂₂, R₂₃=absent
[2084] R₁₄, R₂₄, R₃₉, R₄₁, R₅₇, R₇₂=are independently A or absent;
[2085] R₃, R₄, R₁₃, R₆₁, R₇₁=are independently A, C or absent;
[2086] R₆, R₄₄=are independently A, C, G or absent;
[2087] R₂₁=A, C, U or absent;
[2088] R₂, R₇, R₁₅, R₂₅, R₃₃, R₃₄, R₄₅, R₅₆, R₆₃=are independently A, G or absent;
[2089] R₅₅=A, G, U or absent;
[2090] R₄₆=A, U or absent;
[2091] R₃₇, R₃₈, R₅₅, R₆₀, R₆₂=are independently C or absent;
[2092] R₁₂, R₂₆, R₂₇, R₃₅, R₄₀, R₄₈, R₆₇=are independently C, G or absent;
[2093] R₃₂, R₄₃, R₆₈=are independently C, G, U or absent;
[2094] R₁₁, R₁₆, R₂₈, R₃₁, R₄₉, R₅₉, R₆₅, R₇₀=are independently C, U or absent;
[2095] R₁, R₉, R₁₀, R₁₉, R₂₀, R₅₀, R₅₂, R₆₉=are independently G or absent;
[2096] R₅, R₈, R₂₉, R₃₀, R₄₂, R₅₁, R₆₄, R₆₆=are independently G, U or absent;
[2097] R₁₇, R₃₆, R₅₃, R₅₄=are independently U or absent;
[2098] [R₄₇]ₓ=N or absent;
[2099] wherein, e.g., x=1-271 (e.g., x=1-250, x=1-225, x=1-200, x=1-175, x=1-150, x=1-125, x=1-100, x=1-75, x=1-50, x=1-40, x=1-30, x=1-29, x=1-28, x=1-27, x=1-26, x=1-25, x=1-24, x=1-23, x=1-22, x=1-21, x=1-20, x=1-19, x=1-18, x=1-17, x=1-16, x=1-15, x=1-14, x=1-13, x=1-12, x=1-11, x=1-10, x=10-271, x=20-271, x=30-271, x=40-271, x=50-271, x=60-271, x=70-271, x=80-271, x=100-271, x=125-271, x=150-271, x=175-271, x=200-271, x=225-271, x=1, x=2, x=3, x=4, x=5, x=6, x=7, x=8, x=9, x=10, x=11, x=12, x=13, x=14, x=15, x=16, x=17, x=18, x=19, x=20, x=21, x=22, x=23, x=24, x=25, x=26, x=27, x=28, x=29, x=30, x=40, x=50, x=60, x=70, x=80, x=90, x=100, x=110, x=125, x=150, x=175, x=200, x=225, x=250, or x=271), provided that the TREM has one or both of the following properties: no more than 15% of the residues are N; or no more than 20 residues are absent.

### Tyrosine TREM Consensus Sequence

[2100] In an embodiment, a TREM disclosed herein comprises the sequence of Formula I TYR (SEQ ID NO: 616),
[2101] R₀-R₁-R₂-R₃-R₄-R₅-R₆-R₇-R₈-R₉-R₁₀-R₁₁-R₁₂-R₁₃-R₁₄-R₁₅-R₁₆-R₁₇-R₁₈-R₁₉-R₂₀-R₂₁-R₂₂-R₂₃-R₂₄-R₂₅-R₂₆-R₂₇-R₂₈-R₂₉-R₃₀-R₃₁-R₃₂-R₃₃-R₃₄-R₃₅-R₃₆-R₃₇-R₃₈-R₃₉-R₄₀-R₄₁-R₄₂-R₄₃-R₄₄-R₄₅-R₄₆-[R₄₇]ₓ-R₄₈-R₄₉-R₅₀-R₅₁-R₅₂-R₅₃-R₅₄-R₅₅-R₅₆-R₅₇-R₅₈-R₅₉-R₆₀-R₆₁-R₆₂-R₆₃-R₆₄-R₆₅-R₆₆-R₆₇-R₆₈-R₆₉-R₇₀-R₇₁-R₇₂

[2102] wherein R is a ribonucleotide residue and the consensus for Tyr is:
[2103] R₀=absent
[2104] R₁₄, R₃₉, R₅₇=are independently A or absent;
[2105] R₄₁, R₄₈, R₅₁, R₇₁=are independently A, C, G or absent;
[2106] R₃, R₄, R₅, R₆, R₉, R₁₀, R₁₂, R₁₃, R₁₆, R₂₅, R₂₆, R₃₀, R₃₁, R₃₂, R₄₂, R₄₄, R₄₅, R₄₆, R₄₉, R₅₀, R₅₈, R₆₂, R₆₃, R₆₆, R₆₇, R₆₈, R₆₉, R₇₀=are independently N or absent;
[2107] R₂₂, R₆₅=are independently A, C, U or absent;
[2108] R₁₅, R₂₄, R₂₇, R₃₃, R₃₇, R₄₀, R₅₆=are independently A, G or absent;
[2109] R₇, R₂₉, R₃₄, R₇₂=are independently A, G, U or absent;
[2110] R₂₃, R₅₃=are independently A, U or absent;
[2111] R₃₅, R₆₀=are independently C or absent;
[2112] R₂₀=C, G or absent;
[2113] R₁, R₂, R₂₈, R₆₁, R₆₄=are independently C, G, U or absent;
[2114] R₁₁, R₁₇, R₂₁, R₄₃, R₅₅=are independently C, U or absent;
[2115] R₁₉, R₅₂=are independently G or absent;
[2116] R₈, R₁₈, R₃₆, R₃₈, R₅₄, R₅₉=are independently U or absent;
[2117] [R₄₇]ₓ=N or absent;
[2118] wherein, e.g., x=1-271 (e.g., x=1-250, x=1-225, x=1-200, x=1-175, x=1-150, x=1-125, x=1-100, x=1-75, x=1-50, x=1-40, x=1-30, x=1-29, x=1-28, x=1-27, x=1-26, x=1-25, x=1-24, x=1-23, x=1-22, x=1-21, x=1-20, x=1-19, x=1-18, x=1-17, x=1-16, x=1-15, x=1-14, x=1-13, x=1-12, x=1-11, x=1-10, x=10-271, x=20-271, x=30-271, x=40-271, x=50-271, x=60-271, x=70-271, x=80-271, x=100-271, x=125-271, x=150-271, x=175-271, x=200-271, x=225-271, x=1, x=2, x=3, x=4, x=5, x=6, x=7, x=8, x=9, x=10, x=11, x=12, x=13, x=14, x=15, x=16, x=17, x=18, x=19, x=20, x=21, x=22, x=23, x=24, x=25, x=26, x=27, x=28, x=29, x=30, x=40, x=50, x=60, x=70, x=80, x=90, x=100, x=110, x=125, x=150, x=175, x=200, x=225, x=250, or x=271), provided that the TREM has one or both of the following properties: no more than 15% of the residues are N; or no more than 20 residues are absent.

[2119] In an embodiment, a TREM disclosed herein comprises the sequence of Formula II TYR (SEQ ID NO: 617),
[2120] R₀-R₁-R₂-R₃-R₄-R₅-R₆-R₇-R₈-R₉-R₁₀-R₁₁-R₁₂-R₁₃-R₁₄-R₁₅-R₁₆-R₁₇-R₁₈-R₁₉-R₂₀-R₂₁-R₂₂-R₂₃-R₂₄-R₂₅-R₂₆-R₂₇-R₂₈-R₂₉-R₃₀-R₃₁-R₃₂-R₃₃-R₃₄-R₃₅-R₃₆-R₃₇-R₃₈-R₃₉-R₄₀-R₄₁-R₄₂-R₄₃-R₄₄-R₄₅-R₄₆-[R₄₇]ₓ-R₄₈-R₄₉-R₅₀-R₅₁-R₅₂-R₅₃-R₅₄-R₅₅-R₅₆-R₅₇-R₅₈-R₅₉-R₆₀-R₆₁-R₆₂-R₆₃-R₆₄-R₆₅-R₆₆-R₆₇-R₆₈-R₆₉-R₇₀-R₇₁-R₇₂

[2121] wherein R is a ribonucleotide residue and the consensus for Tyr is:
[2122] R₀, R₁₈, R₂₃=absent
[2123] R₇, R₉, R₁₄, R₂₄, R₂₆, R₃₄, R₃₉, R₅₇=are independently A or absent;
[2124] R₄₄, R₆₉=are independently A, C or absent;
[2125] R₇₁=A, C, G or absent;
[2126] R₆₈=N or absent;
[2127] R₅₈=A, C, U or absent;
[2128] R₃₃, R₃₇, R₄₁, R₅₆, R₆₂, R₆₃=are independently A, G or absent;
[2129] R₆, R₂₉, R₇₂=are independently A, G, U or absent;
[2130] R₃₁, R₄₅, R₅₃=are independently A, U or absent;
[2131] R₁₃, R₃₅, R₄₉, R₆₀=are independently C or absent;
[2132] R₂₀, R₄₈, R₆₄, R₆₇, R₇₀=are independently C, G or absent;
[2133] R₁, R₂, R₅, R₁₆, R₆₆=are independently C, G, U or absent;
[2134] R₁₁, R₂₁, R₂₈, R₄₃, R₅₅, R₆₁=are independently C, U or absent;
[2135] R₁₀, R₁₅, R₁₉, R₂₅, R₂₇, R₄₀, R₅₁, R₅₂=are independently G or absent;
[2136] R₃, R₄, R₃₀, R₃₂, R₄₂, R₄₆=are independently G, U or absent;
[2137] R₈, R₁₂, R₁₇, R₂₂, R₃₆, R₃₈, R₅₀, R₅₄, R₅₉, R₆₅=are independently U or absent;
[2138] [R₄₇]ₓ=N or absent;
[2139] wherein, e.g., x=1-271 (e.g., x=1-250, x=1-225, x=1-200, x=1-175, x=1-150, x=1-125, x=1-100, x=1-75, x=1-50, x=1-40, x=1-30, x=1-29, x=1-28, x=1-27, x=1-26, x=1-25, x=1-24, x=1-23, x=1-22, x=1-21, x=1-20, x=1-19, x=1-18, x=1-17, x=1-16, x=1-15, x=1-14, x=1-13, x=1-12, x=1-11, x=1-10, x=10-271, x=20-271, x=30-271, x=40-271, x=50-271, x=60-271, x=70-271, x=80-271, x=100-271, x=125-271, x=150-271, x=175-271, x=200-271, x=225-271, x=1, x=2, x=3, x=4, x=5, x=6, x=7, x=8, x=9, x=10, x=11, x=12, x=13, x=14, x=15, x=16, x=17, x=18, x=19, x=20, x=21, x=22, x=23, x=24, x=25, x=26, x=27, x=28, x=29, x=30, x=40, x=50, x=60, x=70, x=80, x=90, x=100, x=110, x=125, x=150, x=175, x=200, x=225, x=250, or x=271), provided that the TREM has one or both of the following properties: no more than 15% of the residues are N; or no more than 20 residues are absent.

[2140] In an embodiment, a TREM disclosed herein comprises the sequence of Formula III TYR (SEQ ID NO: 618),
[2141] R₀-R₁-R₂-R₃-R₄-R₅-R₆-R₇-R₈-R₉-R₁₀-R₁₁-R₁₂-R₁₃-R₁₄-R₁₅-R₁₆-R₁₇-R₁₈-R₁₉-R₂₀-R₂₁-R₂₂-R₂₃-R₂₄-R₂₅-R₂₆-R₂₇-R₂₈-R₂₉-R₃₀-R₃₁-R₃₂-R₃₃-R₃₄-R₃₅-R₃₆-R₃₇-R₃₈-R₃₉-R₄₀-R₄₁-R₄₂-R₄₃-R₄₄-R₄₅-R₄₆-[R₄₇]ₓ-R₄₈-R₄₉-R₅₀-R₅₁-R₅₂-R₅₃-R₅₄-R₅₅-R₅₆-R₅₇-R₅₈-R₅₉-R₆₀-R₆₁-R₆₂-R₆₃-R₆₄-R₆₅-R₆₆-R₆₇-R₆₈-R₆₉-R₇₀-R₇₁-R₇₂

[2142] wherein R is a ribonucleotide residue and the consensus for Tyr is:
[2143] R₀, R₁₈, R₂₃=absent
[2144] R₇, R₉, R₁₄, R₂₄, R₂₆, R₃₄, R₃₉, R₅₇, R₇₂=are independently A or absent;
[2145] R₄₄, R₆₉=are independently A, C or absent;
[2146] R₇₁=A, C, G or absent;
[2147] R₃₇, R₄₁, R₅₆, R₆₂, R₆₃=are independently A, G or absent;
[2148] R₆, R₂₉, R₆₈=are independently A, G, U or absent;
[2149] R₃₁, R₄₅, R₅₅=are independently A, U or absent;
[2150] R₁₃, R₂₈, R₃₅, R₄₉, R₆₀, R₆₁=are independently C or absent;
[2151] R₅, R₄₈, R₆₄, R₆₇, R₇₀=are independently C, G or absent;
[2152] R₁, R₂=are independently C, G, U or absent;
[2153] R₁₁, R₁₆, R₂₁, R₄₃, R₅₅, R₆₆=are independently C, U or absent;
[2154] R₁₀, R₁₅, R₁₉, R₂₀, R₂₅, R₂₇, R₃₃, R₄₀, R₅₁, R₅₂=are independently G or absent;
[2155] R₃, R₄, R₃₀, R₃₂, R₄₂, R₄₆=are independently G, U or absent;
[2156] R₈, R₁₂, R₁₇, R₂₂, R₃₆, R₃₈, R₅₀, R₅₃, R₅₄, R₅₉, R₆₅=are independently U or absent;
[2157] [R₄₇]ₓ=N or absent;
[2158] wherein, e.g., x=1-271 (e.g., x=1-250, x=1-225, x=1-200, x=1-175, x=1-150, x=1-125, x=1-100, x=1-75, x=1-50, x=1-40, x=1-30, x=1-29, x=1-28, x=1-27, x=1-26, x=1-25, x=1-24, x=1-23, x=1-22, x=1-21, x=1-20, x=1-19, x=1-18, x=1-17, x=1-16, x=1-15, x=1-14, x=1-13, x=1-12, x=1-11, x=1-10, x=10-271, x=20-271, x=30-271, x=40-271, x=50-271, x=60-271, x=70-271, x=80-271, x=100-271, x=125-271, x=150-271, x=175-271, x=200-271, x=225-271, x=1, x=2, x=3, x=4, x=5, x=6, x=7, x=8, x=9, x=10, x=11, x=12, x=13, x=14, x=15, x=16, x=17, x=18, x=19, x=20, x=21, x=22, x=23, x=24, x=25, x=26, x=27, x=28, x=29, x=30, x=40, x=50, x=60, x=70, x=80, x=90, x=100, x=110, x=125, x=150, x=175, x=200, x=225, x=250, or x=271), provided that the TREM has one or both of the following properties: no more than 15% of the residues are N; or no more than 20 residues are absent.

### Valine TREM Consensus Sequence

[2159] In an embodiment, a TREM disclosed herein comprises the sequence of Formula I VAL (SEQ ID NO: 619),
[2160] R₀-R₁-R₂-R₃-R₄-R₅-R₆-R₇-R₈-R₉-R₁₀-R₁₁-R₁₂-R₁₃-R₁₄-R₁₅-R₁₆-R₁₇-R₁₈-R₁₉-R₂₀-R₂₁-R₂₂-R₂₃-R₂₄-R₂₅-R₂₆-R₂₇-R₂₈-R₂₉-R₃₀-R₃₁-R₃₂-R₃₃-R₃₄-R₃₅-R₃₆-R₃₇-R₃₈-R₃₉-R₄₀-R₄₁-R₄₂-R₄₃-R₄₄-R₄₅-R₄₆-[R₄₇]ₓ-R₄₈-R₄₉-R₅₀-R₅₁-R₅₂-R₅₃-R₅₄-R₅₅-R₅₆-R₅₇-R₅₈-R₅₉-R₆₀-R₆₁-R₆₂-R₆₃-R₆₄-R₆₅-R₆₆-R₆₇-R₆₈-R₆₉-R₇₀-R₇₁-R₇₂

[2161] wherein R is a ribonucleotide residue and the consensus for Val is:
[2162] R₀, R₂₃=absent;
[2163] R₂₄, R₃₈, R₅₇=are independently A or absent;
[2164] R₀, R₇₂=are independently A, C, G or absent;
[2165] R₂, R₄, R₅, R₆, R₇, R₁₂, R₁₅, R₁₆, R₂₁, R₂₅, R₂₆, R₂₉, R₃₁, R₃₂, R₃₃, R₃₄, R₃₇, R₄₁, R₄₂, R₄₃, R₄₄, R₄₅, R₄₆, R₄₈, R₄₉, R₅₀, R₅₈, R₆₁, R₆₂, R₆₃, R₆₄, R₆₅, R₆₆, R₆₇, R₆₈, R₆₉, R₇₀=are independently N or absent;
[2166] R₁₇, R₃₅, R₅₉=are independently A, C, U or absent;
[2167] R₁₀, R₁₄, R₂₇, R₄₀, R₅₂, R₅₆=are independently A, G or absent;
[2168] R₁, R₃, R₅₁, R₅₃=are independently A, G, U or absent;
[2169] R₃₉=C or absent;
[2170] R₁₃, R₃₀, R₅₅=are independently C, G, U or absent;
[2171] R₁₁, R₂₂, R₂₈, R₆₀, R₇₁=are independently C, U or absent;
[2172] R₁₉=G or absent;
[2173] R₂₀=G, U or absent;
[2174] R₈, R₁₈, R₃₆, R₅₄=are independently U or absent;
[2175] [R₄₇]ₓ=N or absent;
[2176] wherein, e.g., x=1-271 (e.g., x=1-250, x=1-225, x=1-200, x=1-175, x=1-150, x=1-125, x=1-100, x=1-75, x=1-50, x=1-40, x=1-30, x=1-29, x=1-28, x=1-27, x=1-26, x=1-25, x=1-24, x=1-23, x=1-22, x=1-21, x=1-20, x=1-19, x=1-18, x=1-17, x=1-16, x=1-15, x=1-14, x=1-13, x=1-12, x=1-11, x=1-10, x=10-271, x=20-271, x=30-271, x=40-271, x=50-271, x=60-271, x=70-271, x=80-271, x=100-271, x=125-271, x=150-271, x=175-271, x=200-271, x=225-271, x=1, x=2, x=3, x=4, x=5, x=6, x=7, x=8, x=9, x=10, x=11, x=12, x=13, x=14, x=15, x=16, x=17, x=18, x=19, x=20, x=21, x=22, x=23, x=24, x=25, x=26, x=27, x=28, x=29, x=30, x=40, x=50, x=60, x=70, x=80, x=90, x=100, x=110, x=125, x=150, x=175, x=200, x=225, x=250, or x=271), provided that the TREM has one or both of the following properties: no more than 15% of the residues are N; or no more than 20 residues are absent.

[2177] In an embodiment, a TREM disclosed herein comprises the sequence of Formula II VAL (SEQ ID NO: 620),
[2178] R₀-R₁-R₂-R₃-R₄-R₅-R₆-R₇-R₈-R₉-R₁₀-R₁₁-R₁₂-R₁₃-R₁₄-R₁₅-R₁₆-R₁₇-R₁₈-R₁₉-R₂₀-R₂₁-R₂₂-R₂₃-R₂₄-R₂₅-R₂₆-R₂₇-R₂₈-R₂₉-R₃₀-R₃₁-R₃₂-R₃₃-R₃₄-R₃₅-R₃₆-R₃₇-R₃₈-R₃₉-R₄₀-R₄₁-R₄₂-R₄₃-R₄₄-R₄₅-R₄₆-[R₄₇]ₓ-R₄₈-R₄₉-R₅₀-R₅₁-R₅₂-R₅₃-R₅₄-R₅₅-R₅₆-R₅₇-R₅₈-R₅₉-R₆₀-R₆₁-R₆₂-R₆₃-R₆₄-R₆₅-R₆₆-R₆₇-R₆₈-R₆₉-R₇₀-R₇₁-R₇₂

[2179] wherein R is a ribonucleotide residue and the consensus for Val is:
[2180] R₀, R₁₈, R₂₃=absent;
[2181] R₂₄, R₃₈, R₅₇=are independently A or absent;
[2182] R₆₄, R₇₀, R₇₂=are independently A, C, G or absent;
[2183] R₁₅, R₁₆, R₂₆, R₂₉, R₃₁, R₃₂, R₄₃, R₄₄, R₄₅, R₄₉, R so, R₅₈, R₆₂, R₆₅=are independently N or absent;
[2184] R₆, R₁₇, R₃₄, R₃₇, R₄₁, R₅₉=are independently A, C, U or absent;
[2185] R₀, R₁₀, R₁₄, R₂₇, R₄₀, R₄₆, R$1, R₅₂, R₅₆=are independently A, G or absent;
[2186] R₇, R₁₂, R₂₅, R₃₃, R₅₃, R₆₃, R₆₆, R₆₈=are independently A, G, U or absent;
[2187] R₆₉=A, U or absent;
[2188] R₃₉=C or absent;
[2189] R₅, R₆₇=are independently C, G or absent;
[2190] R₂, R₄, R₁₃, R₄₈, R₅₅, R₆₁=are independently C, G, U or absent;
[2191] R₁₁, R₂₂, R₂₈, R₃₀, R₃₅, R₆₀, R₇₁=are independently C, U or absent;
[2192] R₁₉=G or absent;
[2193] R₁, R₃, R₂₀, R₄₂=are independently G, U or absent;
[2194] R₈, R₂₁, R₃₆, R₅₄=are independently U or absent;
[2195] [R₄₇]ₓ=N or absent;
[2196] wherein, e.g., x=1-271 (e.g., x=1-250, x=1-225, x=1-200, x=1-175, x=1-150, x=1-125, x=1-100, x=1-75, x=1-50, x=1-40, x=1-30, x=1-29, x=1-28, x=1-27, x=1-26, x=1-25, x=1-24, x=1-23, x=1-22, x=1-21, x=1-20, x=1-19, x=1-18, x=1-17, x=1-16, x=1-15, x=1-14, x=1-13, x=1-12, x=1-11, x=1-10, x=10-271, x=20-271, x=30-271, x=40-271, x=50-271, x=60-271, x=70-271, x=80-271, x=100-271, x=125-271, x=150-271, x=175-271, x=200-271, x=225-271, x=1, x=2, x=3, x=4, x=5, x=6, x=7, x=8, x=9, x=10, x=11, x=12, x=13, x=14, x=15, x=16, x=17, x=18, x=19, x=20, x=21, x=22, x=23, x=24, x=25, x=26, x=27, x=28, x=29, x=30, x=40, x=50, x=60, x=70, x=80, x=90, x=100, x=110, x=125, x=150, x=175, x=200, x=225, x=250, or x=271), provided that the TREM has one or both of the following properties: no more than 15% of the residues are N; or no more than 20 residues are absent.

[2197] In an embodiment, a TREM disclosed herein comprises the sequence of Formula III VAL (SEQ ID NO: 621),
[2198] R₀-R₁-R₂-R₃-R₄-R₅-R₆-R₇-R₈-R₉-R₁₀-R₁₁-R₁₂-R₁₃-R₁₄-R₁₅-R₁₆-R₁₇-R₁₈-R₁₉-R₂₀-R₂₁-R₂₂-R₂₃-R₂₄-R₂₅-R₂₆-R₂₇-R₂₈-R₂₉-R₃₀-R₃₁-R₃₂-R₃₃-R₃₄-R₃₅-R₃₆-R₃₇-R₃₈-R₃₉-R₄₀-R₄₁-R₄₂-R₄₃-R₄₄-R₄₅-R₄₆-[R₄₇]ₓ-R₄₈-R₄₉-R₅₀-R₅₁-R₅₂-R₅₃-R₅₄-R₅₅-R₅₆-R₅₇-R₅₈-R₅₉-R₆₀-R₆₁-R₆₂-R₆₃-R₆₄-R₆₅-R₆₆-R₆₇-R₆₈-R₆₉-R₇₀-R₇₁-R₇₂

[2199] wherein R is a ribonucleotide residue and the consensus for Val is:
[2200] R₀, R₁₈, R₂₃=absent
[2201] R₂₄, R₃₈, R₄₀, R₅₇, R₇₂=are independently A or absent;
[2202] R₂₉, R₆₄, R₇₀=are independently A, C, G or absent;
[2203] R₄₉, R₅₀, R₆₂=are independently N or absent;
[2204] R₁₆, R₂₆, R₃₁, R₃₂, R₃₇, R₄₁, R₄₃, R₅₉, R₆₅=are independently A, C, U or absent;
[2205] R₉, R₁₄, R₂₇, R₄₆, R₅₂, R₅₆, R₆₆=are independently A, G or absent;
[2206] R₇, R₁₂, R₂₅, R₃₃, R₄₄, R₄₅, R₅₃, R₅₈, R₆₃, R₆₈=are independently A, G, U or absent;
[2207] R₆₉=A, U or absent;
[2208] R₃₉=C or absent;
[2209] R₅, R₆₇=are independently C, G or absent;
[2210] R₂, R₄, R₁₃, R₁₅, R₄₈, R₅₅=are independently C, G, U or absent;
[2211] R₆, R₁₁, R₂₂, R₂₈, R₃₀, R₃₄, R₃₅, R₆₀, R₆₁, R₇₁=are independently C, U or absent;
[2212] R₁₀, R₁₉, R₅₁=are independently G or absent;
[2213] R₁, R₃, R₂₀, R₄₂=are independently G, U or absent;
[2214] R₈, R₁₇, R₂₁, R₃₆, R₅₄=are independently U or absent;
[2215] [R₄₇]ₓ=N or absent;
[2216] wherein, e.g., x=1-271 (e.g., x=1-250, x=1-225, x=1-200, x=1-175, x=1-150, x=1-125, x=1-100, x=1-75, x=1-50, x=1-40, x=1-30, x=1-29, x=1-28, x=1-27, x=1-26, x=1-25, x=1-24, x=1-23, x=1-22, x=1-21, x=1-20, x=1-19, x=1-18, x=1-17, x=1-16, x=1-15, x=1-14, x=1-13, x=1-12, x=1-11, x=1-10, x=10-271, x=20-271, x=30-271, x=40-271, x=50-271, x=60-271, x=70-271, x=80-271, x=100-271, x=125-271, x=150-271, x=175-271, x=200-271, x=225-271, x=1, x=2, x=3, x=4, x=5, x=6, x=7, x=8, x=9, x=10, x=11, x=12, x=13, x=14, x=15, x=16, x=17, x=18, x=19, x=20, x=21, x=22, x=23, x=24, x=25, x=26, x=27, x=28, x=29, x=30, x=40, x=50, x=60, x=70, x=80, x=90, x=100, x=110, x=125, x=150, x=175, x=200, x=225, x=250, or x=271), provided that the TREM has one or both of the following properties: no more than 15% of the residues are N; or no more than 20 residues are absent.

### Variable Region Consensus Sequence

[2217] In an embodiment, a TREM disclosed herein comprises a variable region at position R₄₇. In an embodiment, the variable region is 1-271 ribonucleotides in length (e.g. 1-250, 1-225, 1-200, 1-175, 1-150, 1-125, 1-100, 1-75, 1-50, 1-40, 1-30, 1-29, 1-28, 1-27, 1-26, 1-25, 1-24, 1-23, 1-22, 1-21, 1-20, 1-19, 1-18, 1-17, 1-16, 1-15, 1-14, 1-13, 1-12, 1-11, 1-10, 10-271, 20-271, 30-271, 40-271, 50-271, 60-271, 70-271, 80-271, 100-271, 125-271, 150-271, 175-271, 200-271, 225-271, 1, 2, 3, 4, 5, 6, 7, 8, 9, 10, 11, 12, 13, 14, 15, 16, 17, 18, 19, 20, 21, 22, 23, 24, 25, 26, 27, 28, 29, 30, 40, 50, 60, 70, 80, 90, 100, 110, 125, 150, 175, 200, 225, 250, or 271 ribonucleotides). In an embodiment, the variable region comprises any one, all or a combination of Adenine, Cytosine, Guanine or Uracil.

[2218] In an embodiment, the variable region comprises a ribonucleic acid (RNA) sequence encoded by a deoxyribonucleic acid (DNA) sequence disclosed in Table 4, e.g., any one of SEQ ID NOs: 452-561 disclosed in Table 4.

TABLE 4
Exemplary variable region sequences.

| | SEQ ID NO | SEQUENCE |
|---|---|---|
| 1 | 452 | AAAATATAAATATATTTC |
| 2 | 453 | AAGCT |
| 3 | 454 | AAGTT |
| 4 | 455 | AATTCTTCGGAATGT |
| 5 | 456 | AGA |
| 6 | 457 | AGTCC |
| 7 | 458 | CAACC |
| 8 | 459 | CAATC |
| 9 | 460 | CAGC |
| 10 | 461 | CAGGCGGGTTCTGCCCGCGC |
| 11 | 462 | CATACCTGCAAGGGTATC |
| 12 | 463 | CGACCGCAAGGTTGT |
| 13 | 464 | CGACCTTGCGGTCAT |
| 14 | 465 | CGATGCTAATCACATCGT |
| 15 | 466 | CGATGGTGACATCAT |
| 16 | 467 | CGATGGTTTACATCGT |
| 17 | 468 | CGCCGTAAGGTGT |
| 18 | 469 | CGCCTTAGGTGT |
| 19 | 470 | CGCCTTTCGACGCGT |
| 20 | 471 | CGCTTCACGGCGT |
| 21 | 472 | CGGCAGCAATGCTGT |
| 22 | 473 | CGGCTCCGCCTTC |
| 23 | 474 | CGGGTATCACAGGGTC |
| 24 | 475 | CGGTGCGCAAGCGCTGT |
| 25 | 476 | CGTACGGGTGACCGTACC |
| 26 | 477 | CGTCAAAGACTTC |
| 27 | 478 | CGTCGTAAGACTT |
| 28 | 479 | CGTTGAATAAACGT |
| 29 | 480 | CTGTC |
| 30 | 481 | GGCC |
| 31 | 482 | GGGGATT |
| 32 | 483 | GGTC |
| 33 | 484 | GGTTT |
| 34 | 485 | GTAG |
| 35 | 486 | TAACTAGATACTTTCAGAT |
| 36 | 487 | TACTCGTATGGGTGC |
| 37 | 488 | TACTTTGCGGTGT |
| 38 | 489 | TAGGCGAGTAACATCGTGC |
| 39 | 490 | TAGGCGTGAATAGCGCCTC |
| 40 | 491 | TAGGTCGCGAGAGCGGCGC |
| 41 | 492 | TAGGTCGCGTAAGCGGCGC |
| 42 | 493 | TAGGTGGTTATCCACGC |
| 43 | 494 | TAGTC |
| 44 | 495 | TAGTT |
| 45 | 496 | TATACGTGAAAGCGTATC |
| 46 | 497 | TATAGGGTCAAAAACTCTATC |
| 47 | 498 | TATGCAGAAATACCTGCATC |
| 48 | 499 | TCCCCATACGGGGGC |
| 49 | 500 | TCCCGAAGGGGTTC |
| 50 | 50 | TCTACGTATGTGGGC |
| 51 | 502 | TCTCATAGGAGTTC |
| 52 | 503 | TCTCCTCTGGAGGC |
| 53 | 504 | TCTTAGCAATAAGGT |
| 54 | 505 | TCTTGTAGGAGTTC |
| 55 | 506 | TGAACGTAAGTTCGC |
| 56 | 507 | TGAACTGCGAGGTTCC |
| 57 | 508 | TGAC |
| 58 | 509 | TGACCGAAAGGTCGT |
| 59 | 510 | TGACCGCAAGGTCGT |
| 60 | 511 | TGAGCTCTGCTCTC |
| 61 | 512 | TGAGGCCTCACGGCCTAC |
| 62 | 513 | TGAGGGCAACTTCGT |
| 63 | 514 | TGAGGGTCATACCTCC |
| 64 | 515 | TGAGGGTGCAAATCCTCC |
| 65 | 516 | TGCCGAAAGGCGT |
| 66 | 517 | TGCCGTAAGGCGT |
| 67 | 518 | TGCGGTCTCCGCGC |
| 68 | 519 | TGCTAGAGCAT |
| 69 | 520 | TGCTCGTATAGAGCTC |
| 70 | 521 | TGGACAATTGTCTGC |
| 71 | 522 | TGGACAGATGTCCGT |
| 72 | 523 | TGGACAGGTGTCCGC |
| 73 | 524 | TGGACGGTTGTCCGC |
| 74 | 525 | TGGACTTGTGGTC |
| 75 | 526 | TGGAGATTCTCTCCGC |
| 76 | 527 | TGGCATAGGCCTGC |
| 77 | 528 | TGGCTTATGTCTAC |
| 78 | 529 | TGGGAGTTAATCCCGT |
| 79 | 530 | TGGGATCTTCCCGC |
| 80 | 531 | TGGGCAGAAATGTCTC |
| 81 | 532 | TGGGCGTTCGCCCGC |
| 82 | 533 | TGGGCTTCGCCCGC |
| 83 | 534 | TGGGGGATAACCCCGT |
| 84 | 535 | TGGGGGTTTCCCCGT |
| 85 | 536 | TGGT |
| 86 | 537 | TGGTGGCAACACCGT |
| 87 | 538 | TGGTTTATAGCCGT |
| 88 | 539 | TGTACGGTAATACCGTACC |
| 89 | 540 | TGTCCGCAAGGACGT |
| 90 | 541 | TGTCCTAACGGACGT |
| 91 | 542 | TGTCCTATTAACGGACGT |
| 92 | 543 | TGTCCTTCACGGGCGT |
| 93 | 544 | TGTCTTAGGACGT |
| 94 | 545 | TGTGCGTTAACGCGTACC |
| 95 | 546 | TGTGTCGCAAGGCACC |
| 96 | 547 | TGTTCGTAAGGACTT |
| 97 | 548 | TTCACAGAAATGTGTC |
| 98 | 549 | TTCCCTCGTGGAGT |
| 99 | 550 | TTCCCTCTGGGAGC |
| 100 | 551 | TTCCCTTGTGGATC |
| 101 | 552 | TTCCTTCGGGAGC |
| 102 | 553 | TTCTAGCAATAGAGT |
| 103 | 554 | TTCTCCACTGGGGAGC |
| 104 | 555 | TTCTCGAGAGGGAGC |
| 105 | 556 | TTCTCGTATGAGAGC |
| 106 | 557 | TTTAAGGTTTTCCCTTAAC |
| 107 | 558 | TTTCATTGTGGAGT |
| 108 | 559 | TTTCGAAGGAATCC |
| 109 | 560 | TTTCTTCGGAAGC |
| 110 | 561 | TTTGGGGCAACTCAAC |

### Corresponding Nucleotide Positions

[2219] To determine if a selected nucleotide position in a candidate sequence corresponds to a selected position in a reference sequence (e.g., SEQ ID NO: 622, SEQ ID NO: 623, SEQ ID NO: 624), one or more of the following Evaluations is performed.

### Evaluation A:

[2220] 1. The candidate sequence is aligned with each of the consensus sequences in Tables 9 and 10. The consensus sequence(s) having the most positions aligned (and which has at least 60% of the positions of the candidate sequence aligned) is selected.

[2221] The alignment is performed as is follows. The candidate sequence and an isodecoder consensus sequence from Tables 10A-10B are aligned based on a global pairwise alignment calculated with the Needleman-Wunsch algorithm when run with match scores from Table 11, a mismatch penalty of −1, a gap opening penalty of −1, and a gap extension penalty of −0.5, and no penalty for end gaps. The alignment with the highest overall alignment score is then used to determine the percent similarity between the candidate and the consensus sequence by counting the number of matched positions in the alignment, dividing it by the larger of the number of non-N bases in the candidate sequence or the consensus sequence, and multiplying the result by 100. In cases where multiple alignments (of the candidate and a single consensus sequence) tie for the same score, the percent similarity is the largest percent similarity calculated from the tied alignments. This process is repeated for the candidate sequence with each of the remaining isodecoder consensus sequences in Tables 10A-10B, and the alignment resulting in the greatest percent similarity is selected. If this alignment has a percent similarity equal to or greater than 60%, it is considered a valid alignment and used to relate positions in the candidate sequence to those in the consensus sequence, otherwise the candidate sequence is considered to have not aligned to any of the isodecoder consensus sequences. If there is a tie at this point, all tied consensus sequences are taken forward to step 2 in the analysis.

[2222] 2. Using the selected consensus sequence(s) from step 1, one determines the consensus sequence position number that aligns with the selected position (e.g., a modified position) in the candidate sequence. One then assigns the position number of the aligned position in the consensus sequence to the selected position in the candidate sequence, in other words, the selected position in the candidate sequence is numbered according to the numbering of the consensus sequence. If there were tied consensus sequences from step one, and they give different position numbers in this step 2, then all such position numbers are taken forward to step 5.

[2223] 3. The reference sequence is aligned with the consensus sequence chosen in step 1. The alignment is performed as described in step 1.

[2224] 4. From the alignment in step 3, one determines the consensus sequence position number that aligns with the selected position (e.g., a modified position) in the reference sequence. One then assigns the position number of the aligned position in the consensus sequence to the selected position in the reference sequence, in other words, the selected position in the reference sequence is numbered according to the numbering of the consensus sequence. If there is a tie at this point, all tied consensus sequences are taken forward to step 5 in the analysis.

[2225] 5. If a value for a position number determined for the reference sequence in step 2 is the same as the value for the position number determined for the candidate sequence in step 4, the positions are defined as corresponding.

### Evaluation B:

[2226] The reference sequence (e.g., a TREM sequence described herein) and the candidate sequence are aligned with one another. The alignment is performed as follows.

[2227] The reference sequence and the candidate sequence are aligned based on a global pairwise alignment calculated with the Needleman-Wunsch algorithm when run with match scores from Table 11, a mismatch penalty of −1, a gap opening penalty of −1, and a gap extension penalty of −0.5, and no penalty for end gaps. The alignment with the highest overall alignment score is then used to determine the percent similarity between the candidate and reference sequence by counting the number of matched based in the alignment, dividing it by the larger of the number of non-N bases in the candidate or reference sequence, and multiplying the result by 100. In cases where multiple alignments tie for the same score, the percent similarity is the largest percent similarity calculated from the tied alignments. If this alignment has a percent similarity equal to or greater than 60%, it is considered a valid alignment and used to relate positions in the candidate sequence to those in the reference sequence, otherwise the candidate sequence is considered to have not aligned to the reference sequence.

[2228] If the selected nucleotide position in the reference sequence (e.g., a modified position) is paired with a selected nucleotide position (e.g., a modified position) in the candidate sequence, the positions are defined as corresponding.

### Evaluation C:

[2229] The candidate sequence is assigned a nucleotide position number according to the comprehensive tRNA numbering system (CtNS), also referred to as the tRNAviz method (e.g., as described in Lin et al., Nucleic Acids Research, 47: W1, pages W542-W547, 2 Jul. 2019), which serves as a global numbering system for tRNA molecules. The alignment is performed as follows.

[2230] 1. The candidate sequence is assigned a nucleotide position according to the tRNAviz method. For a novel sequence not present in the tRNAviz database, the numbering for the closest sequence in the database is obtained. For example, if a TREM differs at any given nucleotide position from a sequence in the database, the numbering for the tRNA having the wildtype sequence at said given nucleotide position is used.

[2231] 2. The reference sequence is assigned a nucleotide position according to the method described in 1.

[2232] 3. If a value for a position number determined for the reference sequence in step 1 is the same as the value for the position number determined for the candidate sequence in step 2, the positions are defined as corresponding.

[2233] If the selected position in the reference sequence and the candidate sequence are found to be corresponding in at least one of Evaluations A, B, and C, the positions correspond. For example, if two positions are found to be corresponding under Evaluation A, but do not correspond under Evaluation B or Evaluation C, the positions are defined as corresponding. Similarly, if two positions are found to be corresponding under Evaluation B, but do not correspond under Evaluation A or Evaluation C, the positions are defined as corresponding. In addition, if two positions are found to be corresponding under Evaluation C, but do not correspond under Evaluation A or Evaluation B, the positions are defined as corresponding

[2234] The numbering given above is used for ease of presentation and does not imply a required sequence. If more than one Evaluation is performed, they can be performed in any order.

TABLE 10A
Consensus sequence computationally generated for each isodecoder
by aligning members of the isodecoder family

| SEQ ID | Amino | | |
|---|---|---|---|
| NO. | Acid | Anticodon | Consensus sequence |
| 1200 | Ala | AGC | GGGGAATTAGCTCAAGTGGTAGAGCGCTTG |
| | | | CTTAGCATGCAAGAGGTAGTGGGATCGATG |
| | | | CCCACATTCTCCA |
| 1201 | Ala | CGC | GGGGATGTAGCTCAGTGGTAGAGCGCATGC |
| | | | TTCGCATGTATGAGGTCCCGGGTTCGATCCC |
| | | | CGGCATCTCCA |
| 1202 | Ala | TGC | GGGGGTGTAGCTCAGTGGTAGAGCGCATGC |
| | | | TTTGCATGTATGAGGCCCCGGGTTCGATCCC |
| | | | CGGCACCTCCA |
| 1203 | Arg | ACG | GGGCCAGTGGCGCAATGGATAACGCGTCTG |
| | | | ACTACGGATCAGAAGATTCCAGGTTCGACTC |
| | | | CTGGCTGGCTCG |
| 1204 | Arg | CCG | GGCCGCGTGGCCTAATGGATAAGGCGTCTG |
| | | | ATTCCGGATCAGAAGATTGAGGGTTCGAGTC |
| | | | CCTTCGTGGTCG |
| 1205 | Arg | CCT | GCCCCAGTGGCCTAATGGATAAGGCACTGG |
| | | | CCTCCTAAGCCAGGGATTGTGGGTTCGAGTC |
| | | | CCACCTGGGGTA |
| 1206 | Arg | TCG | GACCGCGTGGCCTAATGGATAAGGCGTCTG |
| | | | ACTTCGGATCAGAAGATTGAGGGTTCGAGTC |
| | | | CCTCCGTGGTCG |
| 1207 | Arg | TCT | GGCTCTGTGGCGCAATGGATNAGCGCATTG |
| | | | GACTTCTAATTCAAAGGTTGCGGGTTCGAGT |
| | | | CCCNCCAGAGTCG |
| 1208 | Asn | GTT | GTCTCTGTGGCGCAATCGGTTAGCGCGTTCG |
| | | | GCTGTTAACCGNAAAGGTTGGTGGTTCGAGC |
| | | | CCACCCAGGGACG |
| 1209 | Asp | GTC | TCCTCGTTAGTATAGTGGTGAGTATCCCCGC |
| | | | CTGTCACGCGGGAGACCGGGGTTCGATTCCC |
| | | | CGACGGGGAG |
| 1210 | Cys | GCA | GGGGGTATAGCTCAGNGGGTAGAGCATTTG |
| | | | ACTGCAGATCAAGAGGTCCCCGGTTCAAATC |
| | | | CGGGTGCCCCCT |
| 1211 | Gln | CTG | GGTTCCATGGTGTAATGGTNAGCACTCTGGA |
| | | | CTCTGAATCCAGCGATCCGAGTTCAAGTCTC |
| | | | GGTGGAACCT |
| 1212 | Gln | TTG | GGTCCCATGGTGTAATGGTTAGCACTCTGGA |
| | | | CTTTGAATCCAGCGATCCGAGTTCAAATCTC |
| | | | GGTGGGACCT |
| 1213 | Glu | CTC | TCCCTGGTGGTCTAGTGGTTAGGATTCGGCG |
| | | | CTCTCACCGCCGCGGCCCGGGTTCGATTCCC |
| | | | GGTCAGGGAA |
| 1214 | Glu | TTC | TCCCTGGTGGTCTAGTGGCTAGGATTCGGCG |
| | | | CTTTCACCGCNGCGGCCCGGGTTCGATTCCC |
| | | | GGTCAGGGAA |
| 1215 | Gly | CCC | GCATTGGTGGTTCAGTGGTAGAATTCTCGCC |
| | | | TCCCACGCNGGAGACCCGGGTTCGATTCCCG |
| | | | GCCAATGCA |
| 1216 | Gly | GCC | GCATTGGTGGTTCAGTGGTAGAATTCTCGCC |
| | | | TGCCACGCGGGAGGCCCGGGTTCGATTCCCG |
| | | | GCCAATGCA |
| 1217 | Gly | TCC | GCGTTGGTGGTATAGTGGTGAGCATAGCTGC |
| | | | CTTCCAAGCAGTTGACCCGGGTTCGATTCCC |
| | | | GGCCAACGCA |
| 1218 | Ile | AAT | GGCCGGTTAGCTCAGTTGGTTAGAGCGTGGT |
| | | | GCTAATAACGCCAAGGTCGCGGGTTCGATCC |
| | | | CCGTACGGGCCA |
| 1219 | Ile | TAT | GCTCCAGTGGCGCAATCGGTTAGCGCGCGGT |
| | | | ACTTATAATGCCGAGGTTGTGAGTTCGAGCC |
| | | | TCACCTGGAGCA |
| 1220 | Leu | AAG | GGTAGCGTGGCCGAGCGGTCTAAGGCGCTG |
| | | | GATTAAGGCTCCAGTCTCTTCGGGGGCGTGG |
| | | | GTTCGAATCCCACCGCTGCCA |
| 1221 | Leu | CAA | GTCAGGATGGCCGAGTGGTCNTAAGGCGCC |
| | | | AGACTCAAGTTCTGGTCTCCGNATGGAGGCG |
| | | | TGGGTTCGAATCCCACTTCTGACA |
| 1222 | Leu | CAG | GTCAGGATGGCCGAGCGGTCTAAGGCGCTG |
| | | | CGTTCAGGTCGCAGTCTCCCCTGGAGGCGTG |
| | | | GGTTCGAATCCCACTCCTGACA |
| 1223 | Leu | TAA | ACCAGGATGGCCGAGTGGTTAAGGCGTTGG |
| | | | ACTTAAGATCCAATGGACAGATGTCCGCGTG |
| | | | GGTTCGAACCCCACTCCTGGTA |
| 1224 | Leu | TAG | GGTAGCGTGGCCGAGCGGTCTAAGGCGCTG |
| | | | GATTTAGGCTCCAGTCTCTTCGGNGGCGTGG |
| | | | GTTCGAATCCCACCGCTGCCA |
| 1225 | Lys | CTT | GCCCGGCTAGCTCAGTCGGTAGAGCATGAG |
| | | | ACTCTTAATCTCAGGGTCGTGGGTTCGAGCC |
| | | | CCACGTTGGGCGNNN |
| 1226 | Lys | TTT | GCCTGGATAGCTCAGTCGGTAGAGCATCAG |
| | | | ACTTTTAATCTGAGGGTCCAGGGTTCAAGTC |
| | | | CCTGTTCAGGCG |
| 1227 | Met | CAT | GCCCTCTTAGCGCAGTNGGCAGCGCGTCAGT |
| | | | CTCATAATCTGAAGGTCCTGAGTTCGAGCCT |
| | | | CAGAGAGGGCA |
| 1228 | Phe | GAA | GCCGAAATAGCTCAGTTGGGAGAGCGTTAG |
| | | | ACTGAAGATCNTAAAGGTCCCTGGTTCAATC |
| | | | CCGGGTTTCGGCA |
| 1229 | Pro | AGG | GGCTCGTTGGTCTAGGGGTATGATTCTCGCT |
| | | | TAGGATGCGAGAGGTCCCGGGTTCAAATCC |
| | | | CGGACGAGCCC |
| 1230 | Pro | CGG | GGCTCGTTGGTCTAGGGGTATGATTCTCGCT |
| | | | TCGGGTGCGAGAGGTCCCGGGTTCAAATCCC |
| | | | GGACGAGCCC |
| 1231 | Pro | TGG | GGCTCGTTGGTCTAGGGGTATGATTCTCGCT |
| | | | TTGGGTGCGAGAGGTCCCGGGTTCAAATCCC |
| | | | GGACGAGCCC |
| 1232 | Ser | AGA | GTAGTCGTGGCCGAGTGGTTAAGGCGATGG |
| | | | ACTAGAAATCCATTGGGGTTTCCCCGCGCAG |
| | | | GTTCGAATCCTGCCGACTACG |
| 1233 | Ser | CGA | GCTGTGATGGCCGAGTGGTTAAGGCGTTGG |
| | | | ACTCGAAATCCAATGGGGTCTCCCCGCGCAG |
| | | | GTTCGAATCCTGCTCACAGCG |
| 1234 | Ser | GCT | GACGAGGNNTGGCCGAGTGGTTAAGGCGAT |
| | | | GGACTGCTAATCCATTGTGCTCTGCACGCGT |
| | | | GGGTTCGAATCCCATCCTCGTCG |
| 1235 | Ser | TGA | GTAGTCGTGGCCGAGTGGTTAAGGCGATGG |
| | | | ACTTGAAATCCATTGGGGTCTCCCCGCGCAG |
| | | | GTTCGAATCCTGCCGGCTACG |
| 1236 | Thr | AGT | GGCTCCGTGGCTTAGCTGGTTAAAGCGCCTG |
| | | | TCTAGTAAACAGGAGATCCTGGGTTCGAATC |
| | | | CCAGCGGGGCCT |
| 1237 | Thr | CGT | GGCNCTGTGGCTNAGTNGGNTAAAGCGCCG |
| | | | GTCTCGTAAACCNGGAGATCNTGGGTTCGA |
| | | | ATCCCANCNGGGCCT |
| 1238 | Thr | TGT | GGCTCCATAGCTCAGNGGGTTAGAGCACTG |
| | | | GTCTTGTAAACCAGGGGTCGCGAGTTCAAAT |
| | | | CTCGCTGGGGCCT |
| 1239 | Trp | CCA | GACCTCGTGGCGCAACGGTAGCGCGTCTGA |
| | | | CTCCAGATCAGAAGGTTGCGTGTTCAAATCA |
| | | | CGTCGGGGTCA |
| 1240 | Tyr | GTA | CCTTCGATAGCTCAGCTGGTAGAGCGGAGG |
| | | | ACTGTAGATCCTTAGGTCGCTGGTTCGATTC |
| | | | CGGCTCGAAGGA |
| 1241 | Val | AAC | GTTTCCGTAGTGTAGTGGTTATCACGTTCGC |
| | | | CTAACACGCGAAAGGTCCCCGGTTCGAAAC |
| | | | CGGGCGGAAACA |
| 1242 | Val | CAC | GTTTCCGTAGTGTAGTGGTTATCACGTTCGC |
| | | | CTCACACGCGAAAGGTCCCCGGTTCGAAAC |
| | | | CGGGCGGAAACA |
| 1243 | Val | TAC | GGTTCCATAGTGTAGTGGTTATCACGTCTGC |
| | | | TTTACACGCAGAAGGTCCTGGGTTCGAGCCC |
| | | | CAGTGGAACCA |
| 1244 | iMet | CAT | AGCAGAGTGGCGCAGCGGAAGCGTGCTGGG |
| | | | CCCATAACCCAGAGGTCGATGGATCGAAAC |
| | | | CATCCTCTGCTA |

TABLE 10B
Consensus sequence computationally generated for each isodecoder
by aligning members of the isodecoder family

| SEQ ID | Amino | | |
|---|---|---|---|
| NO | Acid | Anticodon | Consensus sequence |
| 1245 | Ala | AGC | GGGGAATTAGCTCAAGTGGTAGAGCGCTTGC |
| | | | TTAGCATGCAAGAGGTAGTGGGATCGATGCC |
| | | | CACATTCTCCANNN |
| 1246 | Ala | CGC | GGGGATGTAGCTCAGTGGTAGAGCGCATGCT |
| | | | TCGCATGTATGAGGTCCCGGGTTCGATCCCC |
| | | | GGCATCTCCANNN |
| 1247 | Ala | TGC | GGGGGTGTAGCTCAGTGGTAGAGCGCATGCT |
| | | | TTGCATGTATGAGGCCCCGGGTTCGATCCCC |
| | | | GGCACCTCCANNN |
| 1248 | Arg | ACG | GGGCCAGTGGCGCAATGGATAACGCGTCTGA |
| | | | CTACGGATCAGAAGATTCCAGGTTCGACTCC |
| | | | TGGCTGGCTCGNNN |
| 1249 | Arg | CCG | GGCCGCGTGGCCTAATGGATAAGGCGTCTGA |
| | | | TTCCGGATCAGAAGATTGAGGGTTCGAGTCC |
| | | | CTTCGTGGTCGNNN |
| 1250 | Arg | CCT | GCCCCAGTGGCCTAATGGATAAGGCACTGGC |
| | | | CTCCTAAGCCAGGGATTGTGGGTTCGAGTCC |
| | | | CACCTGGGGTANNN |
| 1251 | Arg | TCG | GACCGCGTGGCCTAATGGATAAGGCGTCTGA |
| | | | CTTCGGATCAGAAGATTGAGGGTTCGAGTCC |
| | | | CTCCGTGGTCGNNN |
| 1252 | Arg | TCT | GGCTCTGTGGCGCAATGGATNAGCGCATTGG |
| | | | ACTTCTAATTCAAAGGTTGCGGGTTCGAGTC |
| | | | CCNCCAGAGTCGNNN |
| 1253 | Asn | GTT | GTCTCTGTGGCGCAATCGGTTAGCGCGTTCG |
| | | | GCTGTTAACCGNAAAGGTTGGTGGTTCGAGC |
| | | | CCACCCAGGGACGNNN |
| 1254 | Asp | GTC | TCCTCGTTAGTATAGTGGTGAGTATCCCCGCC |
| | | | TGTCACGCGGGAGACCGGGGTTCGATTCCCC |
| | | | GACGGGGAGNNN |
| 1255 | Cys | GCA | GGGGGTATAGCTCAGNGGGTAGAGCATTTGA |
| | | | CTGCAGATCAAGAGGTCCCCGGTTCAAATCC |
| | | | GGGTGCCCCCTNNN |
| 1256 | Gln | CTG | GGTTCCATGGTGTAATGGTNAGCACTCTGGA |
| | | | CTCTGAATCCAGCGATCCGAGTTCAAGTCTC |
| | | | GGTGGAACCTNNN |
| 1257 | Gln | TTG | GGTCCCATGGTGTAATGGTTAGCACTCTGGA |
| | | | CTTTGAATCCAGCGATCCGAGTTCAAATCTC |
| | | | GGTGGGACCTNNN |
| 1258 | Glu | CTC | TCCCTGGTGGTCTAGTGGTTAGGATTCGGCG |
| | | | CTCTCACCGCCGCGGCCCGGGTTCGATTCCC |
| | | | GGTCAGGGAANNN |
| 1259 | Glu | TTC | TCCCTGGTGGTCTAGTGGCTAGGATTCGGCG |
| | | | CTTTCACCGCNGCGGCCCGGGTTCGATTCCC |
| | | | GGTCAGGGAANNN |
| 1260 | Gly | CCC | GCATTGGTGGTTCAGTGGTAGAATTCTCGCCT |
| | | | CCCACGCNGGAGACCCGGGTTCGATTCCCGG |
| | | | CCAATGCANNN |
| 1261 | Gly | GCC | GCATTGGTGGTTCAGTGGTAGAATTCTCGCCT |
| | | | GCCACGCGGGAGGCCCGGGTTCGATTCCCGG |
| | | | CCAATGCANNN |
| 1262 | Gly | TCC | GCGTTGGTGGTATAGTGGTGAGCATAGCTGC |
| | | | CTTCCAAGCAGTTGACCCGGGTTCGATTCCC |
| | | | GGCCAACGCANNN |
| 1263 | Ile | AAT | GGCCGGTTAGCTCAGTTGGTTAGAGCGTGGT |
| | | | GCTAATAACGCCAAGGTCGCGGGTTCGATCC |
| | | | CCGTACGGGCCANNN |
| 1264 | Ile | TAT | GCTCCAGTGGCGCAATCGGTTAGCGCGCGGT |
| | | | ACTTATAATGCCGAGGTTGTGAGTTCGAGCC |
| | | | TCACCTGGAGCANNN |
| 1265 | Leu | AAG | GGTAGCGTGGCCGAGCGGTCTAAGGCGCTGG |
| | | | ATTAAGGCTCCAGTCTCTTCGGGGGCGTGGG |
| | | | TTCGAATCCCACCGCTGCCANNN |
| 1266 | Leu | CAA | GTCAGGATGGCCGAGTGGTCNTAAGGCGCCA |
| | | | GACTCAAGTTCTGGTCTCCGNATGGAGGCGT |
| | | | GGGTTCGAATCCCACTTCTGACANNN |
| 1267 | Leu | CAG | GTCAGGATGGCCGAGCGGTCTAAGGCGCTGC |
| | | | GTTCAGGTCGCAGTCTCCCCTGGAGGCGTGG |
| | | | GTTCGAATCCCACTCCTGACANNN |
| 1268 | Leu | TAA | ACCAGGATGGCCGAGTGGTTAAGGCGTTGGA |
| | | | CTTAAGATCCAATGGACAGATGTCCGCGTGG |
| | | | GTTCGAACCCCACTCCTGGTANNN |
| 1269 | Leu | TAG | GGTAGCGTGGCCGAGCGGTCTAAGGCGCTGG |
| | | | ATTTAGGCTCCAGTCTCTTCGGNGGCGTGGG |
| | | | TTCGAATCCCACCGCTGCCANNN |
| 1270 | Lys | CTT | GCCCGGCTAGCTCAGTCGGTAGAGCATGAGA |
| | | | CTCTTAATCTCAGGGTCGTGGGTTCGAGCCCC |
| | | | ACGTTGGGCGNNNNNN |
| 1271 | Lys | TTT | GCCTGGATAGCTCAGTCGGTAGAGCATCAGA |
| | | | CTTTTAATCTGAGGGTCCAGGGTTCAAGTCCC |
| | | | TGTTCAGGCGNNN |
| 1272 | Met | CAT | GCCCTCTTAGCGCAGTNGGCAGCGCGTCAGT |
| | | | CTCATAATCTGAAGGTCCTGAGTTCGAGCCT |
| | | | CAGAGAGGGCANNN |
| 1273 | Phe | GAA | GCCGAAATAGCTCAGTTGGGAGAGCGTTAGA |
| | | | CTGAAGATCNTAAAGGTCCCTGGTTCAATCC |
| | | | CGGGTTTCGGCANNN |
| 1274 | Pro | AGG | GGCTCGTTGGTCTAGGGGTATGATTCTCGCTT |
| | | | AGGATGCGAGAGGTCCCGGGTTCAAATCCCG |
| | | | GACGAGCCCNNN |
| 1275 | Pro | CGG | GGCTCGTTGGTCTAGGGGTATGATTCTCGCTT |
| | | | CGGGTGCGAGAGGTCCCGGGTTCAAATCCCG |
| | | | GACGAGCCCNNN |
| 1276 | Pro | TGG | GGCTCGTTGGTCTAGGGGTATGATTCTCGCTT |
| | | | TGGGTGCGAGAGGTCCCGGGTTCAAATCCCG |
| | | | GACGAGCCCNNN |
| 1277 | Ser | AGA | GTAGTCGTGGCCGAGTGGTTAAGGCGATGGA |
| | | | CTAGAAATCCATTGGGGTTTCCCCGCGCAGG |
| | | | TTCGAATCCTGCCGACTACGNNN |
| 1278 | Ser | CGA | GCTGTGATGGCCGAGTGGTTAAGGCGTTGGA |
| | | | CTCGAAATCCAATGGGGTCTCCCCGCGCAGG |
| | | | TTCGAATCCTGCTCACAGCGNNN |
| 1279 | Ser | GCT | GACGAGGNNTGGCCGAGTGGTTAAGGCGAT |
| | | | GGACTGCTAATCCATTGTGCTCTGCACGCGT |
| | | | GGGTTCGAATCCCATCCTCGTCGNNN |
| 1280 | Ser | TGA | GTAGTCGTGGCCGAGTGGTTAAGGCGATGGA |
| | | | CTTGAAATCCATTGGGGTCTCCCCGCGCAGG |
| | | | TTCGAATCCTGCCGGCTACGNNN |
| 1281 | Thr | AGT | GGCTCCGTGGCTTAGCTGGTTAAAGCGCCTG |
| | | | TCTAGTAAACAGGAGATCCTGGGTTCGAATC |
| | | | CCAGCGGGGCCTNNN |
| 1282 | Thr | CGT | GGCNCTGTGGCTNAGTNGGNTAAAGCGCCGG |
| | | | TCTCGTAAACCNGGAGATCNTGGGTTCGAAT |
| | | | CCCANCNGGGCCTNNN |
| 1283 | Thr | TGT | GGCTCCATAGCTCAGNGGGTTAGAGCACTGG |
| | | | TCTTGTAAACCAGGGGTCGCGAGTTCAAATC |
| | | | TCGCTGGGGCCTNNN |
| 1284 | Trp | CCA | GACCTCGTGGCGCAACGGTAGCGCGTCTGAC |
| | | | TCCAGATCAGAAGGTTGCGTGTTCAAATCAC |
| | | | GTCGGGGTCANNN |
| 1285 | Tyr | GTA | CCTTCGATAGCTCAGCTGGTAGAGCGGAGGA |
| | | | CTGTAGATCCTTAGGTCGCTGGTTCGATTCCG |
| | | | GCTCGAAGGANNN |
| 1286 | Val | AAC | GTTTCCGTAGTGTAGTGGTTATCACGTTCGCC |
| | | | TAACACGCGAAAGGTCCCCGGTTCGAAACCG |
| | | | GGCGGAAACANNN |
| 1287 | Val | CAC | GTTTCCGTAGTGTAGTGGTTATCACGTTCGCC |
| | | | TCACACGCGAAAGGTCCCCGGTTCGAAACCG |
| | | | GGCGGAAACANNN |
| 1288 | Val | TAC | GGTTCCATAGTGTAGTGGTTATCACGTCTGCT |
| | | | TTACACGCAGAAGGTCCTGGGTTCGAGCCCC |
| | | | AGTGGAACCANNN |
| 1289 | iMet | CAT | AGCAGAGTGGCGCAGCGGAAGCGTGCTGGG |
| | | | CCCATAACCCAGAGGTCGATGGATCGAAACC |
| | | | ATCCTCTGCTANNN |

TABLE 11
Score values alignment

| | Candidate | Reference | Match |
|---|---|---|---|
| Row | nucleotide | nucleotide | score |
| 1 | A | A | 1 |
| 2 | T | T | 1 |
| 3 | U | T | 1 |
| 4 | C | C | 1 |
| 5 | G | G | 1 |
| 6 | A | N | 0 |
| 7 | T | N | 0 |
| 8 | C | N | 0 |
| 9 | G | N | 0 |
| 10 | N | A | 0 |
| 11 | N | T | 0 |
| 12 | N | C | 0 |
| 13 | N | G | 0 |
| 14 | N | N | 0 |

### Premature Termination Codons (PTC) and ORFs Comprising PTCs

[2235] Mutations underlie many diseases. For example, a point mutation in the open reading frame (ORF) of a gene which creates a premature stop codon (PTC) can result in altered expression and/or activity of a polypeptide encoded by the gene. Table 15 provides single mutations in codons encoding amino acids which can result in a stop codon. In an embodiment, a PTC disclosed herein comprises a mutation disclosed in Table 15.

[2236] In an embodiment, the codon having the first sequence or the PTC comprises a mutation disclosed in Table 15. In an embodiment, the non-mutated, e.g., wildtype, codon sequence of the codon having the first sequence or the PTC is an original codon sequence provided in Table 15 and the amino acid corresponding to the non-mutated codon is an original AA provided in Table 15.

[2237] In an embodiment, the TREM, TREM core fragment or TREM fragment recognizes a stop codon and mediates incorporation of the original AA provided in Table 15 at the position of the stop codon. In an embodiment, the TREM, TREM core fragment or TREM fragment recognizes a stop codon and mediates incorporation of an amino acid belonging to the same group as the original AA, e.g., as provided in Table 16. Other genetic abnormalities, such as insertions and/or deletions can also result in a PTC in an ORF.

TABLE 15
Select amino acids and stop codons

| Original | Original | One mutation |
|---|---|---|
| AA | codon | to stop codon |
| TRP | UGG | UGA |
| TYR | UAU | UAA |
| | UAC | UAG |
| CYS | UGU | UGA |
| | UGC | UGA |
| GLU | GAA | UAA |
| | GAG | UAG |
| LYS | AAA | UAA |
| | AAG | UAG |
| GLN | CAA | UAA |
| | CAG | UAG |
| SER | UCA | UGA |
| | UCG | UAG |
| LEU | UUA | UAA OR UGA |
| | UUG | UAG |
| ARG | CGA | UGA |
| GLY | GGA | UGA |

TABLE 16
Amino acids and amino acid groupings

| Group | Amino acid |
|---|---|
| Nonpolar, aliphatic R group | leucine |
| | methionine |
| | isoleucine |
| | glycine |
| | alanine |
| | valine |
| Polar, uncharged R group | serine |
| | threonine |
| | cysteine |
| | proline |
| | asparagine |
| | glutamine |
| positively charged r group | lysine |
| | arginine |
| | histidine |
| Negatively charged R group | aspartate |
| | glutamate |
| Nonpolar, aromatic R group | phenylalanine |
| | tyrosine |
| | tryptophan |

[2238] Disclosed herein, inter alia, are endogenous ORFs comprising a codon having a first sequence. e.g., a mutation. e.g., a PTC. An ORF having a PTC, e.g., as described herein, can be present, or part of in any gene. As an example, the ORF can be present or be part of any gene in the human genome.

[2239] In an embodiment, a PTC disclosed herein is present in a gene disclosed in any one of Tables 17, 18, or 20. Exemplary genes having ORFs comprising a PTC are provided in Table 3.

TABLE 17
Exemplary genes with ORFs having a PTC

| | | | | |
|---|---|---|---|---|
| A2ML1 | ARFGEF1 | CACNA1G | CNOT1 | DLG4 |
| AARS1 | ARFGEF2 | CACNA1S | COG1 | DLL1 |
| AARS2 | ARHGAP21 | CACNA2D1 | COL11A2 | DNA2 |
| ABCA13 | ARHGEF9 | CACNA2D2 | COL13A1 | DNM1L |
| ABCB11 | ARMC4 | CACNB2, NSUN6 | COL4A1 | DNMT1 |
| ABCG5 | ARV1 | CAD | COL4A2 | DNMT3A |
| ABHD5 | ARX | CAMTA1 | COL4A4 | DNMT3B |
| ACAD8 | ASCC3 | CARS2 | COL9A1 | DPH1 |
| ACADL | ASH1L | CCDC140 | COQ4 | DPYD-AS1 |
| ACSF3 | ASPH | CCDC8 | COQ6 | DSEL |
| ACTA2 | ASXL2 | CCM2 | COX14 | DSPP |
| ACTC1, | ATAD3A | CD40LG | CPE | DUOXA1 |
| ACTN2 | ATP2A2 | CDAN1 | CPEB1-AS1 | DUOXA2 |
| ACVR1 | ATP6V1B1 | CDH15 | CREBBP | DVL1 |
| ADAR | ATP8A2 | CDK11A | CRELD1 | EARS2 |
| ADAT3 | AUH | CEBPA | CSNK2A1 | EBF3 |
| ADCY5 | AUTS2 | CELF5 | CSNK2B | EBP |
| ADIPOQ | AVPR2 | CELSR2 | CSTA | EDAR |
| ADIPOQ-AS1 | B3GLCT | CEP135 | CTNND2 | EFHC1 |
| ADIPOR1 | B4GAT1 | CEP164 | CTSA | EFNB1 |
| AFF2 | BCAP31 | CEP83 | CTSC | EFTUD2 |
| ALG11 | BCL11A | CETP | CUL3 | EIF2B5 |
| ALG14 | BCL11B | CFI | CYLD | ELANE |
| ALG6 | BCORL1 | CHAMP1 | CYP11A1 | EMC1 |
| ALOXE3 | BEND2 | CHAT | DAG1 | EMC1-AS1 |
| AMER1 | BGN | CHD1 | DARS2 | ENO3 |
| AMH | BMP4 | CHD4 | DCX | ENTPD5 |
| AMMECR1 | BRD4 | CHD8 | DDHD2 | EP300 |
| AMN | BRPF1 | CHRM2 | DDR2 | EPM2A |
| ANK2 | BRSK2 | CHRNB1 | DEAF1 | ERLIN2 |
| ANK3 | BUB1B | CIC | DENND5A | EVC |
| ANKS6 | BUB1B-PAK6 | CLCN7 | DGAT1 | EZH2 |
| ANOS1 | C8G | CLTC | DHFR | FAM111A |
| AP1S1 | CACNA1E | CNGA3 | DIAPH3 | FAM126A |
| AP3B2 | CACNA1F | CNKSR2 | DISP1 | FAN1 |
| FANCD2 | GJB6 | ISLR2 | LOC110673972 | MTR |
| FANCE | GJC2 | ITGA3 | LOC112997540 | MYCBP2 |
| FASTKD2 | GK | ITGA8 | LOC113788297 | MYCNOS |
| FAT1 | GLI2 | ITGB6 | LOC349160 | MYH7B |
| FBN2 | GNAI1 | JMJD1C | LONP1 | MYL3 |
| FBP1 | GNB1L | KANK1 | LORICRIN | MYOM1 |
| FDXR | GNE | KANSL1 | LPIN1 | MYPN |
| FGA | GNRH1 | KBTBD13 | LPIN2 | MYT1L |
| FGD1 | GNS | KCNA2 | LRP2 | NAA15 |
| FGF10 | GPAA1 | KCNB1 | LRRTM4 | NAGA |
| FGFR1 | GPD1L | KCND2 | MAB21L2 | NARS2 |
| FGFR2 | GRIN2A | KCNE3 | MAF | NAXE |
| FIBP | GTPBP3 | KCNMA1 | MARS1 | NCAPH2 |
| FLAD1 | HACE1 | KCNQ5 | MARS2 | NCF2 |
| FLG-AS1 | HADH | KCTD7 | MASP1 | NDP |
| FLVCR1 | HADHB | KIDINS220 | MBOAT7 | NDP-AS1 |
| FLVCR2 | HDAC4 | KIF21B | MCM3AP | NDRG1 |
| FMN2 | HERC1 | KIF6 | MCM3AP-AS1 | NDUFA2, TMCO6 |
| FOXA2 | HESX1 | KIT | MED13 | NDUFAF1 |
| FOXC1 | HIBCH | KLHL40 | MED17 | NDUFAF5 |
| FOXC2 | HNF4A | KLHL41 | MEGF10 | NDUFAF6 |
| FOXC2-AS1 | HNRNPH2 | KNL1 | MET | NDUFAF7 |
| FOXP2 | HPRT1 | KRAS | MGAT2 | NDUFS1 |
| FREM1 | HRG | LAMB1 | MIB1 | NDUFS3 |
| FRYL | HUWE1 | LAMB2 | MICU1 | NEFH |
| FTL | IARS1 | LAMC3 | MIR302CHG | NEK8 |
| FUS | IBA57 | LARP7 | MIR5004 | NEXMIF |
| GABRG2 | IDH2 | LARS1 | MIR6501 | NFIA |
| GAN | IFNAR1 | LCT | MITD1 | NFKB1 |
| GATA2 | IFT122 | LEMD3 | MMP13 | NHEJ1 |
| GATA4 | IFT80 | LGI4 | MMP21 | NICN1 |
| GATAD1 | IGF2 | LIAS | MNX1 | NID1 |
| GDF5 | ILDR1 | LINS1 | MNX1-AS2 | NKX2-1 |
| GDF5-AS1 | ILK, TAF10 | LIPC | MPDU1 | NLRP1 |
| GFM1 | INF2 | LIPT1 | MRPS22 | NLRP3 |
| GH-LCR | INS-IGF2 | LOC101448202 | MSL3 | NOD2 |
| GHRHR | INSR | LOC106804612, HBA2 | MSRB3 | NONO |
| GHSR | IRAK1BP1 | LOC107303338 | MT-ND2 | NOTCH3 |
| GJA1 | IRAK3 | RARS2 | SETD1B | SPTLC1 |
| NPHP4 | PLEKHG5 | RAX | SETD2 | SRD5A3 |
| NPR2 | PLEKHM2 | RBM10 | SETX | SRPX2 |
| NR2F2 | PLK4 | RELN | SFTA3 | SSBP2 |
| NR5A1 | PLPBP | RERE | SHANK2 | ST3GAL3 |
| NRL, PCK2 | PNKD | RFT1 | SHH | ST3GAL5 |
| NRXN1 | PNPLA1 | RMND1 | SIN3A | STAMBP |
| NT5DC1 | POC1A | RNASEH1 | SIX3 | STAT3 |
| NTRK2 | POLG2, MILR1 | RNF17 | SKI | STIL |
| NUBPL | POMGNT2 | ROR2 | SLC13A5 | STX11 |
| NUS1 | PPM1D | RP2 | SLC16A1 | STX1B |
| OCRL | PPP3CA | RPL11 | SLC16A2 | SUCLA2 |
| OPTN | PRDM1 | RPS19 | SLC17A8 | SYN1 |
| P4HA1 | PRDM12 | RRM2B | SLC18A3 | SYN2 |
| PAK6 | PREPL | RS1 | SLC20A2 | SYNJ1 |
| PBX1 | PRICKLE1 | RUNX2 | SLC25A4 | TAB2 |
| PCARE | PRKAG2 | RXYLT1 | SLC25A46 | TACR3 |
| PCDH12 | PROS1 | S100PBP | SLC2A1 | TBCD |
| PDCD10 | PRPF31 | SALL4 | SLC39A8 | TBL1XR1 |
| PDE11A-AS1 | PRPF8 | SAMD9 | SLC52A2 | TBX1 |
| PDE4D | PRPS1 | SAR1B | SLC6A3 | TBX18 |
| PDE6A | PRSS1, TRB | SASH3 | SLC6A8 | TCIRG1 |
| PDHX | PSAT1 | SBF2 | SLC6A9 | TELO2 |
| PDLIM3 | PSMD12 | SBF2-AS1 | SLC7A9 | TFAP2A |
| PDP1 | PSTPIP1 | SCAMP4 | SMAD2 | TFG |
| PDSS1 | PTCHD1 | SCLT1 | SMAD9 | TGIF1 |
| PEX5 | PTF1A | SCN10A | SMARCA2 | THAP1 |
| PHF21A | PTPN23 | SCN11A | SMC3 | TINF2 |
| PHF8 | PTPRQ | SCN1B | SMOC2 | TLK2 |
| PHKA2 | PTRH2 | SCN3A | SNTA1 | TMEM43 |
| PHKB | PUS1 | SCN4A | SNX14 | TMIE |
| PIEZO1 | PYCR2 | SCN4B | SNX22 | TMPO |
| PIGG | QARS1 | SCN8A | SOCS1 | TMPRSS15 |
| PIGL | RAB3GAP1, ZRANB3 | SCO2 | SOX11 | TMTC3 |
| PIGM | RAB3GAP2 | SCYL1 | SOX17 | TNFAIP3 |
| PIGP | RAC1 | SEMA4A | SPATA5 | TNFRSF11A |
| PIK3CA | RAF1 | SEPTIN9 | SPATA7 | TOE1 |
| PIN4, ERCC6L | RAG1 | SET | SPRED1 | TOR1AIP1 |
| PLAT | RARB | SETD1A | SPTBN2 | TPK1 |
| TPM1 | UTP14C | ZEB1 | | |
| TRAPPC9 | VPS53 | ZFHX4 | | |
| TRIM37 | WDR19 | ZFPM2 | | |
| TRIM59-IFT80 | WDR26 | ZFPM2-AS1 | | |
| TRIO | WDR62 | ZIC1 | | |
| TRIP12 | WDR81 | ZIC2 | | |
| TRIP4 | WNT1 | ZMYND11 | | |
| TRPM1 | WNT10A | ZNF335 | | |
| TSEN54 | WRAP53 | ZNF423 | | |
| TUBA4A | WWOX | ZNF469 | | |
| TUBGCP4 | YARS1 | | | |
| TUBGCP6 | YARS2 | | | |
| TWNK | YY1 | | | |
| TXNRD2 | ZAP70 | | | |
| UBA2 | ZBTB20 | | | |
| UBA5 | ZBTB24 | | | |
| UMOD | ZC4H2 | | | |
| UNC5B | ZDHHC9 | | | |

[2240] Additional exemplary genes containing a PTC include FVIII, FIX, CFTR, MeCP2, NAGLU, DMD, GAA, RP1, RP2, ABCA4, PCDH15, REP1, GLA, MUT, TP53, and ATM. In an embodiment, the PTC is present within the FVIII gene and comprises an R mutation, e.g., an R2228X mutation. In an embodiment, the PTC is present within the FIX gene and comprises an R mutation, e.g., an R29X mutation, an R116X mutation, an R248X mutation, an R252X mutation, an R333X mutation, and/or an R338X mutation. In an embodiment, the PTC is present within the CFTR gene and comprises an R mutation, e.g., an R553X mutation. In an embodiment, the PTC is present within the MeCP2 gene and comprises an R mutation, e.g., an R168X mutation. In an embodiment, the PTC is present within the NAGLU gene and comprises an R mutation, e.g., an R626X mutation. In an embodiment, t the PTC is present within the DMD gene and comprises an R mutation, e.g., an R3881X mutation. In an embodiment, the PTC is present within the GAA gene and comprises an R mutation, e.g., an R854X mutation. In an embodiment, the PTC is present within the RP1 gene and comprises an R mutation, e.g., an R667X mutation. In an embodiment, the PTC is present within the RP₂ gene and comprises an R mutation, e.g., an R120X mutation. In an embodiment, the PTC is present within the ABCA₄ gene and comprises an R mutation, e.g., an R2030X mutation. In an embodiment, the PTC is present within the PCD gene and comprises an R mutation, e.g., an R245X mutation. In an embodiment, the PTC is present within the REP1 gene and comprises an R mutation, e.g., an R270X mutation. In an embodiment, the PTC is a mutation in the GLA gene, e.g., an R220X mutation and/or an R227X mutation. In an embodiment, the PTC is present within the MUT gene and comprises an R mutation, e.g., an R228X mutation, an R403X mutation, an R467X mutation, and/or an R727X mutation. In an embodiment, the PTC is present within the TP53 gene and comprises an R mutation, e.g., an R578X mutation. In an embodiment the PTC is present within the ATM gene and comprises an R mutation, e.g., an R35X mutation.

Diseases or Disorders Associated with a PTC

[2241] A TREM composition disclosed herein can be used treat a disorder or disease associated with a PTC, e.g., as described herein. Exemplary diseases or disorders associated with a PTC are listed in Tables 18, 19, and 20.

[2242] In an embodiment, the subject has a disease or disorder provided in any one of Tables 4-6. In an embodiment, the cell is associated with, e.g., is obtained from a subject who has, a disorder or disease listed in any one of Tables 18-20.

[2243] For example, the disorder or disease can be chosen from the left column of Table 18. As another example, the disorder or disease is chosen from the left column of Table 18 and, in embodiments the PTC is in a gene chosen from the right column of Table 18, e.g., any one of the genes provided in the right column of Table 18. In some embodiments, the PTC is in a gene corresponding to the disorder or disease provided in the left column of Table 18. As a further non-limiting example, the PTC can be at a position provided in Table 18.

[2244] As another example, the disorder or symptom is chosen from a disorder or disease provided in Table 19.

[2245] As yet another exmaple, the disorder or symptom is chosen from a disorder or disease provided in Table 20. In an embodiment, the disorder or symptom is chosen from a disorder or disease provided in Table 20 and, in embodiments, the PTC is in any gene provided in Table 20. In an embodiment, the disorder or symptom is chosen from a disorder or disease provided in Table 20 and the PTC is in a corresponding gene provided in Table 20, e.g., a gene corresponding to the disease or disorder. In an embodiment, the disorder or symptom is chosen from a disorder or disease provided in Table 20 and the PTC is not in a gene provided in Table 20.

[2246] In an embodiment of any of the methods disclosed herein, the PTC is at any position within the ORF of the gene. e.g., upstream of the naturally occurring stop codon.

TABLE 18
Exemplary diseases or disorders

| | |
|---|---|
| Disease/disorder or protein | Exemplary Point Mutation |

G to A point mutations

| | |
|---|---|
| Dihydropyrimidine dehydrogenase | NM 000110.3(DPYD): c.1905 + 1G > A |
| deficiency | |
| Noonan syndrome | NM 005633.3(SOS1): c.2536G > A |
| | (p.Glu846Lys) |
| Lynch syndrome | NM 000251.2(MSH2): c.212 − 1G > A |
| Breast-ovarian cancer, familial 1 | NM 007294.3(BRCA1): c.963G > A |
| | (p.Trp321Ter) |
| Cystic fibrosis | NM 000492.3(CFTR): c.57G > A (p.Trpl9Ter) |
| Anemia, due to G6PD deficiency | NM 000402.4(G6PD): c.292G > A |
| | (p.Val98Met) |
| AVPR2 | NM 000054.4(AVPR2): c.878G > A |
| Nephrogenic diabetes insipidus, X-linked | (p.Trp293Ter) |
| FANCC | NM 000054.4(AVPR2): c.878G > A |
| Fanconi anemia, complementation group C | (p.Trp293Ter) |
| FANCC | NM 000136.2(FANCC): c.1517G > A |
| Fanconi anemia, complementation group C | (p.Trp506Ter) |
| IL2RG | NM 000206.2(IL2RG): c.710G > A |
| X-linked severe combined | (p.Trp237Ter) |
| immunodeficiency | |
| F8 Hereditary factor VIII deficiency | NM 000132.3(F8): c.3144G > A |
| disease | (p.Trpl048Ter) |
| LDLR | NM 000527.4(LDLR): c.1449G > A |
| Familial hypercholesterolemia | (p.Trp483Ter) |
| CBS | NM 000071.2(CBS): c.162G > A |
| Homocystinuria due to CBS deficiency | (p.Trp54Ter) |
| HBB | NM 000518.4(HBB): c. 114G > A |
| betaThalassemia | (p.Trp38Ter) |
| ALDOB | NM 000035.3(ALDOB): c.888G > A |
| Hereditary fmctosuria | (p.Trp296Ter) |
| DMD | NM 004006.2(DMD): c.3747G > A |
| Duchenne muscular dystrophy | (p.Trpl249Ter) |
| SMAD4 | NM 005359.5(SMAD4): c.906G > A |
| Juvenile polyposis syndrome | (p.Trp302Ter) |
| BRCA2 | NM 000059.3(BRCA2): c.582G > A |
| Familial cancer ofbreastlBreast-ovarian | (p.Trpl94Ter) |
| cancer, familial 2 | |
| GRIN2A | NM 000833.4(GRIN2A): c.3813G > A |
| Epilepsy, focal, with speech disorder and | (p.Trpl271Ter) |
| with or without mental retardation | |
| SCN9A | NM 002977.3(SCN9A): c.2691G > A |
| Indifference to pain, congenital, | (p.Trp897Ter) |
| autosomal recessive | |
| TARDBP | NM 007375.3(TARDBP): c.943G > A |
| Amyotrophic lateral sclerosis type 10 | (p.Ala315Thr) |
| CFTR | NM 000492.3(CFTR): c.3846G > A |
| Cystic fibrosislHereditary | (p.Trpl282Ter) |
| pancreatitislnot providedlataluren | |
| response - Efficacy | |
| UBE3A | NM 130838. l(UBE3A): c.2304G > A |
| Angelman syndrome | (p.Trp768Ter) |
| SMPD1 | NM 000543.4(SMPD1): c.168G > A |
| Niemann-Pick disease, type A | (p.Trp56Ter) |
| USH2A | NM 206933.2(USH2A): c.9390G > A |
| Usher syndrome, type 2A | (p.Trp3130Ter) |
| MENl | NM 130799.2(MEN1): c.1269G > A |
| Hereditary cancer-predisposing syndrome | (p.Trp423Ter) |
| C8orf37 | NM 177965.3(C8orf37): c.555G > A |
| Retinitis pigmentosa 64 | (p.Trpl85Ter) |
| MLHl | NM 000249.3(MLH1): c.1998G > A |
| Lynch syndrome | (p.Trp666Ter) |
| TSC2 | NM 000548.4(TSC2): c.2108G > A |
| Tuberous sclerosis 21Tuberous | (p.Trp703Ter) |
| sclerosis syndrome 46 | |
| NFl | NM 000267.3(NF1): c.7044G > A |
| Neurofibromatosis, type 1 | (p.Trp2348Ter) |
| MSH6 | NM 000179.2(MSH6): c.3020G > A |
| Lynch syndrome | (p.Trpl007Ter) |
| SMNl | NM 000344.3(SMN1): c.305G > A |
| Spinal muscular atrophy, type III | (p.Trpl02Ter) |
| Kugelberg- Welander disease | |
| SH3TC2 | NM 024577.3(SH3TC2): c.920G > A |
| Charcot-Marie-Tooth disease, type 4C | (p.Trp307Ter) |
| DNAH5 | NM 001369.2(DNAH5): c.8465G > A |
| Primary ciliary dyskinesia | (p.Trp2822Ter) |
| MECP2 | NM 004992.3(MECP2): c.311G > A |
| Rett syndrome | (p.Trpl04Ter) |
| ADGRVl | NM 032119.3(ADGRV1): c.7406G > A |
| Usher syndrome, type 2C | (p.Trp2469Ter) |
| AHil | NM 017651.4(AHI1): c.2174G > A |
| Joubert syndrome 3 | (p.Trp725Ter) |
| PRKN | NM 004562.2(PRKN): c.1358G > A |
| Parkinson disease 2 | (p.Trp453Ter) |
| COL3Al | NM 000090.3(COL3Al): c.3833G > A |
| Ehlers-Danlos syndrome, type 4 | (p.Trpl278Ter) |
| BRCAl | NM 007294.3(BRCA1): c.5511G > A |
| Familial cancer ofbreastlBreast-ovarian | (p.Trpl837Ter) |
| cancer, familial 1 | |
| MYBPC3 | NM 000256.3(MYBPC3): c.3293G > A |
| Primary familial hypertrophic | (p.Trpl098Ter) |
| cardiomyopathy | |
| APC | NM 000038.5(APC): c.1262G > A |
| Familial adenomatous polyposis 1 | (p.Trp421Ter) |
| BMPR2 | NM 001204.6(BMPR2): c.893G > A |
| Primary pulmonary hypertension | (p.W298*) |

T to C point mutations

| | |
|---|---|
| Wilson disease | NM_000053.3(ATP7B): c.3443T > C |
| | (p.Ile l l 48Thr) |
| Leukodystrophy, hypomyelinating, 2 | NM_020435.3(GJC2): c.857T > C |
| | (p.Met286Thr) |
| Alport syndrome, X-linked recessive | NM_000495.4(COL4A5): c.438 + 2T > C |
| Leigh disease | NC 012920.l: m.9478T > C |
| Gaucher disease, type 1 | NM_001005741.2(GBA): c.751T > C |
| | (p.Tyr251His) |
| Renal dysplasia, retinal pigmentary | NM_0l4714.3(IFT140): c.4078T > C |
| dystrophy, cerebellar ataxia and skeletal | (p.Cysl360Arg) |
| dysplasia | |
| Marfan syndrome | NM_000138.4(FBN1): c.3793T > C |
| | (p.Cysl265Arg) |
| Deficiency of UDPglucose-hexose-1- | NM_000155.3(GALT): c.482T > C |
| phosphate uridylyltransferase | (p.Leul61Pro) |
| Familial hypercholesterolemia | NM_000527.4(LDLR): c.694 + 2T > C |
| Episodic pain syndrome, familial, 3 | NM_001287223.1(SCN11A): c.1142T > C |
| | (p.Ile381Thr) |
| Navajo neurohepatopathy | NM_002437.4(MPV17): c.186 + 2T > C |
| Congenital muscular dystrophy, LMNA- | NM_l 70707.3(LMNA): c.l139T > C |
| related | (p.Leu380Ser) |
| Hereditary factor VIII deficiency disease | NM_000132.3(F8): c.5372T > C (p.Metl |
| | 791Thr) |
| Insulin-dependent diabetes mellitus | NM_0l4009.3(FOXP3): c.970T > C |
| secretory diarrhea syndrome | (p.Phe324Leu) |
| Hereditary factor IX deficiency disease | NM_000133.3(F9): c.1328T > C (p.Ile443Thr) |
| Familial cancer of breast, Breast-ovarian | NM_000059.3(BRCA2): c.316 + 2T > C |
| cancer, familial 2, Hereditary cancer | |
| predisposing syndrome | |
| Cardiac arrhythmia | NM_000238.3(KCNH2): c.1945 + 6T > C |
| Tangier disease | NM_005502.3(ABCA1): c.4429T > C |
| | (p.Cysl477Arg) |
| Dilated cardiomyopathy lAA | NM_001103.3(ACTN2): c.683T > C |
| | (p.Met228Thr) |
| Mental retardation 3, X-linked | NM_005334.2(HCFC1): c.−970T > C |
| Limb-girdle muscular dystrophy, type 2B | NM_003494.3(DYSF): c.1284 + 2T > C |
| Macular dystrophy, vitelliform, 5 | NM_0l6247.3(IMPG2): c.370T > C |
| | (p.Phel24Leu) |
| Retinitis pigmentosa | NM_000322.4(PRPH2): c.736T > C |
| | (p.Trp246Arg) |

TABLE 19
Additional exemplary disorders

| | |
|---|---|
| 5q-syndrome | Adams-Oliver syndrome 1 |
| Adams-Oliver syndrome 3 | Adams-Oliver syndrome 5 |
| Adams-Oliver syndrome 6 | Alagille syndrome 1 |
| Autoimmune lymphoproliferative syndrome | Autoimmune lymphoproliferative syndrome |
| type IA | type V |
| Autosomal dominant deafness-2A | Brain malformations with or without urinary |
| | tract defects (BRMUTD) |
| Carney complex type 1 | CHARGE syndrome |
| Cleidocranial dysplasia | Currarino syndrome |
| Denys-Drash syndrome/Frasier syndrome | Developmental delay |
| intellectual disability | obesity |
| and dysmorphic features (DIDOD) | DiGeorge syndrome (TBXl-associated) |
| Dravet syndrome | Duane-radial ray syndrome |
| Ehlers-Danlos syndrome (classic-like) | Ehlers-Danlos syndrome (vascular type) |
| Feingold syndrome 1 | Frontotemporal lobar degeneration with |
| | TDP43 inclusions (FTFD-TDP) |
| GRN-related | GFUT1 deficiency syndrome |
| Greig cephalopolysyndactyly syndrome | Hereditary hemorrhagic telangiectasia type 1 |
| Holoprosencephaly 3 | Holoprosencephaly 4 |
| Holoprosencephaly 5 | Holt-Oram syndrome |
| Hypoparathyroidism | sensorineural deafness |
| and renal disease (HDR) | Kleefstra syndrome 1 |
| Klippel-Trenaunay syndrome (AAGF-related) | Feri-Weill dyschondrosteosis |
| Marfan syndrome | Mental retardation and distinctive facial |
| | features with or without cardiac defects |
| | (MRFACD) |
| Mental retardation | autosomal dominant 1 |
| Mental retardation | autosomal dominant 19 |
| Mental retardation | autosomal dominant 29 |
| Nail-patella syndrome (NPS) | Phelan-McDermid syndrome |
| Pitt-Hopkins syndrome | Primary pulmonary hypertension 1 |
| Rett syndrome (congenital variant) | Smith-Magenis syndrome (RAI1-associated) |
| Sotos syndrome 1 | Sotos syndrome 2 |
| Stickler syndrome type I | Supravalvular aortic stenosis |
| SYNGAP1 -related intellectual disability | Treacher Collins syndrome |
| Trichorhinophalangeal syndrome type I | Ulnar-mammary syndrome |
| van der Woude syndrome 1 | Waardenburg syndrome type 1 |
| Waardenburg syndrome type 2A | Waardenburg syndrome type 4C. |

TABLE 20
Exemplary genes with ORFs comprising a PTC and exemplary disorders

| Gene | Disease/Disorder |
|---|---|
| AAAS | Glucocorticoid deficiency with achalasia |
| AAGAB | Keratosis palmoplantaris papulosa |
| AASS | Hyperlysinemia |
| ABCA1 | Tangier disease |
| ABCA12, | Autosomal recessive congenital ichthyosis 4B |
| SNHG31 | |
| ABCA3 | 3, Surfactant metabolism dysfunction, pulmonary |
| ABCA4 | Bietti crystalline corneoretinal dystrophy, Cone-rod degeneration, Cone-rod |
| | dystrophy 3, Macular dystrophy, Retinal dystrophy, Retinitis pigmentosa, Retinitis |
| | pigmentosa 19, Stargardt disease, Stargardt disease 1 |
| ABCB4 | Cholestasis, Progressive familial intrahepatic cholestasis 3, intrahepatic, of |
| | pregnancy 3 |
| ABCC2 | Dubin-Johnson syndrome |
| ABCC6 | Cutis laxa, Generalized arterial calcification of infancy 2, Papule, Pseudoxanthoma |
| | elasticum, forme firuste |
| ABCC8 | 1, Familial hyperinsulinism, Hyperinsulinemic hypoglycemia, familial |
| ABCC9 | Arrhythmogenic right ventricular cardiomyopathy, Cardiomyopathy, |
| | Cardiovascular phenotype, Dilated cardiomyopathy 1O, Primary dilated |
| | cardiomyopathy |
| ABCD1 | Adrenoleukodystrophy, Spastic gait, Spastic paraplegia |
| ABHD12 | Polyneuropathy, and cataract, ataxia, hearing loss, retinitis pigmentosa |
| ABRAXAS1 | Hereditary breast and ovarian cancer syndrome |
| ACAD9 | Acyl-CoA dehydrogenase family, deficiency of, member 9 |
| ACADM | Medium-chain acyl-coenzyme A dehydrogenase deficiency |
| ACADS | Deficiency of butyryl-CoA dehydrogenase |
| ACADVL | Very long chain acyl-CoA dehydrogenase deficiency |
| ACAN | Osteochondritis dissecans, Spondyloepiphyseal dysplasia, kimberley type |
| ACAT1 | Deficiency of acetyl-CoA acetyltransferase |
| ACBD5 | RETINAL DYSTROPHY WITH LEUKODYSTROPHY |
| ACBD6, LHX4, | Short stature-pituitary and cerebellar defects-small sella turcica syndrome |
| LHX4-AS1 | |
| ACE | Renal dysplasia |
| ACOX1 | Peroxisomal acyl-CoA oxidase deficiency |
| ACP5 | Spondyloenchondrodysplasia with immune dysregulation |
| ACP5, ZNF627 | Spondyloenchondrodysplasia with immune dysregulation |
| ACTA1 | Congenital myopathy with excess of thin filaments |
| ACTB | Baraitser-Winter syndrome |
| ACVRL1 | Hereditary hemorrhagic telangiectasia type 1, Primary pulmonary hypertension, |
| | Pulmonary arterial hypertension related to hereditary hemorrhagic telangiectasia, |
| | Telangiectasia, hereditary hemorrhagic, type 2 |
| ACY1 | Neurological conditions associated with aminoacylase 1 deficiency |
| ADA | Severe combined immunodeficiency disease, Severe combined immunodeficiency |
| | due to ADA deficiency |
| ADAM10 | Reticulate acropigmentation of Kitamura |
| ADAMTS17 | Weill-Marchesani syndrome 4 |
| ADAMTS2 | Ehlers-Danlos syndrome dermatosparaxis type |
| ADAMTSL4 | Ectopia lentis et pupillae |
| ADAMTSL4 | Ectopia lentis, Ectopia lentis 2, Ectopia lentis et pupillae, autosomal recessive, |
| | isolated |
| ADCY3 | BODY MASS INDEX QUANTITATIVE TRAIT LOCUS 19 |
| ADCY3, CENPO | BODY MASS INDEX QUANTITATIVE TRAIT LOCUS 19 |
| ADGRG1 | Polymicrogyria, bilateral frontoparietal |
| ADGRG2 | Congenital bilateral aplasia of vas deferens from CFTR mutation, Vas deferens, X- |
| | linked, congenital bilateral aplasia of |
| ADGRG6 | Arthrogryposis multiplex congenita, Lethal congenital contracture syndrome 9 |
| ADGRV1 | 4, Febrile seizures, Rare genetic deafness, Retinal dystrophy, Usher syndrome, |
| | familial, type 2C |
| ADNP | Helsmoortel-Van der Aa Syndrome, History of neurodevelopmental disorder, |
| | Inborn genetic diseases |
| AEBP1 | 2, CLASSIC-LIKE, EHLERS-DANLOS SYNDROME |
| AGA | Aspartylglucosaminuria |
| AGK | Sengers syndrome |
| AGK, DENND11 | Cataract, Sengers syndrome, autosomal recessive congenital 5 |
| AGL | Glycogen storage disease, Glycogen storage disease IIIa, Glycogen storage disease |
| | IIIb, Glycogen storage disease type III |
| AGPAT2 | Congenital generalized lipodystrophy type 1 |
| AGRN | Congenital myasthenic syndrome |
| AGT | Renal dysplasia |
| AGTR1 | Renal dysplasia |
| AGXT | Primary hyperoxaluria, type I |
| AHDC1 | Delayed speech and language development, Global developmental delay, |
| | Intellectual disability, Muscular hypotonia, Neonatal hypotonia, Sleep apnea, Xia- |
| | Gibbs syndrome |
| AHI1 | Joubert syndrome, Joubert syndrome 3, Retinal dystrophy, Retinitis pigmentosa |
| AHR | Retinitis pigmentosa 85 |
| AIRE | Autoimmune polyglandular syndrome type 1, Polyglandular autoimmune |
| | syndrome, type 1, with reversible metaphyseal dysplasia |
| ALB | Analbuminemia |
| ALDH18A1 | Cutis laxa-corneal clouding-oligophrenia syndrome |
| ALDH3A2 | SjÃ¶gren-Larsson syndrome |
| ALDH5A1 | Succinate-semialdehyde dehydrogenase deficiency |
| ALDH7A1 | Pyridoxine-dependent epilepsy, Seizures |
| ALDOB | Hereditary fructosuria |
| ALG1 | ALG1-CDG, Congenital disorder of glycosylation |
| ALG3 | ALG3-CDG |
| ALMS1 | Alstrom syndrome |
| ALOX12B | Autosomal recessive congenital ichthyosis 2 |
| ALPK3 | CARDIOMYOPATHY, FAMILIAL HYPERTROPHIC 27, Hypertrophic |
| | cardiomyopathy |
| ALPL | Hypophosphatasia, Infantile hypophosphatasia |
| ALS2 | Amyotrophic lateral sclerosis type 2, Infantile-onset ascending hereditary spastic |
| | paralysis, Juvenile primary lateral sclerosis |
| ALX4 | Parietal foramina 2 |
| AMPD2 | Pontocerebellar hypoplasia, type 9 |
| AMT | Non-ketotic hyperglycinemia |
| ANAPC1 | Rothmund-Thomson syndrome type 1 |
| ANGPTL3, | 2, Hypobetalipoproteinemia, familial |
| DOCK7 | |
| ANKRD1 | ANKRD1-related dilated cardiomyopathy, Cardiovascular phenotype, Primary |
| | dilated cardiomyopathy |
| ANKRD11 | Abnormal facial shape, Clinodactyly of the 5th finger, Conductive hearing |
| | impairment, Delayed speech and language development, Global developmental |
| | delay, Inborn genetic diseases, Intellectual disability, KBG syndrome, Ptosis, |
| | Seizures, Short foot, Short palm, Unilateral cryptorchidism |
| ANO10 | Autosomal recessive cerebellar ataxia, Spinocerebellar ataxia, autosomal recessive |
| | 10 |
| ANO5 | ANO5-Related Disorders, Achilles tendon contracture, Elevated serum creatine |
| | phosphokinase, Gnathodiaphyseal dysplasia, Limb-girdle muscular dystrophy, |
| | Lower limb amyotrophy, Lower limb muscle weakness, Miyoshi muscular |
| | dystrophy 3, Muscular Diseases, Polycystic kidney dysplasia, type 2L |
| ANTXR1 | Odontotrichomelic syndrome |
| AP1B1 | Autosomal recessive keratitis-ichthyosis-deafhess syndrome |
| AP3B1 | Hermansky-Pudlak syndrome 2 |
| AP4B1, AP4B1- | Inborn genetic diseases, Spastic paraplegia 47, autosomal recessive |
| AS1 | |
| AP4M1 | Spastic paraplegia 50, autosomal recessive |
| AP5Z1 | Spastic paraplegia 48, autosomal recessive |
| APC | Adenomatous colonic polyposis, Adenomatous polyposis coli with congenital |
| | cholesteatoma, Brain tumor-polyposis syndrome 2, Carcinoma of colon, Colon |
| | adenocarcinoma, Colorectal cancer, Craniopharyngioma, Desmoid disease, |
| | Desmoid tumors, Duodenal polyposis, Familial adenomatous polyposis, Familial |
| | adenomatous polyposis 1, Familial multiple polyposis syndrome, Gardner |
| | syndrome, Gastric polyposis, Hepatocellular carcinoma, Hereditary cancer- |
| | predisposing syndrome, Hyperplastic colonic polyposis, Intestinal polyp, |
| | Malignant Colorectal Neoplasm, Neoplasm of stomach, Neoplasm of the large |
| | intestine, Periampullary adenoma, hereditary, susceptibility to |
| APOA1, APOA1- | Familial hypoalphalipoproteinemia |
| AS | |
| APOB | 1, Familial hypobetalipoproteinemia, Hypobetalipoproteinemia, familial, |
| | normotriglyceridemic |
| APOC2 | APOLIPOPROTEIN C-II (NIJMEGEN), Apolipoprotein C2 deficiency |
| APOC2, APOC4- | APOLIPOPROTEIN C-II (PADOVA), Apolipoprotein C2 deficiency |
| APOC2 | |
| APTX | Ataxia-oculomotor apraxia type 1 |
| AR | Androgen resistance syndrome, Bulbo-spinal atrophy X-linked, Partial androgen |
| | insensitivity syndrome |
| ARCN1 | Short stature, and developmental delay, micrognathia, rhizomelic, with |
| | microcephaly |
| ARG1, MED23 | Arginase deficiency |
| ARHGEF18 | Retinitis pigmentosa 78 |
| ARID1A | Mental retardation, autosomal dominant 14 |
| ARID1B | Absent speech, Blepharophimosis, Coffin-Siris syndrome 1, Constipation, |
| | Decreased body weight, Failure to thrive, Inborn genetic diseases, Intellectual |
| | disability, Long eyelashes, Microcephaly, Recurrent respiratory infections, |
| | Seizures, Short stature, Thick lower lip vermilion, Thin upper lip vermilion, |
| | moderate |
| ARID2 | COFFIN-SIRIS SYNDROME 6 |
| ARL2BP | Retinitis pigmentosa 82 with or without situs inversus |
| ARMC2 | Male infertility with teratozoospermia due to single gene mutation, |
| | SPERMATOGENIC FAILURE 38, Sperm tail anomaly |
| ARMC2, | Male infertility with teratozoospermia due to single gene mutation, |
| ARMC2-AS1 | SPERMATOGENIC FAILURE 38 |
| ARMC5 | Acth-independent macronodular adrenal hyperplasia 2 |
| ARSA | Metachromatic leukodystrophy, Pseudoarylsulfatase A deficiency, late infantile |
| ARSB | Metachromatic leukodystrophy, Mucopolysaccharidosis type 6 |
| ART4 | Blood group, Dombrock system |
| ASAH1 | Farber disease, Spinal muscular atrophy-progressive myoclonic epilepsy syndrome |
| ASL | Argininosuccinate lyase deficiency |
| ASPA, SPATA22 | Canavan Disease, Familial Form, Spongy degeneration of central nervous system |
| ASPM | Microcephaly, Primary autosomal recessive microcephaly, Primary autosomal |
| | recessive microcephaly 1, Primary autosomal recessive microcephaly 5 |
| ASS1 | Citrullinemia type I |
| ASXL1 | Bohring-Opitz syndrome, Inborn genetic diseases |
| ASXL3 | Bainbridge-Ropers syndrome |
| ATF6 | Achromatopsia, Achromatopsia 7 |
| ATL1 | Hereditary spastic paraplegia 3A |
| ATM | Ataxia-telangiectasia syndrome, Familial cancer of breast, Hereditary breast and |
| | ovarian cancer syndrome, Hereditary cancer-predisposing syndrome, Ovarian |
| | Neoplasms |
| ATM, C11orf65, | Ataxia-telangiectasia syndrome, Ataxia-telangiectasia without immunodeficiency, |
| ATP13A2 | Breast cancer, Familial cancer of breast, Hereditary breast and ovarian cancer |
| | syndrome, Hereditary cancer-predisposing syndrome, Neoplasm of the breast, |
| | susceptibility to Kufor-Rakeb syndrome |
| ATP1A2 | Abnormality of neuronal migration, Arthrogryposis multiplex congenita, Epilepsy, |
| | Hydrops fetalis |
| ATP2A1 | Brody myopathy |
| ATP2C1 | Familial benign pemphigus |
| ATP6V0A2 | ALG9 congenital disorder of glycosylation, Cutis laxa with osteodystrophy |
| ATP6V0A4 | Renal tubular acidosis, autosomal recessive, distal |
| ATP7A | Cutis laxa, Menkes kinky-hair syndrome, X-linked |
| ATP7B | Inborn genetic diseases, Wilson disease |
| ATRX | 1, Alpha thalassemia-X-linked intellectual disability syndrome, Intellectual |
| | disability, Mental retardation-hypotonic facies syndrome, Mental retardation- |
| | hypotonic facies syndrome X-linked, X-linked |
| AXIN2 | Oligodontia-colorectal cancer syndrome |
| B3GALNT1 | p phenotype |
| B3GALNT2 | 11, Muscular dystrophy-dystroglycanopathy (congenital with brain and eye |
| | anomalies), type a |
| B3GALT6 | Spondylo-epi-(meta)-physeal dysplasia |
| B4GALNT1 | Hereditary spastic paraplegia 26, Inborn genetic diseases |
| B4GALT7 | Ehlers-Danlos syndrome progeroid type |
| B9D1 | Joubert syndrome, Meckel syndrome, Meckel-Gruber syndrome, type 9 |
| B9D2 | Joubert syndrome |
| BAG3 | BAG3-related, Cardiovascular phenotype, Dilated cardiomyopathy 1HH, Inborn |
| | genetic diseases, Myofibrillar myopathy, Primary dilated cardiomyopathy |
| BAP1 | Hereditary cancer-predisposing syndrome, Tumor susceptibility linked to germline |
| | BAP1 mutations |
| BARD1 | Breast cancer, Familial cancer of breast, Hereditary breast and ovarian cancer |
| | syndrome, Hereditary cancer-predisposing syndrome, Triple-Negative Breast |
| | Cancer Finding, susceptibility to |
| BBS1 | Bardet-Biedl syndrome |
| BBS1, ZDHHC24 | Bardet-Biedl syndrome, Bardet-Biedl syndrome 1 |
| BBS10 | Bardet-Biedl syndrome, Bardet-Biedl syndrome 1, Bardet-Biedl syndrome 10, |
| | Bardet-biedl syndrome 6/10, Inborn genetic diseases, Retinal dystrophy, Retinitis |
| | pigmentosa, digenic |
| BBS2 | Bardet-Biedl syndrome, Bardet-Biedl syndrome 2, Bardet-biedl syndrome 1/2, |
| | Bardet-biedl syndrome 2/6, Retinal dystrophy, Retinitis pigmentosa, Retinitis |
| | pigmentosa 74, digenic |
| BBS5 | Bardet-Biedl syndrome 5 |
| BBS9 | Bardet-Biedl syndrome |
| BCKDHA | Maple syrup urine disease, Maple syrup urine disease type 1A |
| BCKDHB | CLASSIC, MAPLE SYRUP URINE DISEASE, Maple syrup urine disease, Maple |
| | syrup urine disease type 1B, TYPE IB |
| BCOR | Oculofaciocardiodental syndrome |
| BCS1L | BCS1L-Related Disorders, GRACILE syndrome, Leigh syndrome, Mitochondrial |
| | complex III deficiency, Pili torti-deafness syndrome, nuclear type 1 |
| BEST1 | Bestrophinopathy, Retinal dystrophy, Vitelliform macular dystrophy type 2, |
| | autosomal recessive |
| BET1 | Progressive muscle weakness, Seizures |
| BFSP1 | Cataract 33, multiple types |
| BLM | Bloom syndrome, Hereditary breast and ovarian cancer syndrome, Hereditary |
| | cancer-predisposing syndrome |
| BMP1 | Osteogenesis imperfecta, type xiii |
| BMP2 | AND SKELETAL ANOMALIES WITH OR WITHOUT CARDIAC |
| | ANOMALIES, FACIAL DYSMORPHISM, SHORT STATURE |
| BMPR1A | Hereditary cancer-predisposing syndrome, Juvenile polyposis syndrome |
| BMPR2 | Primary pulmonary hypertension |
| BNC1 | PREMATURE OVARIAN FAILURE 16 |
| BOLA3 | Multiple mitochondrial dysfunctions syndrome 2 |
| BPNT2 | Chondrodysplasia with joint dislocations, GPAPP type |
| BPTF | NEURODEVELOPMENTAL DISORDER WITH DYSMORPHIC FACIES AND |
| | DISTAL LIMB ANOMALIES |
| BRAT1 | Inborn genetic diseases, NEURODEVELOPMENTAL DISORDER WITH |
| | CEREBELLAR ATROPHY AND WITH OR WITHOUT SEIZURES, Rigidity |
| | and multifocal seizure syndrome, lethal neonatal |
| BRCA1 | Breast and/or ovarian cancer, Breast carcinoma, Breast-ovarian cancer, |
| | COMPLEMENTATION GROUP S, Dysgerminoma, FANCONI ANEMIA, |
| | Familial cancer of breast, Hereditary breast and ovarian cancer syndrome, |
| | Hereditary cancer-predisposing syndrome, Infiltrating duct carcinoma of breast, |
| | Neoplasm of ovary, Neoplasm of the breast, Ovarian Neoplasms, Ovarian Serous |
| | Surface Papillary Adenocarcinoma, Ovarian cancer, Pancreatic cancer, Pancreatic |
| | cancer 4, Porokeratosis punctata palmaris et plantaris, Rhabdomyosarcoma |
| | (disease), bilateral breast cancer, breast cancer, familial 1, susceptibility to |
| BRCA2 | Asthma, BRCA2-Related Disorders, Breast and/or ovarian cancer, Breast |
| | carcinoma, Breast-ovarian cancer, Cancer of the pancreas, Colorectal cancer, |
| | Diffuse intrinsic pontine glioma, Ectopic ossification, Familial cancer of breast, |
| | Fanconi anemia, Focal seizures, Genetic non-acquired premature ovarian failure, |
| | Glioma susceptibility 3, Headache, Hereditary Cancer Syndrome, Hereditary |
| | breast and ovarian cancer syndrome, Hereditary cancer-predisposing syndrome, |
| | Inborn genetic diseases, Malignant tumor of prostate, Medulloblastoma, Migraine, |
| | Muscle weakness, Neoplasm of the breast, Nephrolithiasis, Obesity, Ovarian |
| | Neoplasms, Ovarian cancer, Pancreatic cancer 2, Polydactyly, Short attention span, |
| | Striae distensae, Tracheoesophageal fistula, Tumor susceptibility linked to |
| | germline BAP1 mutations, Wilms tumor 1, complementation group D1, familial 1, |
| | familial 2 |
| BRIP1 | BRIP1-Related Disorders, Breast cancer, Carcinoma of colon, Familial cancer of |
| | breast, Fanconi anemia, Hereditary breast and ovarian cancer syndrome, |
| | Hereditary cancer-predisposing syndrome, Neoplasm of ovary, Neoplasm of the |
| | breast, Ovarian Cancers, Ovarian Neoplasms, Tracheoesophageal fistula, |
| | complementation group J, early-onset |
| BRWD3 | Mental retardation, X-linked 93 |
| BSND | Bartter disease type 4a |
| BTD | Biotinidase deficiency |
| BTK | Agammaglobulinemia, X-linked agammaglobulinemia, X-linked |
| | agammaglobulinemia with growth hormone deficiency, non-Bruton type |
| C11orf65, ATM | Ataxia-telangiectasia syndrome, Hereditary breast and ovarian cancer syndrome, |
| | Hereditary cancer-predisposing syndrome |
| C12orf4 | AUTOSOMAL RECESSIVE 66, Attention deficit hyperactivity disorder, |
| | Intellectual disability, MENTAL RETARDATION, Muscular hypotonia |
| C12orf65 | Combined oxidative phosphorylation deficiency 7, Spastic paraplegia |
| C19orf12 | Neurodegeneration with brain iron accumulation 4, Spastic paraplegia 43, |
| | autosomal recessive |
| C1QB | C1q deficiency |
| C1S | Complement component c1s deficiency |
| C2 | Complement component 2 deficiency |
| C2CD3 | Orofaciodigital syndrome xiv |
| C5 | Leiner disease |
| C6 | Complement component 6 deficiency, Immunodeficiency due to a late component |
| | of complement deficiency |
| C7 | Complement component 7 deficiency |
| C8B | Complement component 6 deficiency, Type II complement component 8 |
| | deficiency |
| C8orf37 | Cone-rod dystrophy 16 |
| C8orf37 | Retinitis pigmentosa 64 |
| CA2 | Osteopetrosis with renal tubular acidosis |
| CABP4 | Congenital stationary night blindness, type 2B |
| CACNA1A | 42, Bulbar palsy, Epileptic encephalopathy, Episodic ataxia, Episodic ataxia type |
| | 2, Recurrent respiratory infections, and epilepsy, early infantile, type 2 |
| CACNA1C | Long QT syndrome |
| CACNA2D4 | Abnormality of the eye, Retinal cone dystrophy 4 |
| CAPN1 | Spastic paraplegia 76, autosomal recessive |
| CAPN3 | Absent Achilles reflex, Absent muscle fiber calpain-3, Arrhythmia, Calf muscle |
| | hypertrophy, Congenital muscular dystrophy, Contractures of the joints of the |
| | lower limbs, Difficulty walking, EMG: myopathic abnormalities, EMG: |
| | neuropathic changes, Elbow flexion contracture, Elevated serum creatine |
| | phosphokinase, Limb-Girdle Muscular Dystrophy, Limb-girdle muscle weakness, |
| | Limb-girdle muscular dystrophy, Migraine, Muscle weakness, Muscular Diseases, |
| | Muscular dystrophy, Myositis, Paresthesia, Positive Romberg sign, Progressive |
| | spinal muscular atrophy, Recessive, Shoulder girdle muscle weakness, |
| | eosinophilic, type 2A |
| CASK | Mental retardation and microcephaly with pontine and cerebellar hypoplasia |
| CASP14 | Ichthyosis, autosomal recessive 12, congenital |
| CASQ2 | 2, Ventricular tachycardia, catecholaminergic polymorphic |
| CASR | Hypocalciuric hypercalcemia, Inborn genetic diseases, familial, type 1 |
| CAST | Peeling skin with leukonychia, acral punctate keratoses, and knuckle pads, cheilitis |
| CAST, ERAP1 | Peeling skin with leukonychia, acral punctate keratoses, and knuckle pads, cheilitis |
| CAT | Acatalasemia, Acatalasia, Japanese type |
| CATSPER1 | Spermatogenic failure 7 |
| CAV1 | Lipoqdystrophy, congenital generalized, type 3 |
| CAV3, SSUH2 | Long QT syndrome |
| CBL | Noonan syndrome-like disorder with or without juvenile myelomonocytic |
| | leukemia |
| CBS | CYSTATHIONINE BETA-SYNTHETASE POLYMORPHISM, Classic |
| | homocystinuria, Homocystinuria |
| CC2D1A | Mental Retardation, Mental retardation, Psychosocial, autosomal recessive 3 |
| CC2D2A | Joubert syndrome, Joubert syndrome 9, Meckel syndrome type 6, Meckel-Gruber |
| | syndrome |
| CCBE1 | Hennekam lymphangiectasia-lymphedema syndrome 1 |
| CCDC103 | Primary ciliary dyskinesia |
| CCDC28B | Bardet-Biedl syndrome, Bardet-Biedl syndrome 1, modifier of |
| CCDC39 | 14, Ciliary dyskinesia, Primary ciliary dyskinesia, primary |
| CCDC40 | 15, Ciliary dyskinesia, Primary ciliary dyskinesia, primary |
| CCDC47 | Global developmental delay with dysmorphic features, |
| | Trichohepatoneurodevelopmental syndrome, and woolly hair, liver dysfunction, |
| | pruritus |
| CCDC65 | 27, Ciliary dyskinesia, Kartagener syndrome, Primary ciliary dyskinesia, primary |
| CCDC78 | 4, Myopathy, centronuclear |
| CCDC88C | Congenital hydrocephalus 1 |
| CCN6 | Progressive pseudorheumatoid dysplasia |
| CCNH, RASA1 | Capillary malformation-arteriovenous malformation |
| CCNO | 29, Ciliary dyskinesia, Kartagener syndrome, Primary ciliary dyskinesia, primary |
| CCNQ | Syndactyly-telecanthus-anogenital and renal malformations syndrome |
| CD19 | Common variable immunodeficiency 3 |
| CD247 | Immunodeficiency due to defect in cd3-zeta |
| CD36 | Malaria, Platelet glycoprotein IV deficiency, cerebral, susceptibility to |
| CD46 | Atypical hemolytic-uremic syndrome 2 |
| CD55 | CROMER BLOOD GROUP SYSTEM, Dr(a-) PHENOTYPE, Protein-losing |
| | enteropathy (disease) |
| CDC14A | Deafness, Rare genetic deafness, autosomal recessive 32 |
| CDC73 | Parathyroid adenoma, Parathyroid carcinoma |
| CDH1 | Blepharocheilodontic syndrome 1, Breast cancer, Endometrial carcinoma, Familial |
| | cancer of breast, Hereditary cancer-predisposing syndrome, Hereditary diffuse |
| | gastric cancer, Malignant tumor of prostate, Neoplasm of ovary, lobular |
| CDH11 | Brachioskeletogenital syndrome |
| CDH23 | Deafness, Inborn genetic diseases, MULTIPLE TYPES, PITUITARY |
| | ADENOMA 5, Rare genetic deafness, Usher syndrome type 1D, autosomal |
| | recessive 12 |
| CDH23, | Rare genetic deafness |
| C10orf105 | |
| CDH23, CDH23- | DIGENIC, TYPE ID/F, USHER SYNDROME, Usher syndrome type 1, Usher |
| AS1 | syndrome type 1D |
| CDH3 | Congenital hypotrichosis with juvenile macular dystrophy, EEM syndrome, |
| | Hypotrichosis with juvenile macular dystrophy, Macular dystrophy |
| CDHR1 | Cone-rod dystrophy 15, Leber congenital amaurosis, Retinal dystrophy, Retinitis |
| | pigmentosa 65 |
| CDK10 | AL KAISSI SYNDROME |
| CDK13 | Congenital heart defects, and intellectual developmental disorder, dysmorphic |
| | facial features |
| CDK5RAP2 | Primary autosomal recessive microcephaly 3 |
| CDKL5 | Angelman syndrome-like, Atypical Rett syndrome, Early infantile epileptic |
| | encephalopathy 2, Epileptic encephalopathy, Inborn genetic diseases |
| CDKN2A | Hereditary cancer-predisposing syndrome, Hereditary cutaneous melanoma, |
| | Melanoma-pancreatic cancer syndrome, Neoplasm |
| CDSN, | Peeling skin syndrome 1 |
| PSORS1C1 | |
| CEL | Maturity-onset diabetes of the young type 8 |
| CELA2A | Coronary artery disease, Diabetes, Familial partial lipodystrophy 6, Hypertensive |
| | disorder, Hypertriglyceridemia |
| CENPF | Stromme syndrome |
| CENPJ | Congenital microcephaly, Intellectual disability, Perisylvian polymicrogyria, |
| | Primary autosomal recessive microcephaly, Primary autosomal recessive |
| | microcephaly 1, Primary autosomal recessive microcephaly 6, Seckel syndrome 4, |
| | Type III lissencephaly, moderate |
| CEP120 | JOUBERT SYNDROME 31 |
| CEP152 | Seckel syndrome |
| CEP290 | Abnormality of the kidney, Bardet-Biedl syndrome 14, Blindness, CEP290- |
| | Related Disorders, Cerebellar cyst, Cerebellar vermis hypoplasia, Global |
| | developmental delay, Hyperechogenic kidneys, Joubert syndrome, Joubert |
| | syndrome 5, Leber congenital amaurosis 10, Meckel syndrome, Meckel-Gruber |
| | syndrome, Nephronophthisis, Polycystic kidney dysplasia, Retinal dystrophy, |
| | Senior-Loken syndrome 6, type 4 |
| CEP290, | Bardet-Biedl syndrome 14, Joubert syndrome, Joubert syndrome 5, Meckel-Gruber |
| C12orf29 | syndrome, Nephronophthisis |
| CEP41 | Joubert syndrome 15 |
| CEP78 | Cone-rod degeneration, Cone-rod dystrophy and hearing loss 1, Sensorineural |
| | hearing loss |
| CFAP251 | Male infertility with teratozoospermia due to single gene mutation, Non-syndromic |
| | male infertility due to sperm motility disorder, SPERMATOGENIC FAILURE 18, |
| | SPERMATOGENIC FAILURE 33, asthenozoospermia, dysplasia of the |
| | mitochondrial sheath, multiple morphologic abnormalities of the sperm flagellum |
| CFAP410 | Axial spondylometaphyseal dysplasia, RETINAL DYSTROPHY WITH OR |
| | WITHOUT MACULAR STAPHYLOMA |
| CFAP43 | SPERMATOGENIC FAILURE 19 |
| CFAP44 | SPERMATOGENIC FAILURE 20 |
| CFHR5 | CFHR5 deficiency |
| CFTR | Bronchiectasis with or without elevated sweat chloride 1, CFTR-related disorders, |
| | Congenital bilateral aplasia of vas deferens from CFTR mutation, Cystic fibrosis, |
| | Hereditary pancreatitis, Inborn genetic diseases, ataluren response - Efficacy |
| CFTR, CFTR- | CFTR-related disorders, Congenital bilateral aplasia of vas deferens from CFTR |
| AS1 | mutation, Cystic fibrosis |
| CFTR, | Bronchiectasis with or without elevated sweat chloride 1, CFTR-related disorders, |
| LOC111674472 | Congenital bilateral aplasia of vas deferens from CFTR mutation, Cystic fibrosis, |
| | Hereditary pancreatitis |
| CFTR, | Bronchiectasis with or without elevated sweat chloride 1, CFTR-related disorders, |
| LOC111674475 | Congenital bilateral aplasia of vas deferens from CFTR mutation, Cystic fibrosis, |
| | Hereditary pancreatitis, Inborn genetic diseases, ataluren response - Efficacy |
| CFTR, | Cystic fibrosis |
| LOC111674477 | |
| CFTR, | Bronchiectasis with or without elevated sweat chloride 1, CFTR-related disorders, |
| LOC113633877 | Congenital bilateral aplasia of vas deferens from CFTR mutation, Cystic fibrosis, |
| | Hereditary pancreatitis |
| CFTR, | Bronchiectasis with or without elevated sweat chloride 1, Congenital bilateral |
| LOC113664106 | aplasia of vas deferens from CFTR mutation, Cystic fibrosis, Hereditary |
| | pancreatitis |
| CHD2 | CHD2-Related Disorder, Epileptic encephalopathy, History of neurodevelopmental |
| | disorder, childhood-onset |
| CHD7 | CHARGE association, Hypogonadism with anosmia, Hypogonadotropic |
| | hypogonadism 5 with or without anosmia |
| CHEK2 | 3, Astrocytoma, B Lymphoblastic Leukemia/Lymphoma, Breast and colorectal |
| | cancer, Breast cancer, CHEK2-Related Cancer Susceptibility, Colitis, Congenital |
| | heart defects, Diffuse intrinsic pontine glioma, Familial cancer of breast, |
| | Hematochezia, Hereditary breast and ovarian cancer syndrome, Hereditary cancer, |
| | Hereditary cancer-predisposing syndrome, Inflammation of the large intestine, |
| | Leiomyosarcoma, Li-Fraumeni syndrome, Li-Fraumeni syndrome 2, Malignant |
| | tumor of prostate, Neoplasm of the breast, Not Otherwise Specified, |
| | Osteosarcoma, Ovarian Neoplasms, Prostate cancer, Thrombocytopenia, multiple |
| | types, somatic, susceptibility to |
| CHM | Retinal dystrophy |
| CHRDL1 | Megalocornea |
| CHRNA1 | Congenital myasthenic syndrome |
| CHRNA2 | Autosomal dominant nocturnal frontal lobe epilepsy |
| CHRNA3 | CHRNA3-related condition |
| CHRND | Lethal multiple pterygium syndrome |
| CHRNE | 4a, Congenital myasthenic syndrome, Congenital myasthenic syndrome 4C, |
| | Myasthenic syndrome, congenital, slow-channel |
| CHRNE, | 4a, 4b, Congenital myasthenic syndrome, Congenital myasthenic syndrome 4C, |
| C17orf107 | Myasthenic syndrome, congenital, fast-channel, slow-channel |
| CHRNG | Autosomal recessive multiple pterygium syndrome, CHRNG-Related Disorders, |
| | Inborn genetic diseases, Lethal multiple pterygium syndrome |
| CHST14 | Ehlers-Danlos syndrome, musculocontractural type |
| CHST3 | Spondyloepiphyseal dysplasia with congenital joint dislocations |
| CHSY1 | Temtamy preaxial brachydactyly syndrome |
| CIB1 | 3, EPIDERMODYSPLASIA VERRUCIFORMIS, SUSCEPTIBILITY TO |
| CIITA | Bare lymphocyte syndrome 2 |
| CKAP2L | Filippi syndrome |
| CLCN1 | Autosomal dominant intermediate Charcot-Marie-Tooth disease, Congenital |
| | myotonia, EMG: myopathic abnormalities, Muscular Diseases, Myotonia |
| | congenita, autosomal dominant form, autosomal recessive form |
| CLCN2 | Epilepsy, Leukoencephalopathy with ataxia, juvenile myoclonic 8 |
| CLCN5 | Nephrolithiasis, X-linked recessive, X-linked recessive nephrolithiasis with renal |
| | failure |
| CLDN1, CLDN16 | Neonatal ichthyosis-sclerosing cholangitis syndrome |
| CLIC5 | Deafness, autosomal recessive |
| CLN3 | Juvenile neuronal ceroid lipofuscinosis, Neuronal ceroid lipofuscinosis |
| CLN5, FBXL3 | Neuronal ceroid lipofuscinosis, Neuronal ceroid lipofuscinosis 5 |
| CLRN1 | Rare genetic deafness, Retinal dystrophy, Retinitis pigmentosa, Usher syndrome, |
| | type 3A |
| CNGA1, | Retinal dystrophy, Retinitis pigmentosa 49 |
| LOC101927157 | |
| CNGB1 | Retinal dystrophy, Retinitis pigmentosa, Retinitis pigmentosa 45 |
| CNGB3 | Abnormality of the eye, Achromatopsia, Achromatopsia 3, CNGB3-Related |
| | Disorders, Cone-rod dystrophy, Leber congenital amaurosis, Recessive, Retinal |
| | dystrophy, Retinitis pigmentosa, Stargardt Disease |
| CNNM2 | Hypomagnesemia 6, renal |
| CNNM4 | Jalili syndrome |
| CNTNAP1 | Lethal congenital contracture syndrome 7 |
| CNTNAP2 | Pitt-Hopkins-like syndrome 1 |
| COASY | Neurodegeneration with brain iron accumulation 6 |
| COG4 | Congenital disorder of glycosylation type 2J |
| COG5 | Congenital disorder of glycosylation type 2i |
| COG5, DUS4L, | Congenital disorder of glycosylation type 2i |
| DUS4L-BCAP29 | |
| COL10A1 | Metaphyseal chondrodysplasia, Schmid type |
| COL11A1 | Fibrochondrogenesis 1 |
| COL12A1 | Ullrich congenital muscular dystrophy 2 |
| COL17A1 | Epidermolysis bullosa, Junctional epidermolysis bullosa, junctional, localisata |
| | variant, non-Herlitz type |
| COL18A1 | GLAUCOMA, Knobloch syndrome 1, PRIMARY CLOSED-ANGLE |
| COL18A1, | Knobloch syndrome 1, Macular dystrophy, Retinal dystrophy, Retinitis pigmentosa |
| SLC19A1 | |
| COL1A1 | Ehlers-Danlos syndrome, Infantile cortical hyperostosis, Osteogenesis imperfecta, |
| | Osteogenesis imperfecta type I, Osteogenesis imperfecta type III, Osteogenesis |
| | imperfecta with normal sclerae, Postmenopausal osteoporosis, dominant form, |
| | procollagen proteinase deficient, recessive perinatal lethal |
| COL1A2 | COL1A2-Related Disorder, Ehlers-Danlos syndrome, Inborn genetic diseases, |
| | Osteogenesis imperfecta type I, autosomal recessive, cardiac valvular form, classic |
| | type |
| COL2A1 | Spondyloperipheral dysplasia-short ulna syndrome, Stickler syndrome type 1 |
| COL3A1 | Ehlers-Danlos syndrome, type 4 |
| COL4A3, MFF- | Alport syndrome, autosomal recessive |
| DT | |
| COL4A5 | Alport syndrome 1, X-linked recessive |
| COL5A1 | Ehlers-Danlos syndrome, classic type |
| COL5A2 | Ehlers-Danlos syndrome, Ehlers-Danlos syndrome classic type 2, classic type |
| COL6A1 | Bethlem myopathy 1 |
| COL6A2 | Bethlem myopathy 1, Ullrich congenital muscular dystrophy 1 |
| COL6A3 | Bethlem myopathy 1 |
| COL7A1 | Dystrophic epidermolysis bullosa, Epidermolysis bullosa pruriginosa, Recessive |
| | dystrophic epidermolysis bullosa, Transient bullous dermolysis of the newborn, |
| | autosomal dominant |
| COL9A2 | Stickler syndrome, type 5 |
| COLEC10 | 3MC syndrome 3 |
| COLEC10, | 3MC syndrome 3 |
| LOC101927513 | |
| COLQ | Congenital myasthenic syndrome, Endplate acetylcholinesterase deficiency |
| COQ2 | Coenzyme Q10 deficiency, primary, primary 1 |
| COQ8A | 4, ADCK3-Related Disorders, Coenzyme Q10 deficiency, primary |
| COQ9 | 5, Coenzyme Q10 deficiency, primary |
| COX15 | Cardioencephalomyopathy, Leigh syndrome, Leigh syndrome due to |
| | mitochondrial complex IV deficiency, due to cytochrome c oxidase deficiency 2, |
| | fatal infantile |
| CP | Ceruloplasmin belfast, Deficiency of ferroxidase, Hemosiderosis, due to |
| | aceruloplasminemia, systemic |
| CPAMD8 | Anterior segment dysgenesis 8 |
| CPLANE1 | Global developmental delay, Jaundice, Joubert syndrome, Joubert syndrome 1, |
| | Joubert syndrome 17, Orofaciodigital syndrome type 6, Typical Joubert syndrome |
| | MRI findings |
| CPOX | Coproporphyria |
| CPS1 | Congenital hyperammonemia, type I |
| CPSF1 | MYOPIA 27 |
| CPT2 | Carnitine palmitoyltransferase II deficiency, infantile, lethal neonatal, myopathic, |
| | stress-induced |
| CRB1 | Leber congenital amaurosis 8 |
| CRB2 | Focal segmental glomerulosclerosis 9, Steroid-resistant nephrotic syndrome |
| CRIPT | Ateleiotic dwarfism, Short stature with microcephaly and distinctive facies |
| CRPPA | 7, Congenital muscular dystrophy-dystroglycanopathy with brain and eye |
| | anomalies, Muscular dystrophy-dystroglycanopathy (limb-girdle), type A7, type c |
| CRTAP | Osteogenesis imperfecta type 7 |
| CRX | Leber congenital amaurosis 7 |
| CRYAB | Alpha-B crystallinopathy, Dilated cardiomyopathy 1II |
| CRYBA4, | Cataract, autosomal recessive 3, congenital nuclear |
| CRYBB1 | |
| CRYBB2 | Cataract 3, Congenital cataract, multiple types |
| CSGALNACT1 | MILD, SKELETAL DYSPLASIA, WITH JOINT LAXITY AND ADVANCED |
| | BONE AGE |
| CSPP1 | Joubert syndrome 21, Meckel-Gruber syndrome |
| CSRP3 | Cardiovascular phenotype |
| CSTB | Inborn genetic diseases, Progressive myoclonic epilepsy, Unverricht-Lundborg |
| | syndrome |
| CTC1 | Cerebroretinal microangiopathy with calcifications and cysts, Cerebroretinal |
| | microangiopathy with calcifications and cysts 1, Dyskeratosis congenita |
| CTCF | Mental retardation, autosomal dominant 21 |
| CTNNB1 | EXUDATIVE VITREORETINOPATHY 7, Exudative vitreoretinopathy 1, |
| | Hepatocellular carcinoma, Inborn genetic diseases, Mental retardation, autosomal |
| | dominant 19 |
| CTNND1, TMX2- | Blepharocheilodontic syndrome 2 |
| CTNND1 | |
| CTNS | Cystinosis, Juvenile nephropathic cystinosis, Nephropathic cystinosis, Ocular |
| | cystinosis |
| CTSD | Neuronal ceroid lipofuscinosis 10 |
| CTSH | Variant of unknown significance |
| CTU2 | AND AMBIGUOUS GENITALIA SYNDROME, FACIAL DYSMORPHISM, |
| | MICROCEPHALY, RENAL AGENESIS |
| CUBN | Megaloblastic anemia due to inborn errors of metabolism |
| CUL4B | Cabezas type, Syndromic X-linked mental retardation |
| CUL7 | Three M syndrome 1 |
| CWC27 | Retinitis pigmentosa with or without skeletal anomalies |
| CWF19L1 | Spinocerebellar ataxia, autosomal recessive 17 |
| CYB5R3 | Methemoglobinemia type 2 |
| CYBB | Chronic granulomatous disease, X-linked |
| CYP11B1, | Deficiency of steroid 11-beta-monooxygenase |
| LOC106799833 | |
| CYP17A1 | 20-lyase deficiency, Combined partial 17-alpha-hydroxylase/17, Complete |
| | combined 17-alpha-hydroxylase/17, Deficiency of steroid 17-alpha- |
| | monooxygenase |
| CYP1B1 | A, Anterior segment dysgenesis 6, CYP1B1-Related Disorders, Congenital |
| | glaucoma, Congenital ocular coloboma, Glaucoma, Glaucoma 3, Irido-corneo- |
| | trabecular dysgenesis, b, congenital, primary congenital, primary infantile |
| CYP21A2, | Classic congenital adrenal hyperplasia due to 21-hydroxylase deficiency |
| LOC106780800 | |
| CYP21A2, | Classic congenital adrenal hyperplasia due to 21-hydroxylase deficiency |
| TNXB, | |
| LOC106780800 | |
| CYP24A1 | 1, Hypercalcemia, infantile |
| CYP26C1 | Optic nerve hypoplasia |
| CYP27A1 | Cholestanol storage disease |
| CYP27B1 | Vitamin D-dependent rickets, type 1 |
| CYP2C19 | CYP2C19: no function, Clopidogrel response, Mephenytoin, Proguanil, |
| | Toxicity/ADR, amitriptyline response - Efficacy, citalopram response - Efficacy, |
| | clomipramine response - Efficacy, clopidogrel response - Efficacy, poor |
| | metabolism of |
| CYP2D6 | Debrisoquine, Deutetrabenazine response, Tamoxifen response, Toxicity/ADR, |
| | Tramadol response, amitriptyline response - Dosage, antidepressants response - |
| | Dosage, clomipramine response - Dosage, desipramine response - Dosage, doxepin |
| | response - Dosage, imipramine response - Dosage, nortriptyline response - Dosage, |
| | poor metabolism of, tamoxifen response - Efficacy, trimipramine response - |
| | Dosage |
| CYP2U1 | Spastic paraplegia 56, autosomal recessive |
| CYP4F22 | Autosomal recessive congenital ichthyosis 5 |
| CZ1P-ASNS, | Asparagine synthetase deficiency |
| ASNS | |
| DBH | Orthostatic hypotension 1 |
| DBT | Maple syrup urine disease, Maple syrup urine disease type 2 |
| DCAF17 | Hypogonadism, alopecia, diabetes mellitus, mental retardation and |
| | electrocardiographic abnormalities |
| DCLRE1C | Severe combined immunodeficiency, Severe combined immunodeficiency due to |
| | DCLRE1C deficiency, partial |
| DCN | Congenital Stromal Corneal Dystrophy |
| DDHD1 | Spastic paraplegia 28, autosomal recessive |
| DDRGK1 | Shohat type, Spondyloepimetaphyseal dysplasia |
| DDX3X | Delayed speech and language development, Global developmental delay, History |
| | of neurodevelopmental disorder, Mental retardation, Microcephaly, X-linked 102 |
| DDX41 | Acute myeloid leukemia, Myeloproliferative/lymphoproliferative neoplasms, |
| | familial (multiple types), susceptibility to |
| DEPDC5 | DEPDC5-Related Disorder, Familial focal epilepsy with variable foci |
| DES | Muscular dystrophy, Myofibrillar myopathy 1, Neuromuscular disease, Primary |
| | dilated cardiomyopathy, limb-girdle, type 2R |
| DGKE | Nephrotic syndrome, type 7 |
| DGUOK | Mitochondrial DNA depletion syndrome, Mitochondrial DNA-depletion syndrome |
| | 3, Progressive external ophthalmoplegia with mitochondrial DNA deletions, |
| | autosomal recessive 4, hepatocerebral, hepatocerebral form due to DGUOK |
| | deficiency |
| DHCR7 | 2-3 toe syndactyly, Congenital microcephaly, Elevated 7-dehydrocholesterol, |
| | History of neurodevelopmental disorder, Inborn genetic diseases, Small for |
| | gestational age, Smith-Lemli-Opitz syndrome |
| DHH | 46, XY sex reversal, type 7 |
| DHTKD1 | 2-aminoadipic 2-oxoadipic aciduria |
| DIAPH1 | Seizures, and microcephaly syndrome, cortical blindness |
| DICER1 | DICER1-related pleuropulmonary blastoma cancer predisposition syndrome, |
| | Hereditary cancer-predisposing syndrome |
| DIPK1A, RPL5 | Diamond-Blackfan anemia 6 |
| DLD | Maple syrup urine disease, type 3 |
| DLG3 | X-Linked mental retardation 90 |
| DLL3, PLEKHG2 | Leukodystrophy and acquired microcephaly with or without dystonia, |
| | Spondylocostal dysostosis 1, autosomal recessive |
| DLX3 | Amelogenesis imperfecta, Tricho-dento-osseous syndrome, type IV |
| DLX4 | Orofacial cleft 15 |
| DMD | Becker muscular dystrophy, Duchenne muscular dystrophy |
| DMP1 | Autosomal recessive hypophosphatemic vitamin D refractory rickets |
| DNAAF2 | Primary ciliary dyskinesia |
| DNAAF4, | Primary ciliary dyskinesia |
| DNAAF4-CCPG1 | |
| DNAH1 | Non-syndromic male infertility due to sperm motility disorder, |
| | SPERMATOGENIC FAILURE 18 |
| DNAH11 | 7, Ciliary dyskinesia, Primary ciliary dyskinesia, primary |
| DNAH17 | SPERMATOGENIC FAILURE 39 |
| DNAH5 | 3, Ciliary dyskinesia, Primary ciliary dyskinesia, primary |
| DNAI1 | Kartagener syndrome, Primary ciliary dyskinesia |
| DNAI2 | 9, Ciliary dyskinesia, Primary ciliary dyskinesia, primary |
| DNAJB2 | 5, Charcot-Marie-Tooth disease, Spinal muscular atrophy, autosomal recessive, |
| | distal |
| DNAJC12 | Hyperphenylalaninemia, mild, non-bh4-deficient |
| DNAL1 | 16, Ciliary dyskinesia, Primary ciliary dyskinesia, primary |
| DNM2 | Charcot-Marie-Tooth disease, dominant intermediate B |
| DNMBP | CATARACT 48 |
| DOCK6 | Adams-Oliver syndrome 2 |
| DOCK6, | Adams-Oliver syndrome, Adams-Oliver syndrome 2 |
| LOC105372273 | |
| DOCK8 | Hyperimmunoglobulin E recurrent infection syndrome, Inborn genetic diseases, |
| | autosomal recessive |
| DOK7 | Congenital myasthenic syndrome, Inborn genetic diseases, Myasthenia, Pena- |
| | Shokeir syndrome type I, familial, limb-girdle |
| DOLK | Congenital disorder of glycosylation type 1M |
| DONSON | AND LIMB ABNORMALITIES, MICROCEPHALY, Microcephaly-micromelia |
| | syndrome, SHORT STATURE |
| DPY19L2 | Spermatogenic failure 9 |
| DPYD | Dihydropyrimidine dehydrogenase deficiency, fluorouracil response - Other |
| DRAM2 | Cone-rod dystrophy 21, Retinal dystrophy |
| DRC1 | 21, Ciliary dyskinesia, Kartagener syndrome, Primary ciliary dyskinesia, primary |
| DSC2 | 11, Arrhythmogenic right ventricular cardiomyopathy, Arrhythmogenic right |
| | ventricular dysplasia, familial, type 11, with mild palmoplantar keratoderma and |
| | woolly hair |
| DSC2, DSCAS | Arrhythmogenic right ventricular cardiomyopathy, type 11 |
| DSG1 | Palmoplantar keratoderma i, focal, or diffuse, striate |
| DSG1, DSG1- | Erythroderma, and hyper-ige, congenital, hypotrichosis, with palmoplantar |
| AS1 | keratoderma |
| DSG2 | Arrhythmogenic right ventricular cardiomyopathy, Cardiac arrest, |
| | Cardiomyopathy, Cardiovascular phenotype, Dilated Cardiomyopathy, Dominant, |
| | Hypertrophic cardiomyopathy, type 10 |
| DSG2, DSG2- | Dilated cardiomyopathy 1BB |
| AS1 | |
| DSG4, DSG1- | Hypotrichosis 6 |
| AS1 | |
| DSP | Arrhythmogenic right ventricular cardiomyopathy, Arrhythmogenic right |
| | ventricular dysplasia/cardiomyopathy, Cardiac arrest, Cardiomyopathy, |
| | Cardiovascular phenotype, DSP-Related Disorders, Dilated cardiomyopathy with |
| | woolly hair and keratoderma, Keratosis palmoplantaris striata II, Left ventricular |
| | noncompaction cardiomyopathy, Lethal acantholytic epidermolysis bullosa, Long |
| | QT syndrome 1, Primary dilated cardiomyopathy, Skin fragility-woolly hair- |
| | palmoplantar keratoderma syndrome, Ventricular tachycardia, and tooth agenesis, |
| | dilated, keratoderma, type 8, with woolly hair |
| DST | Epidermolysis bullosa simplex, Neuropathy, autosomal recessive 2, hereditary |
| | sensory and autonomic, type VI |
| DUOX2 | Congenital hypothyroidism, Familial thyroid dyshormonogenesis, Inborn genetic |
| | diseases, Nongoitrous Euthyroid Hyperthyrotropinemia, Thyroid |
| | dyshormonogenesis 6 |
| DVL3 | Robinow syndrome, autosomal dominant 1, autosomal dominant 3 |
| DYNC2H1 | Jeune thoracic dystrophy, Short Rib Polydactyly Syndrome, Short-rib polydactyly |
| | syndrome type III, Short-rib thoracic dysplasia 3 with or without polydactyly |
| DYNC2I1 | Short-rib thoracic dysplasia 8 with or without polydactyly |
| DYNC2I2 | Jeune thoracic dystrophy, Short-rib thoracic dysplasia 11 with or without |
| | polydactyly |
| DYNC2LI1 | Short-rib thoracic dysplasia 15 with polydactyly |
| DYRK1A | Mental retardation, autosomal dominant 7 |
| DYSF | Autosomal recessive limb-girdle muscular dystrophy type 2B, Miyoshi muscular |
| | dystrophy 1, Myopathy, Qualitative or quantitative defects of dysferlin, distal, with |
| | anterior tibial onset |
| ECEL1 | Distal arthrogryposis type 5D, Inborn genetic diseases |
| ECHS1 | Inborn genetic diseases, Mitochondrial short-chain enoyl-coa hydratase 1 |
| | deficiency |
| ECM1 | Lipid proteinosis |
| EDA | Hypohidrotic X-linked ectodermal dysplasia |
| EDARADD | Ectodermal dysplasia 11b, autosomal recessive, hypohidrotic/hair/tooth type |
| EDN3 | Congenital central hypoventilation, Dominant, Hirschsprung Disease, |
| | Hirschsprung disease, Waardenburg syndrome, Waardenburg syndrome type 4B |
| EDNRB, | Rare genetic deafness |
| EDNRB-AS1 | |
| EFEMP2 | Autosomal recessive cutis laxa type 1B, Autosomal recessive cutis laxa type IA |
| EHMT1 | Kleefstra syndrome 1 |
| EIF2AK3 | Wolcott-Rallison dysplasia |
| EIF2AK4 | Pulmonary venoocclusive disease 2, autosomal recessive |
| EIF2B2 | Leukoencephalopathy with vanishing white matter, Ovarioleukodystrophy |
| EIF2S3 | MEHMO syndrome |
| ELN | Inborn genetic diseases, Supravalvar aortic stenosis |
| ELOVL4 | Retinal dystrophy, Stargardt Disease 3 |
| ELP1 | Familial dysautonomia |
| ELP2 | ELP2-Related Disorders, Mental retardation, autosomal recessive 58 |
| EMD | Cardiovascular phenotype, Emery-Dreifuss muscular dystrophy 1, Neuromuscular |
| | disease, X-linked |
| ENAM | Amelogenesis imperfecta, Amelogenesis imperfecta - hypoplastic autosomal |
| | dominant - local, type IC |
| ENG | Hereditary hemorrhagic telangiectasia, Hereditary hemorrhagic telangiectasia type |
| | 1 |
| ENG, | Hereditary hemorrhagic telangiectasia type 1 |
| LOC102723566 | |
| EOGT | Adams-Oliver syndrome, Adams-Oliver syndrome 4 |
| EPB42 | Spherocytosis type 5 |
| EPCAM | Diarrhea 5, congenital, with tufting enteropathy |
| EPG5 | Vici syndrome |
| EPHB4 | Capillary malformation-arteriovenous malformation 2 |
| EPHB4, | Capillary malformation-arteriovenous malformation 2 |
| SLC12A9 | |
| EPOR | Primary familial polycythemia due to EPO receptor mutation |
| ERCC2 | Metachromatic leukodystrophy variant, Trichothiodystrophy 1, Xeroderma |
| | pigmentosum, group D, photosensitive |
| ERCC3 | Xeroderma pigmentosum, complementation group b |
| ERCC4 | Cockayne syndrome, Fanconi anemia, Hutchinson-Gilford syndrome, Pre-B-cell |
| | acute lymphoblastic leukemia, XFE progeroid syndrome, Xeroderma |
| | pigmentosum, complementation group Q, group F |
| ERCC5, BIVM- | Xeroderma pigmentosum, group G |
| ERCC5 | |
| ERCC6 | Cerebrooculofacioskeletal syndrome 1, Cockayne syndrome B, DE SANCTIS- |
| | CACCHIONE SYNDROME |
| ERCC8 | Cockayne syndrome type A |
| ERCC8, ERCC8- | Cockayne syndrome type A |
| AS1 | |
| ERCC8, | Cockayne syndrome type A, MITOCHONDRIAL COMPLEX I DEFICIENCY, |
| NDUFAF2 | NUCLEAR TYPE 10 |
| ERF | Craniosynostosis 1, Craniosynostosis 4 |
| ERI1 | Abnormality of finger, Coarse facial features, Global developmental delay, |
| | Unilateral renal agenesis |
| ESCO2 | Roberts-SC phocomelia syndrome |
| ESRP1 | AUTOSOMAL RECESSIVE 109, DEAFNESS |
| ESRRB | Rare genetic deafness |
| ETFDH | Multiple acyl-CoA dehydrogenase deficiency |
| ETHE1 | Ethylmalonic encephalopathy |
| EVC2 | Curry-Hall syndrome, Ellis-van Creveld syndrome |
| EXOSC3 | Pontocerebellar hypoplasia, type 1b |
| EXPH5 | Epidermolysis bullosa, autosomal recessive, nonspecific |
| EXT1 | Chondrosarcoma, Multiple congenital exostosis, Multiple exostoses type 1, |
| | sporadic |
| EXT2 | Multiple exostoses type 2 |
| EYA1 | Branchiootic syndrome, Melnick-Fraser syndrome, Rare genetic deafness |
| EYA4 | Deafness, Dilated cardiomyopathy 1J, Rare genetic deafness, autosomal dominant |
| | 10 |
| EYA4, TARID | EYA4-Related Disorders |
| EYS | Retinal dystrophy, Retinitis pigmentosa, Retinitis pigmentosa 25 |
| F13A1 | Factor XIII subunit A deficiency |
| F13B | Factor XIII, b subunit, deficiency of |
| F2 | Prothrombin deficiency, congenital |
| F5 | Factor V deficiency |
| F8 | Hereditary factor VIII deficiency disease |
| F9 | Hereditary factor IX deficiency disease, Thrombophilia, X-linked, due to factor IX |
| | defect |
| FA2H | Spastic paraplegia 35 |
| FAH | Tyrosinemia type I |
| FAM161A | Retinal dystrophy, Retinitis pigmentosa, Retinitis pigmentosa 28 |
| FAM20A | Amelogenesis imperfecta type 1G |
| FANCA | Fanconi anemia, complementation group A |
| FANCB | Fanconi anemia, complementation group B |
| FANCC | Fanconi anemia, Hereditary cancer-predisposing syndrome, complementation |
| | group C |
| FANCC, AOPEP | Fanconi anemia, Hereditary cancer-predisposing syndrome, Tracheoesophageal |
| | fistula, complementation group C |
| FANCF | Fanconi anemia, complementation group F |
| FANCM | Fanconi anemia, Malignant germ cell tumor of ovary, SPERMATOGENIC |
| | FAILURE 28 |
| FARS2 | Combined oxidative phosphorylation deficiency 14 |
| FARSB | Interstitial lung and liver disease, Rajab interstitial lung disease with brain |
| | calcifications |
| FAS | Autoimmune lymphoproliferative syndrome |
| FAT4 | Van Maldergem syndrome |
| FBN1 | Acromicric dysplasia, Acute aortic dissection, Cardiovascular phenotype, Ectopia |
| | lentis, Familial thoracic aortic aneurysm, Familial thoracic aortic aneurysm and |
| | aortic dissection, Geleophysic dysplasia 2, Inborn genetic diseases, MASS |
| | syndrome, Marfan Syndrome/Loeys-Dietz Syndrome/Familial Thoracic Aortic |
| | Aneurysms and Dissections, Marfan lipodystrophy syndrome, Marfan syndrome, |
| | Stiff skin syndrome, Weill-Marchesani syndrome 2, autosomal dominant, isolated |
| FBN1, | Marfan Syndrome/Loeys-Dietz Syndrome/Familial Thoracic Aortic Aneurysms |
| LOC113939944 | and Dissections, Marfan syndrome |
| FBXL4 | Inborn genetic diseases, Mitochondrial DNA depletion syndrome, Mitochondrial |
| | DNA depletion syndrome 13 (encephalomyopathic type) |
| FERMT1 | Kindlers syndrome |
| FEZF1-AS1, | Hypogonadotropic hypogonadism 22 with anosmia |
| FEZF1 | |
| FGD4 | Charcot-Marie-Tooth disease, Charcot-Marie-Tooth disease type 4 |
| FGF16 | Metacarpal 4-5 fusion |
| FGF3 | Deafness with labyrinthine aplasia microtia and microdontia (LAMM) |
| FGG | Afibrinogenemia, Hypofibrinogenemia, congenital |
| FH | Fumarase deficiency, Hereditary cancer-predisposing syndrome, Hereditary |
| | leiomyomatosis and renal cell cancer |
| FIG4 | Charcot-Marie-Tooth disease, Charcot-Marie-Tooth disease type 4, Yunis-Varon |
| | syndrome, type 4J |
| FKBP10 | Bruck syndrome 1, Osteogenesis imperfecta type 12 |
| FKBP14, | Congenital muscular dystrophy, Ehlers-Danlos syndrome with progressive |
| FKBP14-AS1 | kyphoscoliosis, Inborn genetic diseases, Joint hypermobility, Muscular hypotonia, |
| | Pes valgus, Thoracolumbar scoliosis, and hearing loss, myopathy |
| FKRP | Limb-girdle muscular dystrophy-dystroglycanopathy, type C5 |
| FKTN | Congenital muscular dystrophy-dystroglycanopathy with brain and eye anomalies, |
| | Congenital muscular dystrophy-dystroglycanopathy without mental retardation, |
| | FKTN-Related Disorders, Fukuyama congenital muscular dystrophy, Limb-girdle |
| | muscular dystrophy-dystroglycanopathy, Walker-Warburg congenital muscular |
| | dystrophy, type A4, type B4, type C4 |
| FLCN | Hereditary cancer-predisposing syndrome, Multiple fibrofolliculomas, |
| | Pneumothorax, primary spontaneous |
| FLG | 2, Dermatitis, FLG-Related Disorder, Ichthyosis vulgaris, atopic, susceptibility to |
| FLNA | Periventricular nodular heterotopia 1 |
| FLNB | Spondylocarpotarsal synostosis syndrome |
| FLNC | 26, 4, Cardiomyopathy, Dilated Cardiomyopathy, Dominant, Myofibrillar |
| | myopathy, Myopathy, distal, familial hypertrophic, filamin C-related |
| FLNC, FLNC- | 26, 4, Cardiomyopathy, Dilated Cardiomyopathy, Dominant, Myofibrillar |
| AS1 | myopathy, Myopathy, distal, familial hypertrophic, filamin C-related |
| FLT4 | 7, CONGENITAL HEART DEFECTS, MULTIPLE TYPES |
| FMR1 | Intellectual disability |
| FOXF1 | Persistent fetal circulation syndrome |
| FOXG1 | History of neurodevelopmental disorder, Rett syndrome, congenital variant |
| FOXL2 | Blepharophimosis, and epicanthus inversus, and epicanthus inversus syndrome |
| | type 1, ptosis |
| FOXN1 | AUTOSOMAL DOMINANT, INFANTILE, T-CELL LYMPHOPENIA, T-cell |
| | immunodeficiency, WITH OR WITHOUT NAIL DYSTROPHY, and nail |
| | dystrophy, congenital alopecia |
| FOXP1 | Mental retardation with language impairment and with or without autistic features |
| FOXRED1 | Leigh syndrome, Mitochondrial complex I deficiency, nuclear type 1 |
| FRAS1 | Fraser syndrome 1 |
| FREM2 | Cryptophthalmos, FRASER SYNDROME 2, Fraser syndrome 1, isolated, |
| | unilateral or bilateral |
| FSHB | Hypogonadotropic hypogonadism 24 without anosmia |
| FSIP2 | SPERMATOGENIC FAILURE 34 |
| FSIP2, FSIP2- | SPERMATOGENIC FAILURE 34 |
| AS1 | |
| FTCD | GLUTAMATE FORMIMINOTRANSFERASE DEFICIENCY |
| FTSJ1 | Mental retardation 9, X-linked |
| FUCA1 | Fucosidosis |
| FYCO1 | Cataract 18 |
| FZD4, PRSS23 | Exudative retinopathy, Familial exudative vitreoretinopathy |
| G6PC | Glycogen storage disease, Glycogen storage disease due to glucose-6-phosphatase |
| | deficiency type IA |
| GAA | Glycogen storage disease, type II |
| GABRA1 | 19, Epilepsy, Epileptic encephalopathy, early infantile, juvenile myoclonic 5 |
| GABRA6 | GABRA6-Related Disorder |
| GALC | Galactosylceramide beta-galactosidase deficiency |
| GALM | GALACTOSEMIA IV |
| GALNS | MPS-IV-A, Morquio syndrome, Mucopolysaccharidosis |
| GALT | Deficiency of UDPglucose-hexose-1-phosphate uridylyltransferase |
| GAMT | Cerebral creatine deficiency syndrome, Deficiency of guanidinoacetate |
| | methyltransferase |
| GAREM2, | Long-chain 3-hydroxyacyl-CoA dehydrogenase deficiency, Mitochondrial |
| HADHA | trifunctional protein deficiency |
| GATA1 | Acute megakaryoblastic leukemia |
| GATA3 | Hypoparathyroidism-deafness-renal disease syndrome |
| GATA6 | Abnormality of cardiovascular system morphology, Congenital diaphragmatic |
| | hernia, Pancreatic agenesis and congenital heart disease, Persistent truncus |
| | arteriosus |
| GATAD1, PEX1 | Deafness enamel hypoplasia nail defects, Peroxisome biogenesis disorder 1A |
| | (Zellweger) |
| GATAD2B | GATAD2B-Related Disorder, Mental retardation, autosomal dominant 18 |
| GBA | Acute neuronopathic Gauchers disease, Gaucher disease, Gaucher disease type |
| | 3C, Gauchers disease, Subacute neuronopathic Gauchers disease, type 1 |
| GBA, | Gaucher disease, Gauchers disease, perinatal lethal, type 1 |
| LOC106627981 | |
| GBE1 | Glycogen storage disease, Glycogen storage disease IV, classic hepatic, fatal |
| | perinatal neuromuscular, type IV |
| GCDH | Glutaric aciduria, type 1 |
| GCH1 | Dystonia 5 |
| GCK | Maturity onset diabetes mellitus in young, Maturity-onset diabetes of the young, |
| | type 2 |
| GDAP1 | Charcot-Marie-Tooth disease, recessive intermediate A, type 4A |
| GDF1, CERS1 | Heterotaxia |
| GDF9 | PREMATURE OVARIAN FAILURE 14 |
| GFER | Mitochondrial diseases |
| GHR | Laron syndrome with elevated serum GH-binding protein, Laron-type isolated |
| | somatotropin defect |
| GJB1 | Charcot-Marie-Tooth Neuropathy X, Charcot-Marie-Tooth disease |
| GJB2 | Bilateral conductive hearing impairment, Bilateral sensorineural hearing |
| | impairment, Deafness, Dominant, GJB2-Related Disorders, GJB2/GJB3, |
| | GJB2/GJB6, Hearing impairment, Hearing loss, Hystrix-like ichthyosis with |
| | deafness, Inborn genetic diseases, Keratitis ichthyosis and deafness syndrome, |
| | Keratitis-ichthyosis-deafness syndrome, Knuckle pads, Mutilating keratoderma, |
| | Nonsyndromic Hearing Loss, Nonsyndromic hearing loss and deafness, |
| | Palmoplantar keratoderma-deafness syndrome, Rare genetic deafness, Recessive, |
| | Severe sensorineural hearing impairment, X-linked 2, autosomal dominant, |
| | autosomal dominant 3a, autosomal recessive 1A, autosomal recessive 1b, deafness |
| | AND leukonychia syndrome, digenic |
| GJB3 | Deafness, autosomal dominant 2b |
| GLA, RPL36A- | Fabry disease |
| HNRNPH2 | |
| GLB1 | GLB1-Related Disorders, GM1 gangliosidosis, GM1 gangliosidosis type 2, GM1 |
| | gangliosidosis type 3, GM1-gangliosidosis, Infantile GM1 gangliosidosis, MPS- |
| | IV-B, Mucopolysaccharidosis, type I, with cardiac involvement |
| GLDC | Non-ketotic hyperglycinemia |
| GLDN | Lethal congenital contracture syndrome 11 |
| GLI3 | Greig cephalopolysyndactyly syndrome, Pallister-Hall syndrome, Postaxial |
| | polydactyly, Preaxial polydactyly 4, type A1/B |
| GLIS3 | Diabetes mellitus, neonatal, with congenital hypothyroidism |
| GLMN | Glomuvenous malformations |
| GLRA1 | Hyperekplexia 1 |
| GNAS | Progressive osseous heteroplasia, Pseudohypoparathyroidism, |
| | Pseudopseudohypoparathyroidism |
| GNAT2 | Achromatopsia 4 |
| GNB5 | Intellectual developmental disorder with cardiac arrhythmia, Language delay and |
| | attention deficit-hyperactivity disorder/cognitive impairment with or without |
| | cardiac arrhythmia |
| GNPAT | Rhizomelic chondrodysplasia punctata type 2 |
| GNPTAB | GNPTAB-Related Disorders, Inborn genetic diseases, MUCOLIPIDOSIS III |
| | ALPHA/BETA, Mucolipidosis, Mucolipidosis type II, Pseudo-Hurler |
| | polydystrophy |
| GNPTG | Mucolipidosis, Mucolipidosis type III gamma |
| GORAB | Geroderma osteodysplastica |
| GOSR2, | Progressive myoclonic epilepsy |
| LRRC37A2 | |
| GPC3 | Simpson-Golabi-Behmel syndrome, Wilms tumor 1 |
| GPC4 | Keipert syndrome |
| GPC6 | Autosomal recessive omodysplasia |
| GPC6, GPC6-AS2 | Autosomal recessive omodysplasia |
| GPI | Hemolytic anemia, due to glucose phosphate isomerase deficiency, nonspherocytic |
| GPNMB | 3, AMYLOIDOSIS, PRIMARY LOCALIZED CUTANEOUS |
| GPR143 | Ocular albinism, type I |
| GPR179 | Congenital stationary night blindness, Retinal dystrophy, type 1E |
| GPSM2 | Chudley-McCullough syndrome, GPSM2-Related Disorders, Rare genetic |
| | deafness |
| GRHL2 | Deafness, autosomal dominant 28 |
| GRHL3 | Van der Woude syndrome 2 |
| GRHPR | Nephrocalcinosis, Nephrolithiasis, Primary hyperoxaluria, type II |
| GRIN2B | Mental retardation, autosomal dominant 6 |
| GRIP1 | FRASER SYNDROME 3 |
| GRN | Frontotemporal dementia |
| GRXCR1 | Deafness, Rare genetic deafness, autosomal recessive 25 |
| GSDME | Deafness, autosomal dominant 5 |
| GUCY2C, | Meconium ileus |
| C12orf60 | |
| GUSB | Mucopolysaccharidosis type 6, Mucopolysaccharidosis type 7 |
| GYG1 | Glycogen storage disease XV, Polyglucosan body myopathy 2 |
| GYS1 | Glycogen storage disease 0, muscle |
| GYS2 | Glycogen storage disease, Glycogen storage disease due to hepatic glycogen |
| | synthase deficiency |
| GZF1 | AND MYOPIA, JOINT LAXITY, SHORT STATURE |
| H1-4 | Inborn genetic diseases, RAHMAN SYNDROME |
| H6PD | Cortisone reductase deficiency 1 |
| HADHA | HADHA-Related Disorders, Long-chain 3-hydroxyacyl-CoA dehydrogenase |
| | deficiency, Mitochondrial trifunctional protein deficiency |
| HADHA, | HADHA-Related Disorders, Inborn genetic diseases, LCHAD Deficiency, Lchad |
| GAREM2 | deficiency with maternal acute fatty liver of pregnancy, Long-chain 3- |
| | hydroxyacyl-CoA dehydrogenase deficiency, Mitochondrial trifunctional protein |
| | deficiency |
| HAX1 | Severe congenital neutropenia 3, autosomal recessive |
| HBA2, | Alpha plus thalassemia |
| LOC106804612 | |
| HBB, | Anemia, Beta thalassemia major, Beta-plus-thalassemia, Beta-thalassemia, |
| LOC106099062, | Erythrocytosis 6, Fetal hemoglobin quantitative trait locus 1, HBB-Related |
| LOC107133510 | Disorders, Hb SS disease, Heinz body anemia, Hemoglobin E, Hemoglobin E |
| | disease, Hemoglobin E/beta thalassemia disease, Hemoglobin M disease, |
| | Hemoglobinopathy, Malaria, Susceptibility to malaria, alpha Thalassemia, beta |
| | Thalassemia, beta\hat{ }0\hat{ } Thalassemia, dominant inclusion body type, familial, |
| | resistance to |
| HBB, | beta Thalassemia |
| LOC107133510, | |
| LOC110006319 | |
| HCN4 | Brugada syndrome 8, Sick sinus syndrome 2, autosomal dominant |
| HEXA | Inborn genetic diseases, Tay-Sachs disease |
| HEXB | Sandhoff disease, infantile |
| HFM1 | Premature ovarian failure 9 |
| HGD | Alkaptonuria |
| HGSNAT | MPS-III-C, Mucopolysaccharidosis, Retinitis pigmentosa 73, Sanfilippo syndrome |
| HIVEP2 | Angelman syndrome-like, Mental retardation, autosomal dominant 43 |
| HJV | Hemochromatosis type 2A |
| HLCS | Holocarboxylase synthetase deficiency |
| HMCN1 | Age-related macular degeneration 1 |
| HMGB3 | Microphthalmia, syndromic 13 |
| HMGCL | Deficiency of hydroxymethylglutaryl-CoA lyase |
| HNF1A | 20, Clear cell carcinoma of kidney, Diabetes mellitus, Diabetes mellitus type 1, |
| | Hepatic adenomas, Maturity onset diabetes mellitus in young, Maturity-onset |
| | diabetes of the young, familial, insulin-dependent, type 3 |
| HNF1B | Familial hypoplastic, Renal cysts and diabetes syndrome, glomerulocystic kidney |
| HNRNPK | AU-KLINE SYNDROME |
| HNRNPU | Epileptic encephalopathy |
| HOXA1 | Athabaskan brainstem dysgenesis syndrome, Bosley-Salih-Alorainy syndrome |
| HOXA11 | Radioulnar synostosis with amegakaryocytic thrombocytopenia 1 |
| HOXD13 | Synpolydactyly 1 |
| HPGD | 1, HPGD-Related Disorders, Hypertrophic osteoarthropathy, autosomal recessive, |
| | primary |
| HPS1 | Hermansky-Pudlak syndrome, Hermansky-Pudlak syndrome 1 |
| HPS5 | Hermansky-Pudlak syndrome, Hermansky-Pudlak syndrome 5 |
| HPS6 | Hermansky-Pudlak syndrome, Hermansky-Pudlak syndrome 6 |
| HPSE2 | Urofacial syndrome 1 |
| HR | Atrichia with papular lesions |
| HSD17B10 | HSD10 disease |
| HSD17B4 | Bifunctional peroxisomal enzyme deficiency, Perrault syndrome |
| HSPA9 | 4, Anemia, Even-plus syndrome, sideroblastic |
| HSPB1 | Charcot-Marie-Tooth disease, Charcot-Marie-Tooth disease axonal type 2F, Distal |
| | hereditary motor neuronopathy type 2B |
| HSPG2 | Lethal Kniest-like syndrome, Schwartz-Jampel syndrome |
| HYAL1 | Deficiency of hyaluronoglucosaminidase |
| HYDIN | 5, Ciliary dyskinesia, primary |
| ICAM4 | Landsteiner-Wiener phenotype |
| IDS | MPS-II, Mucopolysaccharidosis |
| IDS, | MPS-II, Mucopolysaccharidosis |
| LOC106050102 | |
| IDUA | Hurler syndrome, MPS-I-H/S, MPS-I-S, Mucopolysaccharidosis, |
| | Mucopolysaccharidosis type 1 |
| IDUA, SLC26A1 | Hurler syndrome, MPS-I-H/S, MPS-I-S, Mucopolysaccharidosis, |
| | Mucopolysaccharidosis type 1 |
| IFIH1 | Aicardi-Goutieres syndrome 7, Singleton-Merten syndrome 1 |
| IFNGR1 | Disseminated atypical mycobacterial infection, IFN-gamma receptor 1 deficiency, |
| | Immunodeficiency 27b, Inherited Immunodeficiency Diseases |
| IFNGR2 | Immunodeficiency 28 |
| IFT140 | Retinitis pigmentosa 80 |
| IFT140, | Jeune thoracic dystrophy, Joubert syndrome with Jeune asphyxiating thoracic |
| LOC105371046 | dystrophy, Renal dysplasia, cerebellar ataxia and skeletal dysplasia, retinal |
| | pigmentary dystrophy |
| IFT172 | Short-rib thoracic dysplasia 10 with or without polydactyly |
| IFT52 | Short Rib Polydactyly Syndrome, Short-rib thoracic dysplasia 16 with or without |
| | polydactyly |
| IGF1 | Growth delay due to insulin-like growth factor type 1 deficiency |
| IGF1R | Inborn genetic diseases |
| IGFALS | Acid-labile subunit deficiency |
| IGHM | Agammaglobulinemia, non-Bruton type |
| IGHMBP2 | 1, Autosomal dominant distal hereditary motor neuropathy, Charcot-Marie-Tooth |
| | disease, Distal spinal muscular atrophy, Inborn genetic diseases, Spinal muscular |
| | atrophy, autosomal recessive, axonal, distal, type 2S |
| IGLL1 | Agammaglobulinemia 2, autosomal recessive |
| IGSF1 | Hypothyroidism, and testicular enlargement, central |
| IGSF3 | Lacrimal duct defect |
| IKBKG | Ectodermal dysplasia and immunodeficiency 1, Immunodeficiency without |
| | anhidrotic ectodermal dysplasia, Incontinentia pigmenti, atypical |
| IL12B | Immunodeficiency 29 |
| IL12RB1 | Immunodeficiency 30 |
| IL2RB | Ichthyosis (disease) |
| IL2RG | Combined immunodeficiency, X-linked, X-linked severe combined |
| | immunodeficiency |
| IL36RN | Pustular psoriasis, generalized |
| IL7R | B cell-positive, NK cell-positive, Severe combined immunodeficiency, T cell- |
| | negative, autosomal recessive |
| INPP5E | Retinal dystrophy |
| INPPL1 | Opsismodysplasia |
| INTU | Mohr syndrome, Orofaciodigital syndrome 17 |
| IQCB1 | Renal dysplasia and retinal aplasia |
| IQCE | POLYDACTYLY, POSTAXIAL, TYPE A7 |
| IQSEC2 | Mental retardation, Severe intellectual deficiency, X-linked 1 |
| IRAK4 | Immunodeficiency due to interleukin-1 receptor-associated kinase-4 deficiency |
| IRF2BPL | ABNORMAL MOVEMENTS, AND SEIZURES, LOSS OF SPEECH, |
| | NEURODEVELOPMENTAL DISORDER WITH REGRESSION, |
| | Neurodevelopmental disorder |
| IRF6 | Van der Woude syndrome |
| IRS4 | 9, CONGENITAL, HYPOTHYROIDISM, NONGOITROUS |
| ISCA2 | Multiple mitochondrial dysfunctions syndrome 4 |
| ISG15 | Immunodeficiency 38 with basal ganglia calcification |
| ITGA7 | Muscular dystrophy, congenital, due to integrin alpha-7 deficiency |
| ITGB2 | Leukocyte adhesion deficiency |
| ITGB4 | Epidermolysis bullosa junctionalis with pyloric atresia |
| ITPA | 35, Epileptic encephalopathy, Inosine triphosphatase deficiency, early infantile |
| ITPR1 | Gillespie syndrome |
| IVD | Isovaleric acidemia, Isovaleryl-CoA dehydrogenase deficiency, type III |
| JAG1 | Alagille syndrome 1, Arteriohepatic dysplasia, Heart, malformation of |
| JAK3 | B cell-positive, NK cell-negative, Severe combined immunodeficiency, Severe |
| | combined immunodeficiency disease, T cell-negative, autosomal recessive |
| KAT6A | History of neurodevelopmental disorder, Mental retardation, autosomal dominant |
| | 32 |
| KAT6B | Blepharophimosis - intellectual disability syndrome, SBBYS type |
| KAT6B, DUPD1 | Blepharophimosis - intellectual disability syndrome, Genitopatellar syndrome, |
| | Inborn genetic diseases, SBBYS type |
| KATNIP | Joubert syndrome 26 |
| KCNA1 | Episodic ataxia type 1 |
| KCNA5 | 7, Atrial fibrillation, familial |
| KCNC1 | Epilepsy, progressive myoclonic 7 |
| KCNE1 | Long QT syndrome |
| KCNH2 | Cardiac arrhythmia, Cardiovascular phenotype, Congenital long QT syndrome, |
| | Long QT syndrome, Long QT syndrome 1/2, Long QT syndrome 2, digenic |
| KCNK18 | Migraine, with or without aura 13 |
| KCNQ1 | Cardiac arrhythmia, Cardiovascular phenotype, Congenital long QT syndrome, |
| | Jervell and Lange-Nielsen syndrome, Jervell and Lange-Nielsen syndrome 1, |
| | KCNQ1-Related Disorders, LQT1 subtype, Long QT syndrome, Long QT |
| | syndrome 1, Rare genetic deafness, Romano-Ward syndrome, recessive |
| KCNQ1-AS1, | Jervell and Lange-Nielsen syndrome 1 |
| KCNQ1 | |
| KCNQ1, KCNQ1- | Cardiovascular phenotype, Long QT syndrome, Long QT syndrome 1 |
| AS1 | |
| KCNQ1, | Congenital long QT syndrome, LQT1 subtype, Long QT syndrome |
| KCNQ1OT1 | |
| KCNQ2 | Benign familial neonatal seizures 1, Early infantile epileptic encephalopathy, Early |
| | infantile epileptic encephalopathy 7, Epileptic encephalopathy, Inborn genetic |
| | diseases, Seizures |
| KCNQ3 | Intellectual disability, Seizures |
| KCNQ4 | Autosomal dominant nonsyndromic deafness 2A |
| KCNT1 | 5, Early infantile epileptic encephalopathy 14, Epilepsy, nocturnal frontal lobe |
| KCNV2 | Cone dystrophy with supernormal rod response, Progressive cone dystrophy |
| | (without rod involvement), Retinal dystrophy, Stargardt disease |
| KDM5B | Intellectual disability, autosomal recessive 65 |
| KDM5C | Claes-Jensen type, Mental retardation, X-linked, syndromic |
| KDM6A | Kabuki syndrome 2 |
| KERA | Cornea plana 2 |
| KHDC3L | 2, Hydatidiform mole, recurrent |
| KIAA0586 | Congenital cerebellar hypoplasia, Intellectual disability, Joubert syndrome, Joubert |
| | syndrome 23, Retinal dystrophy, Rod-cone dystrophy, Short-rib thoracic dysplasia |
| | 14 with polydactyly |
| KIAA0753 | Orofaciodigital syndrome XV |
| KIAA0825 | POLYDACTYLY, POSTAXIAL, Postaxial polydactyly type A1, TYPE A10 |
| KIΛA1549 | RETINITIS PIGMENTOSA 86 |
| KIF11 | Microcephaly with or without chorioretinopathy, lymphedema, or mental |
| | retardation |
| KIF7 | Acrocallosal syndrome, Joubert syndrome 12 |
| KIFBP | Goldberg-Shprintzen megacolon syndrome |
| KISS1R | Hypogonadotropic hypogonadism 8 without anosmia |
| KIZ | Retinitis pigmentosa 69 |
| KMT2A | Wiedemann-Steiner syndrome |
| KMT2B | Dystonia 28, childhood-onset |
| KMT2C | Kleefstra syndrome due to a point mutation |
| KMT2D | CHARGE association, Kabuki syndrome, Kabuki syndrome 1 |
| KMT2E | Epilepsy, Leukoencephalopathy, Macrocephalus, O''''DONNELL-LURIA-RODAN |
| | SYNDROME, See cases, intellectual deficiency |
| KPTN | Mental retardation, autosomal recessive 41 |
| KRIT1 | Cavernous malformations of CNS and retina, Cerebral cavernous malformation, |
| | Cerebral cavernous malformations 1 |
| KRT1 | Ichthyosis histrix, curth-macklin type |
| KRT10 | Bullous ichthyosiform erythroderma |
| KRT10, TMEM99 | Bullous ichthyosiform erythroderma |
| KRT14 | Epidermolysis bullosa simplex, autosomal recessive |
| KRT5 | Dowling-Degos disease 1 |
| KRT6A | Pachyonychia congenita 3 |
| KRT85 | ‘pure’ hair-nail type, Ectodermal dysplasia |
| KYNU | AND LIMB DEFECTS SYNDROME 2, CARDIAC, Congenital NAD deficiency |
| | disorder, RENAL, VERTEBRAL |
| L1CAM | MASA syndrome, Spastic paraplegia |
| L2HGDH | L-2-hydroxyglutaric aciduria |
| LACC1 | JUVENILE ARTHRITIS |
| LAMA2 | Inborn genetic diseases, Laminin alpha 2-related dystrophy, Merosin deficient |
| | congenital muscular dystrophy |
| LAMA3 | Junctional epidermolysis bullosa gravis of Herlitz |
| LAMA4 | Dilated cardiomyopathy 1JJ |
| LAMB3 | Amelogenesis imperfecta, Junctional epidermolysis bullosa, Junctional |
| | epidermolysis bullosa gravis of Herlitz, non-Herlitz type, type IA |
| LAMC2 | Junctional epidermolysis bullosa, Junctional epidermolysis bullosa gravis of |
| | Herlitz, non-Herlitz type |
| LAMP2 | Cardiomyopathy, Danon disease, Hypertrophic cardiomyopathy, Primary dilated |
| | cardiomyopathy |
| LARGE1 | Congenital muscular dystrophy-dystroglycanopathy with mental retardation, type |
| | B6 |
| LBR | Disproportionate short stature, Femoral bowing, Pelger-HuÃ«t anomaly, |
| | Regressive spondylometaphyseal dysplasia, Retrognathia, Rhizomelic arm |
| | shortening, Rhizomelic leg shortening, Short long bone |
| LDB3 | Cardiomyopathy, Myofibrillar myopathy, ZASP-related |
| LDLR | Familial hypercholesterolemia, Familial hypercholesterolemia 1, Homozygous |
| | familial hypercholesterolemia |
| LDLRAP1 | Familial hypercholesterolemia 4 |
| LEP | Leptin deficiency or dysfunction |
| LFNG | Spondylocostal dysostosis 3, autosomal recessive |
| LGI1 | Familial temporal lobe epilepsy 1 |
| LHFPL5 | Rare genetic deafness |
| LHX3 | Non-acquired combined pituitary hormone deficiency with spine abnormalities |
| LIFR | StÃ¼ve-Wiedemann syndrome |
| LIG4 | LIG4-Related Disorders, Lig4 syndrome |
| LIPA | Lysosomal acid lipase deficiency |
| LIPE | Familial partial lipodystrophy 6 |
| LIPE, LIPE-AS1, | Familial partial lipodystrophy 6 |
| LOC101930071 | |
| LIPH | Hypotrichosis 7, Woolly hair, autosomal recessive 2, with or without hypotrichosis |
| LIPN | Autosomal recessive congenital ichthyosis 8 |
| LMBR1 | Acheiropodia |
| LMBRD1 | Inborn genetic diseases, Methylmalonic aciduria and homocystinuria type cblF |
| LMNA | Cardiovascular phenotype, Charcot-Marie-Tooth disease, Primary dilated |
| | cardiomyopathy, type 2 |
| LMOD3 | Nemaline myopathy 10 |
| LMX1B | Nail-patella syndrome |
| LOC100507346, | Gorlin syndrome, Medulloblastoma |
| PTCH1 | |
| LOC101927055, | Dilated cardiomyopathy 1G, Limb-girdle muscular dystrophy, Primary dilated |
| TTN | cardiomyopathy, type 2J |
| LOC101927157, | Retinitis pigmentosa, Retinitis pigmentosa 49 |
| CNGA1 | |
| LOC101927188, | Poretti-Boltshauser syndrome |
| LAMA1 | |
| LOC102723566, | Hereditary hemorrhagic telangiectasia type 1 |
| ENG | |
| LOC106694316, | Myeloperoxidase deficiency |
| MPO | |
| LOC110006319, | beta Thalassemia |
| HBB, | |
| LOC107133510 | |
| LOXHD1 | Deafness, Rare genetic deafness, autosomal recessive 77 |
| LPL | Hyperlipoproteinemia, Lpl-arita, type I |
| LRAT | EARLY-ONSET SEVERE, JUVENILE, LRAT-RELATED, Leber congenital |
| | amaurosis, Leber congenital amaurosis 14, RETINAL DYSTROPHY, RETINITIS |
| | PIGMENTOSA |
| LRBA | Common variable immunodeficiency 8, with autoimmunity |
| LRIT3 | Congenital stationary night blindness, type 1F |
| LRP4 | Cenani-Lenz syndactyly syndrome |
| LRP5 | Exudative vitreoretinopathy 4, Familial exudative vitreoretinopathy, autosomal |
| | dominant |
| LRP6 | 7, Tooth agenesis, selective |
| LRPAP1 | Myopia 23, Rare isolated myopia, autosomal recessive |
| LRPPRC | Congenital lactic acidosis, Saguenay-Lac-Saint-Jean type |
| LRSAM1 | Charcot-Marie-Tooth disease type 2P |
| LRTOMT | Deafness, Rare genetic deafness, autosomal recessive 63 |
| LTBP2 | Congenital glaucoma, Microspherophakia |
| LTBP3 | Dental anomalies and short stature |
| LTBP4 | Cutis laxa with severe pulmonary, and urinary abnormalities, gastrointestinal |
| LYRM7 | Mitochondrial complex III deficiency, nuclear type 8 |
| LZTFL1 | Bardet-Biedl syndrome 17 |
| LZTR1 | Noonan syndrome 2, Schwannomatosis 2 |
| MAB21L1, | AND GENITAL SYNDROME, CEREBELLAR, CRANIOFACIAL, OCULAR |
| NBEA | |
| MAFB | Duane retraction syndrome 2, Duane retraction syndrome 3 with or without |
| | deafness, Duane syndrome type 1, Duane syndrome type 3 |
| MAGED2 | Barrier syndrome, antenatal, transient, type 5 |
| MAGEL2 | Inborn genetic diseases, Schaaf-Yang syndrome |
| MAGT1 | Epstein-Barr virus infection, Immunodeficiency, X-Linked, and neoplasia, with |
| | magnesium defect |
| MAK | Retinal dystrophy |
| MAN2B1 | Deficiency of alpha-mannosidase |
| MANBA | Beta-D-mannosidosis |
| MAP2K2 | Rasopathy |
| MAPRE2 | 2, Skin creases, congenital symmetric circumferential |
| MARVELD2 | Deafness, Rare genetic deafness, autosomal recessive 49, neurosensory |
| MAX | Hereditary cancer-predisposing syndrome |
| MBD5 | Mental retardation, autosomal dominant 1 |
| MC2R | ACTH resistance |
| MC4R | Monogenic diabetes, Obesity, Schizophrenia |
| MCCC1 | 3 Methylcrotonyl-CoA carboxylase 1 deficiency |
| MCCC2 | 3-methylcrotonyl CoA carboxylase 2 deficiency |
| MCM5 | MEIER-GORLIN SYNDROME 8 |
| MCM8 | Premature ovarian failure 10 |
| MCOLN1 | Mucolipidosis type IV |
| MCPH1 | Abnormality of brain morphology, Primary autosomal recessive microcephaly 1 |
| MECP2 | Angelman syndrome, Atypical Rett syndrome, Autism, Delayed gross motor |
| | development, Delayed speech and language development, Developmental |
| | regression, Encephalopathy, Global developmental delay, History of |
| | neurodevelopmental disorder, Inborn genetic diseases, Intellectual disability, Loss |
| | of ability to walk, Mental retardation, Rett syndrome, Severe neonatal-onset |
| | encephalopathy with microcephaly, Smith-Magenis Syndrome-like, Syndromic X- |
| | linked intellectual disability Lubs type, X-linked, X-linked 3, neonatal |
| | severeMental retardation, susceptibility to, syndromic 13, syndromic 13Rett |
| | syndrome |
| MED12 | Cardiovascular phenotype, FG syndrome 1, History of neurodevelopmental |
| | disorder |
| MED13L | Mental retardation and distinctive facial features with or without cardiac defects |
| MED25 | Broad-based gait, Charcot-Marie-Tooth disease, Decreased body weight, Failure to |
| | thrive, Generalized hypotonia, Impaired distal proprioception, Sensory ataxia, |
| | Sensory ataxic neuropathy, Sensory neuropathy, type 2 |
| MEF2C | MEF2C-Related Disorder, Mental retardation, and/or cerebral malformations, |
| | epilepsy, stereotypic movements |
| MEFV | Familial Mediterranean fever |
| MEN1 | Hereditary cancer-predisposing syndrome, Lipoma, Multiple endocrine neoplasia, |
| | somatic, type 1 |
| MERTK | Retinitis pigmentosa 38 |
| MESD | OSTEOGENESIS IMPERFECTA, TYPE XX |
| METTL23 | Inborn genetic diseases, Mental retardation, autosomal recessive 44 |
| MFN2 | Charcot-Marie-Tooth disease, type 2 |
| MFRP, C1QTNF5 | Microphthalmia, Nanophthalmos 2, isolated 5 |
| MFSD8 | Neuronal ceroid lipofuscinosis 7 |
| MIP | Cataract 15, multiple types |
| MIR6886, LDLR | Familial hypercholesterolemia, Familial hypercholesterolemia 1, Homozygous |
| | familial hypercholesterolemia |
| MITF | Coloboma, Rare genetic deafness, Waardenburg syndrome type 2A, albinism, and |
| | deafness, macrocephaly, microphthalmia, osteopetrosis |
| MKRN3 | 2, Precocious puberty, central |
| MKS1 | Joubert syndrome, Joubert syndrome 28, Meckel syndrome type 1, Meckel-Gruber |
| | syndrome |
| MLC1 | Megalencephalic leukoencephalopathy with subcortical cysts 1 |
| MLH1 | Carcinoma of colon, Colon cancer, Hereditary cancer-predisposing syndrome, |
| | Hereditary nonpolyposis colon cancer, Lynch syndrome, Lynch syndrome I, Lynch |
| | syndrome II, Muir-TorrÃ © syndrome, Turcot syndrome |
| MLH3 | Hereditary nonpolyposis colorectal cancer type 7 |
| MLYCD | Deficiency of malonyl-CoA decarboxylase |
| MMAA | Methylmalonic acidemia, Vitamin B12-responsive methylmalonic acidemia type |
| | cblA |
| MMAB | Methylmalonic acidemia, Vitamin B12-responsive methylmalonic acidemia type |
| | cblB |
| MMACHC | DIGENIC, Disorders of Intracellular Cobalamin Metabolism, |
| | METHYLMALONIC ACIDURIA AND HOMOCYSTINURIA, Methylmalonic |
| | acidemia with homocystinuria, Methylmalonic aciduria due to methylmalonyl- |
| | CoA mutase deficiency, cblC TYPE |
| MME | Charcot-Marie-Tooth disease, Congenital membranous nephropathy due to |
| | fetomatemal anti-neutral endopeptidase alloimmunization, axonal, type 2T |
| MMUT | Methylmalonic acidemia, Methylmalonic aciduria due to methylmalonyl-CoA |
| | mutase deficiency |
| MOCS2 | Molybdenum cofactor deficiency, complementation group B |
| MPDZ | 2, Congenital hydrocephalus, Hydrocephalus, congenital, with or without brain or |
| | eye anomalies |
| MPL | Congenital amegakaryocytic thrombocytopenia, essential thrombocytemia |
| MPLKIP | Trichothiodystrophy, nonphotosensitive 1 |
| MPO | Myeloperoxidase deficiency |
| MPV17 | Navajo neurohepatopathy |
| MPZ | Charcot-Marie-Tooth disease |
| MPZL2 | AUTOSOMAL RECESSIVE 111, DEAFNESS |
| MRE11 | Hereditary cancer-predisposing syndrome |
| MSH2 | Carcinoma of colon, Colon cancer, Glioblastoma, Hereditary cancer-predisposing |
| | syndrome, Hereditary nonpolyposis colon cancer, Lynch syndrome, Lynch |
| | syndrome I, Malignant tumor of ascending colon, Malignant tumor of sigmoid |
| | colon, Muir-TorrÃ © syndrome, Ovarian Neoplasms, Turcot syndrome |
| MSH6 | Endometrial carcinoma, Hereditary cancer-predisposing syndrome, Hereditary |
| | nonpolyposis colon cancer, Hereditary nonpolyposis colorectal cancer type 5, |
| | Hereditary nonpolyposis colorectal carcinoma, Lynch syndrome, Lynch syndrome |
| | I, Turcot syndrome |
| MSTO1 | Mitochondrial myopathy-cerebellar ataxia-pigmentary retinopathy syndrome |
| MSX2 | Parietal foramina 1 |
| MTFMT | Abnormal facial shape, Combined oxidative phosphorylation deficiency 15, |
| | Cytochrome C oxidase-negative muscle fibers, Decreased activity of mitochondrial |
| | complex I, Inability to walk by childhood/adolescence, Leigh syndrome, |
| | MITOCHONDRIAL COMPLEX I DEFICIENCY, Mitochondrial oxidative |
| | phosphorylation disorder, NUCLEAR TYPE 27, Poor speech, Short stature |
| MTHFD1 | COMBINED IMMUNODEFICIENCY AND MEGALOBLASTIC ANEMIA |
| | WITH OR WITHOUT HYPERHOMOCYSTEINEMIA |
| MTM1 | Severe X-linked myotubular myopathy |
| MTRR | Disorders of Intracellular Cobalamin Metabolism, Homocystinuria without |
| | methylmalonic aciduria, Homocystinuria-Megaloblastic anemia due to defect in |
| | cobalamin metabolism, cblE complementation type |
| MTTP | Abetalipoproteinaemia |
| MUTYH | Carcinoma of colon, Colon cancer, Familial colorectal cancer, Hereditary cancer- |
| | predisposing syndrome, MUTYH-associated polyposis, MYH-associated |
| | polyposis, Neoplasm of stomach, Pilomatrixoma |
| MVK | Hyperimmunoglobulin D with periodic fever, Mevalonic aciduria, Porokeratosis 3, |
| | disseminated superficial actinic type |
| MYBPC3 | Asymmetric septal hypertrophy, Cardiomyopathy, Cardiovascular phenotype, |
| | Dyspnea, Familial dilated cardiomyopathy, Familial hypertrophic cardiomyopathy |
| | 1, Familial hypertrophic cardiomyopathy 4, Heart block, Hypertrophic |
| | cardiomyopathy, Inborn genetic diseases, Left ventricular hypertrophy, Left |
| | ventricular noncompaction, Left ventricular noncompaction 10, Long QT |
| | syndrome, MYBPC3-Related Disorders, Noncompaction cardiomyopathy, Primary |
| | dilated cardiomyopathy, Primary familial hypertrophic cardiomyopathy, |
| | Tachycardia, Ventricular extrasystoles |
| MYCN | Inborn genetic diseases |
| MYEF2, | Albinism, oculocutaneous, type VI |
| SLC24A5 | |
| MYF5 | Abnormality of the ribs, EXTERNAL, External ophthalmoplegia, |
| | OPHTHALMOPLEGIA, Scoliosis, WITH RIB AND VERTEBRAL |
| | ANOMALIES |
| MYH11, NDE1 | Familial aortopathy |
| MYH2, MYHAS | Myopathy, and ophthalmoplegia, proximal |
| MYH3 | Contractures, Spondylocarpotarsal synostosis syndrome, and variable skeletal |
| | fusions syndrome 1A, pterygia |
| MYH6 | Familial hypertrophic cardiomyopathy 1 |
| MYH7 | Hypertrophic cardiomyopathy, Primary dilated cardiomyopathy |
| MYH7, MHRT | Cardiomyopathy, Cardiovascular phenotype, Hypertrophic cardiomyopathy, |
| | MYH7-Related Disorders |
| MYL2, | Familial hypertrophic cardiomyopathy 10 |
| LOC114827850 | |
| MYLK | Visceral myopathy |
| MYO15A | Congenital sensorineural hearing impairment, Deafness, Nonsyndromic hearing |
| | loss and deafness, Rare genetic deafness, autosomal recessive 3 |
| MYO3A | Deafness, autosomal recessive 30 |
| MYO5B | Congenital microvillous atrophy |
| MYO6 | Deafness, Nonsyndromic hearing loss and deafness, Rare genetic deafness, |
| | autosomal dominant 22 |
| MYO7A | Deafness, MYO7A-Related Disorders, Rare genetic deafness, Retinal dystrophy, |
| | Retinitis pigmentosa, Usher syndrome, Usher syndrome type 1, autosomal |
| | dominant 11, autosomal recessive 2, type 1B |
| MYOCD | CONGENITAL, MEGABLADDER, Prune belly syndrome |
| MYRF | CARDIAC-UROGENITAL SYNDROME |
| NADSYN1 | AND LIMB DEFECTS SYNDROME 3, CARDIAC, Congenital NAD deficiency |
| | disorder, RENAL, VERTEBRAL |
| NAGLU | Charcot-Marie-Tooth disease, MPS-III-B, Mucopolysaccharidosis, Sanfilippo |
| | syndrome, axonal type 2V |
| NALCN | Hypotonia, infantile, with psychomotor retardation and characteristic facies 1 |
| NBAS | Fever-associated acute infantile liver failure syndrome, Infantile liver failure |
| | syndrome 2 |
| NBN | Acute lymphoid leukemia, Aplastic anemia, Breast-ovarian cancer, Familial cancer |
| | of breast, Hereditary breast and ovarian cancer syndrome, Hereditary cancer- |
| | predisposing syndrome, Lissencephaly, Microcephaly, Ovarian Neoplasms, |
| | familial 1, normal intelligence and immunodeficiency |
| NCF1, | Chronic granulomatous disease, Chronic granulomatous disease due to deficiency |
| LOC106029312 | of NCF-1, Granulomatous disease, autosomal recessive, autosomal recessive |
| | cytochrome b-positive, chronic, cytochrome b-positive, type 1, type III |
| NCR1, NLRP7 | 1, Hydatidiform mole, recurrent |
| NCSTN | Familial acne inversa 1 |
| NDE1 | Lissencephaly 4 |
| NDNF | HYPOGONADOTROPIC HYPOGONADISM 25 WITH ANOSMIA |
| NDUFA12 | Leigh syndrome |
| NDUFAF2 | Inborn genetic diseases, Leigh syndrome, MITOCHONDRIAL COMPLEX I |
| | DEFICIENCY, Mitochondrial complex I deficiency, NDUFAF2-Related |
| | Disorders, NUCLEAR TYPE 10, nuclear type 1 |
| NDUFAF3 | Mitochondrial complex I deficiency |
| NDUFB11 | Linear skin defects with multiple congenital anomalies 3 |
| NDUFS4 | Leigh syndrome, Mitochondrial complex I deficiency, nuclear type 1 |
| NDUFS6 | MITOCHONDRIAL COMPLEX I DEFICIENCY, NUCLEAR TYPE 9 |
| NDUFV1 | MITOCHONDRIAL COMPLEX I DEFICIENCY, Mitochondrial complex I |
| | deficiency, NUCLEAR TYPE 4, nuclear type 1 |
| NEB | Inborn genetic diseases, Nemaline myopathy, Nemaline myopathy 2, Non-immune |
| | hydrops fetalis |
| NEB, RIF1 | Nemaline myopathy, Nemaline myopathy 2 |
| NEBL | Hypertrophic cardiomyopathy, Long QT syndrome, Primary dilated |
| | cardiomyopathy, Primary familial hypertrophic cardiomyopathy, Sudden |
| | unexplained death |
| NEFL | Charcot-Marie-Tooth disease type 2E |
| NEK1 | 24, AMYOTROPHIC LATERAL SCLEROSIS, Majewski type, |
| | SUSCEPTIBILITY TO, Short rib-polydactyly syndrome, Short-rib thoracic |
| | dysplasia 3 with or without polydactyly |
| NEUROD1 | Maturity-onset diabetes of the young type 6 |
| NEXN | Dilated cardiomyopathy 1CC, Familial hypertrophic cardiomyopathy 20 |
| NF1 | Axillary freckling, CafÃ ©-au-lait macules with pulmonary stenosis, Focal T2 |
| | hyperintense basal ganglia lesion, Ganglioglioma, Hereditary cancer-predisposing |
| | syndrome, Inborn genetic diseases, Juvenile myelomonocytic leukemia, Multiple |
| | cafe-au-lait spots, Neurofibroma, Neurofibromas, Neurofibromatosis, |
| | Neurofibromatosis-Noonan syndrome, Optic nerve glioma, Pilocytic astrocytoma, |
| | Tibial pseudoarthrosis, familial spinal, type 1 |
| NF1, | Hereditary cancer-predisposing syndrome, Neurofibromatosis, type 1 |
| LOC111811965 | |
| NF2 | Meningioma, Neurofibromatosis, type 2 |
| NFIB | ACQUIRED, Intellectual disability, MACROCEPHALY, Macrocephalus, WITH |
| | IMPAIRED INTELLECTUAL DEVELOPMENT |
| NFIX | Marshall-Smith syndrome |
| NGLY1 | Congenital disorder of deglycosylation, Intellectual disability, Neuromotor delay, |
| | Peripheral neuropathy |
| NHLRC1 | Epilepsy, Lafora disease, progressive myoclonic 2b |
| NHLRC2 | AND CEREBRAL ANGIOMATOSIS, FIBROSIS, NEURODEGENERATION |
| NHS | Nance-Horan syndrome |
| NIPAL4 | Autosomal recessive congenital ichthyosis 6 |
| NIPBL | Cornelia de Lange syndrome 1 |
| NKX2-5 | Abnormality of cardiovascular system morphology, Atrial septal defect 7 with or |
| | without atrioventricular conduction defects |
| NKX3-2 | Spondylo-megaepiphyseal-metaphyseal dysplasia |
| NKX6-2 | AUTOSOMAL RECESSIVE, SPASTIC ATAXIA 8, WITH |
| | HYPOMYELINATING LEUKODYSTROPHY |
| NLGN4X | Autism, Non-syndromic X-linked intellectual disability, X-linked 2, susceptibility |
| | to |
| NLRP7 | 1, Hydatidiform mole, recurrent |
| NOTCH1 | Adams-Oliver syndrome 5, Aortic valve disorder, congenital heart defect |
| NPC1 | Niemann-Pick disease, Niemann-Pick disease type C1, type C |
| NPHP1 | Nephronophthisis, Nephronophthisis 1 |
| NPHP3, NPHP3- | Meckel syndrome type 7 |
| ACAD11 | |
| NPHS1 | Finnish congenital nephrotic syndrome |
| NPHS2 | Idiopathic nephrotic syndrome, Nephrotic syndrome, idiopathic, steroid-resistant |
| NPHS2, | Idiopathic nephrotic syndrome, Nephrotic range proteinuria, Nephrotic syndrome, |
| AXDND1 | idiopathic, steroid-resistant |
| NPRL3, HBA- | Epilepsy, familial focal, with variable foci 3 |
| LCR | |
| NR0B1 | Congenital adrenal hypoplasia, X-linked |
| NR2E3 | Abnormality of color vision, Cone-rod dystrophy, Enhanced s-cone syndrome, |
| | Horizontal nystagmus, NR2E3-Related Disorders, Retinal dystrophy, Retinitis |
| | pigmentosa, Retinitis pigmentosa 37, Visual impairment |
| NR3C2 | Autosomal dominant pseudohypoaldosteronism type 1 |
| NSD1 | Beckwith-Wiedemann syndrome, Inborn genetic diseases, Sotos syndrome 1 |
| NSD2 | 4p partial monosomy syndrome, Wolf-Hirschhom like syndrome |
| NSMCE2 | Seckel syndrome 10 |
| NSMF | Hypogonadotropic hypogonadism 9 with or without anosmia |
| NSUN2 | Mental retardation, autosomal recessive 5 |
| NT5E | Calcification of joints and arteries |
| NTHL1 | Familial adenomatous polyposis 3, Hereditary cancer-predisposing syndrome |
| NTRK1 | Hereditary insensitivity to pain with anhidrosis |
| OAT | Ornithine aminotransferase deficiency |
| OBSL1 | Three M syndrome 2 |
| OCA2 | 1, Skin/hair/eye pigmentation, Tyrosinase-positive oculocutaneous albinism, |
| | variation in |
| OCLN | Pseudo-TORCH syndrome 1 |
| OFD1 | Joubert syndrome, Orofaciodigital syndrome I, Simpson-Golabi-Behmel |
| | syndrome, type 2 |
| OPA1 | Abortive cerebellar ataxia, Dominant hereditary optic atrophy, Inborn genetic |
| | diseases, Mitochondrial diseases, Retinal dystrophy |
| OPHN1 | Mental retardation X-linked with cerebellar hypoplasia and distinctive facial |
| | appearance |
| OPN1LW | Cone monochromatism |
| ORC6 | Meier-Gorlin syndrome 3 |
| OSGIN2, NBN | Hereditary cancer-predisposing syndrome, Microcephaly, normal intelligence and |
| | immunodeficiency |
| OTC | Abnormality of ornithine metabolism, Hyperammonemia, Ornithine |
| | carbamoyltransferase deficiency, Protein avoidance |
| OTOA | Deafness, Rare genetic deafness, autosomal recessive 22 |
| OTOF | Deafness, Rare genetic deafness, autosomal recessive 9 |
| OTOG | Deafness, Intellectual disability, Rare genetic deafness, Seizures, autosomal |
| | recessive 18b |
| OTOGL | Rare genetic deafness |
| OTUD6B | Dysmorphic features, Epilepsy, Intellectual developmental disorder with |
| | dysmorphic facies, Intellectual disability, and distal limb anomalies, seizures |
| OTX2 | Syndromic microphthalmia type 5 |
| P2RY12, | Platelet-type bleeding disorder 8 |
| MED12L | |
| P3H1 | Osteogenesis imperfecta type 8 |
| P3H2 | Myopia, high, with cataract and vitreoretinal degeneration |
| P4HA2 | Myopia 25, autosomal dominant |
| PAFAH1B1 | Inborn genetic diseases, Lissencephaly due to LIS1 mutation |
| PAH | Phenylketonuria |
| PALB2 | Basal cell carcinoma, Breast cancer, Cancer of the pancreas, Familial cancer of |
| | breast, Fanconi anemia, Generalized hypopigmentation, Hereditary breast and |
| | ovarian cancer syndrome, Hereditary cancer, Hereditary cancer-predisposing |
| | syndrome, Neoplasm of the breast, Ovarian Neoplasms, PALB2-Related |
| | Disorders, Pancreatic cancer 3, Pre-B-cell acute lymphoblastic leukemia, |
| | Tracheoesophageal fistula, Tumor susceptibility linked to germline BAP1 |
| | mutations, complementation group N, susceptibility to |
| PANK2 | Pigmentary pallidal degeneration |
| PAPSS2 | Spondyloepimetaphyseal dysplasia, Pakistani type |
| PARN | Dyskeratosis congenita, autosomal recessive 6 |
| PATL2 | OOCYTE MATURATION DEFECT 4 |
| PAX2 | Focal segmental glomerulosclerosis 7, Renal coloboma syndrome |
| PAX3 | Rare genetic deafness, Waardenburg syndrome, Waardenburg syndrome type 1 |
| PAX6 | Aniridia 1, Keratitis, autosomal dominant |
| PAX9 | 3, Tooth agenesis, selective |
| PC | Pyruvate carboxylase deficiency |
| PCCA | Propionic acidemia |
| PCCB | Propionic acidemia |
| PCDH15 | DIGENIC, Deafness, Nonsyndromic Deafness, Rare genetic deafness, Retinal |
| | dystrophy, TYPE ID/F, USHER SYNDROME, Usher syndrome, Usher syndrome |
| | type 1, Usher syndrome type 1D, Usher syndrome type 1F, autosomal recessive |
| | 23, type 1G |
| PCDH19 | Absence seizures, Delayed speech and language development, Early infantile |
| | epileptic encephalopathy 9, Frontal cortical atrophy, Generalized seizures, |
| | Generalized tonic-clonic seizures, Global developmental delay, Hand tremor, Long |
| | palpebral fissure, Prominent fingertip pads, Strabismus, Temporal cortical atrophy |
| PCLO | Pontocerebellar hypoplasia type 3 |
| PCNT | Microcephalic osteodysplastic primordial dwarfism type II |
| PCSK1, | Proprotein convertase 1/3 deficiency |
| LOC101929710 | |
| PCSK9 | Familial hypercholesterolemia, Familial hypercholesterolemia 1, Low density |
| | lipoprotein cholesterol level quantitative trait locus 1 |
| PCYT1A | Spondylometaphyseal dysplasia-cone-rod dystrophy syndrome |
| PDE11A | 2, Pigmented nodular adrenocortical disease, primary |
| PDE6B | Retinal dystrophy, Retinitis pigmentosa, Retinitis pigmentosa 40 |
| PDE6C | Achromatopsia 5 |
| PDE8B | Striatal degeneration, autosomal dominant 1 |
| PDHA1 | Inborn genetic diseases, Pyruvate dehydrogenase E1-alpha deficiency |
| PDX1 | DIABETES MELLITUS, Maturity-onset diabetes of the young type 4, |
| | PERMANENT NEONATAL 1, Pancreatic agenesis 1 |
| PDZD7 | AUTOSOMAL RECESSIVE 57, DEAFNESS, Rare genetic deafness, Usher |
| | syndrome, type 2A |
| PEPD | Prolidase deficiency |
| PEX1 | Deafness enamel hypoplasia nail defects, Peroxisome biogenesis disorder 1A |
| | (Zellweger), Peroxisome biogenesis disorder 1B, Peroxisome biogenesis disorders, |
| | Retinal dystrophy, Zellweger syndrome spectrum |
| PEX1, GATAD1 | Deafness enamel hypoplasia nail defects, Peroxisome biogenesis disorder 1A |
| | (Zellweger), Peroxisome biogenesis disorder 1B, Peroxisome biogenesis disorders, |
| | Zellweger syndrome spectrum |
| PEX10 | Peroxisome biogenesis disorder, Peroxisome biogenesis disorder 6A, Peroxisome |
| | biogenesis disorder 6B, Peroxisome biogenesis disorders, Zellweger syndrome |
| | spectrum, complementation group 7 |
| PEX10, PLCH2 | Peroxisome biogenesis disorder 6B |
| PEX12 | Infantile Refsums disease, Peroxisome biogenesis disorder 3A, Peroxisome |
| | biogenesis disorders, Zellweger syndrome spectrum |
| PEX2 | Peroxisome biogenesis disorder 5B, Peroxisome biogenesis disorder 5a |
| | (zellweger), Peroxisome biogenesis disorders, Zellweger syndrome spectrum |
| PEX26 | Peroxisome biogenesis disorder 7A, Peroxisome biogenesis disorder 7B, |
| | Peroxisome biogenesis disorders, Zellweger syndrome spectrum |
| PEX6 | Heimler syndrome 2, Peroxisome biogenesis disorder 4B, Peroxisome biogenesis |
| | disorder 4a (zellweger), Peroxisome biogenesis disorders, Retinal dystrophy, |
| | Zellweger syndrome spectrum |
| PEX7 | PEX7-Related Disorders, Peroxisome biogenesis disorder 9B, Phytanic acid |
| | storage disease, Rhizomelic chondrodysplasia punctata type 1 |
| PGAM2, DBNL | Glycogen storage disease type X |
| PGAP1 | Mental retardation, autosomal recessive 42 |
| PGAP3 | Hyperphosphatasia with mental retardation syndrome 4 |
| PGM3, DOP1A | Immunodeficiency 23 |
| PHEX | Familial X-linked hypophosphatemic vitamin D refractory rickets |
| PHEX, PTCHD1- | Familial X-linked hypophosphatemic vitamin D refractory rickets |
| AS | |
| PHF3, EYS | Retinal dystrophy, Retinitis pigmentosa 25 |
| PHF6 | Borjeson-Forssman-Lehmann syndrome |
| PHGDH | Phosphoglycerate dehydrogenase deficiency |
| PHIP | Developmental delay, and dysmorphic features, intellectual disability, obesity |
| PHYH | 1, Phytanic acid storage disease, Refsum disease, adult |
| PI4KA | Polymicrogyria, perisylvian, with cerebellar hypoplasia and arthrogryposis |
| PIGA | Paroxysmal nocturnal hemoglobinuria 1 |
| PIGN | Multiple congenital anomalies-hypotonia-seizures syndrome 1 |
| PIGO | Hyperphosphatasia with mental retardation syndrome 2, Hyperphosphatasia- |
| | intellectual disability syndrome |
| PIGT | Multiple congenital anomalies-hypotonia-seizures syndrome 3, PIGT-related |
| | disorder |
| PIK3R1 | SHORT syndrome |
| PINK1 | Parkinson disease 6, autosomal recessive early-onset |
| PIRC66, | Aromatase deficiency |
| MIR4713HG, | |
| CYP19A1 | |
| PITX3 | Anterior segment mesenchymal dysgenesis, Cataract 11 |
| PJVK | Deafness, Rare genetic deafness, autosomal recessive 59 |
| PKD1 | Autosomal recessive polycystic kidney disease, Polycystic kidney disease, adult |
| | type |
| PKD1, | Polycystic kidney disease, adult type |
| LOC105371049 | |
| PKHD1 | Autosomal recessive polycystic kidney disease, Polycystic kidney dysplasia, |
| | Polycystic liver disease |
| PKP1 | Epidermolysis bullosa simplex due to plakophilin deficiency |
| PKP2 | Arrhythmogenic right ventricular cardiomyopathy, Arrhythmogenic right |
| | ventricular dysplasia/cardiomyopathy, Arrhythmogenic ventricular |
| | cardiomyopathy, Cardiac arrhythmia, Cardiomyopathy, Cardiovascular phenotype, |
| | Sudden unexplained death, type 9 |
| PLA2G5 | Fleck retina, familial benign |
| PLA2G6 | Infantile neuroaxonal dystrophy, Iron accumulation in brain, Neurodegeneration |
| | with brain iron accumulation 2b, PLA2G6-associated neurodegeneration |
| PLCB1 | Early infantile epileptic encephalopathy 12 |
| PLCB4 | Auriculocondylar syndrome 2 |
| PLCD1 | Leukonychia totalis |
| PLD1 | Cardiac valvular defect, developmental |
| PLD3, PRX | Charcot-Marie-Tooth disease, SPINOCEREBELLAR ATAXIA 46 |
| PLEC | Epidermolysis bullosa simplex with muscular dystrophy |
| PLN, CEP85L | Cardiac arrest, Cardiomyopathy, Cardiovascular phenotype, Dilated |
| | cardiomyopathy 1P, Familial hypertrophic cardiomyopathy 18, Hypertrophic |
| | cardiomyopathy, Primary dilated cardiomyopathy, Sudden cardiac death |
| PLOD1 | Cardiovascular phenotype, Ehlers-Danlos syndrome, hydroxylysine-deficient |
| PLOD2 | Bruck syndrome 2 |
| PLP1, RAB9B | Hereditary spastic paraplegia 2 |
| PLS3 | Bone mineral density quantitative trait locus 18 |
| PMFBP1 | SPERMATOGENIC FAILURE 31 |
| PMM2 | Congenital disorder of glycosylation, type Ia |
| PMP22 | Charcot-Marie-Tooth disease |
| PMS2 | Acute lymphoid leukemia, Burkitt lymphoma, Colorectal cancer, Glioblastoma, |
| | Hereditary cancer, Hereditary cancer-predisposing syndrome, Hereditary |
| | nonpolyposis colon cancer, Hereditary nonpolyposis colorectal cancer type 4, |
| | Lymphoma, Lynch syndrome, Lynch syndrome I, Pulmonary arterial hypertension, |
| | Pulmonary insufficiency, Respiratory insufficiency, Tumor susceptibility linked to |
| | germline BAP1 mutations, Turcot syndrome, non-polyposis |
| PNKD, CATIP- | Paroxysmal nonkinesigenic dyskinesia 1 |
| AS2 | |
| PNKP | Ataxia-oculomotor apraxia 4, Early infantile epileptic encephalopathy 10, Early |
| | infantile epileptic encephalopathy 12, History of neurodevelopmental disorder |
| PNPLA2 | Neutral lipid storage myopathy |
| PNPLA6 | Hereditary spastic paraplegia 39, Laurence-Moon syndrome, PNPLA6-related |
| | disorders, Trichomegaly-retina pigmentary degeneration-dwarfism syndrome |
| PNPLA8 | Mitochondrial myopathy-lactic acidosis-deafness syndrome |
| PNPO | Pyridoxal phosphate-responsive seizures |
| POC5 | Retinitis pigmentosa, Syndromic retinitis pigmentosa |
| POGLUT1 | Dowling-degos disease 4 |
| POGZ | Global developmental delay, Speech apraxia, White-sutton syndrome, dysmorphy, |
| | intellectual deficiency |
| POLA1 | VAN ESCH-O''''DRISCOLL SYNDROME, Van Esch type, X-linked intellectual |
| | disability |
| POLD1 | Colorectal cancer 10, Hereditary cancer-predisposing syndrome, Mandibular |
| | hypoplasia, and lipodystrophy syndrome, deafness, progeroid features |
| POLE | 12, ADRENAL HYPOPLASIA CONGENITA, AND IMMUNODEFICIENCY, |
| | Colorectal cancer, GENITAL ANOMALIES, Hereditary cancer-predisposing |
| | syndrome, INTRAUTERINE GROWTH RETARDATION, METAPHYSEAL |
| | DYSPLASIA, susceptibility to |
| POLG | Generalized epilepsy, Global developmental delay, Obesity, Progressive sclerosing |
| | poliodystrophy, Seizures |
| POLH | Xeroderma pigmentosum variant type |
| POLR1A | Acrofacial dysostosis, Cincinnati type |
| POLR1C | Treacher Collins syndrome 3 |
| POLR1D | Treacher Collins syndrome 2 |
| POLR2F, SOX10 | Rare genetic deafness, Waardenburg syndrome type 4C |
| POLR3A | Hypomyelinating leukodystrophy 7, Neonatal pseudo-hydrocephalic progeroid |
| | syndrome |
| POLR3B | Cerebellar hypoplasia with endosteal sclerosis, Hypogonadotropic hypogonadism |
| | 7 with or without anosmia, Hypomyelinating leukodystrophy 7, Hypomyelinating |
| | leukodystrophy 8, with or without oligodontia and/or hypogonadotropic |
| | hypogonadism |
| POMK | 12, Muscular dystrophy-dystroglycanopathy (limb-girdle), type c |
| POMT1 | 1, Congenital muscular dystrophy-dystroglycanopathy with mental retardation, |
| | Limb-girdle muscular dystrophy-dystroglycanopathy, Muscular dystrophy- |
| | dystroglycanopathy (congenital with brain and eye anomalies), POMT1-Related |
| | Disorders, Walker-Warburg congenital muscular dystrophy, type A, type B1, type |
| | C1 |
| POMT2 | Congenital muscular dystrophy-dystroglycanopathy with brain and eye anomalies, |
| | Limb-girdle muscular dystrophy-dystroglycanopathy, type A2, type C2 |
| POP1 | Anauxetic dysplasia 2 |
| POR | Antley-Bixler syndrome with genital anomalies and disordered steroidogenesis, |
| | Disordered steroidogenesis due to cytochrome p450 oxidoreductase deficiency |
| PORCN | Focal dermal hypoplasia |
| POT1 | 10, Hereditary cancer-predisposing syndrome, Melanoma, cutaneous malignant, |
| | susceptibility to |
| POU3F4 | Deafness, Rare genetic deafness, X-linked 2 |
| POU4F3 | Rare genetic deafness |
| PPARG | Diabetes Mellitus, Diabetes mellitus, Noninsulin-Dependent, digenic, type II, with |
| | Acanthosis Nigricans and Hypertension |
| PPIB | Osteogenesis imperfecta type 9 |
| PPOX | Variegate porphyria |
| PPP1R12A | GENITOURINARY AND/OR BRAIN MALFORMATION SYNDROME |
| PPT1 | History of neurodevelopmental disorder, Neuronal Ceroid-Lipofuscinosis, |
| | Neuronal ceroid lipofuscinosis, Neuronal ceroid lipofuscinosis 1, Recessive |
| PQBP1 | Delayed speech and language development, Hyperactivity, Inborn genetic diseases, |
| | Intellectual disability, Microcephaly, Renpenning syndrome 1 |
| PRB3 | PRB3M(NULL) |
| PRDM16 | Left ventricular noncompaction 8 |
| PRDM5 | Brittle cornea syndrome 2 |
| PRDX1, | DIGENIC, METHYLMALONIC ACIDURIA AND HOMOCYSTINURIA, cblC |
| MMACHC | TYPE |
| PRF1 | Familial hemophagocytic lymphohistiocytosis, Familial hemophagocytic |
| | lymphohistiocytosis 2 |
| PRKAR1A | Carney complex, type 1 |
| PRKAR1A, | Amelogenesis imperfecta type 1G |
| FAM20A | |
| PRKAR1B, | 18, Ciliary dyskinesia, primary |
| DNAAF5 | |
| PRKCSH | Polycystic liver disease 1 |
| PRKN | Parkinson disease 2 |
| PRMT7 | Short stature, and seizures, brachydactyly, intellectual developmental disability |
| PROK2 | Hypogonadotropic hypogonadism 4 with or without anosmia |
| PROKR2 | Inborn genetic diseases, Kallmann syndrome 3 |
| PROM1 | Cone-rod dystrophy 12, PROM1-Related Disorders, Retinal dystrophy, Retinitis |
| | pigmentosa, Retinitis pigmentosa 41 |
| PROP1 | Pituitary hormone deficiency, combined, combined 2 |
| PRPH2 | Macular dystrophy, Retinal dystrophy, Retinitis pigmentosa 7, Retinitis punctata |
| | albescens, adult-onset, autosomal dominant, vitelliform |
| PRRT2 | 2, Episodic kinesigenic dyskinesia 1, History of neurodevelopmental disorder, |
| | Infantile convulsions and choreoathetosis, Paroxysmal kinesigenic dyskinesia, |
| | Paroxysmal nonkinesigenic dyskinesia 1, Seizures, benign familial infantile |
| PRSS12 | Mental retardation, autosomal recessive 1 |
| PRSS56 | Microphthalmia, isolated 6 |
| PRX | Charcot-Marie-Tooth disease, demyelinating, type 4F |
| PSAP | Combined saposin deficiency |
| PSEN1 | 3, Acne inversa, familial |
| PSENEN | 2, Acne inversa, familial |
| PTCH1 | Gorlin syndrome, Hereditary cancer-predisposing syndrome |
| PTCH2 | Gorlin syndrome, Medulloblastoma |
| PTEN | Cowden syndrome, Cowden syndrome 1, Glioblastoma, Glioma susceptibility 2, |
| | Hemangioma, Hereditary cancer-predisposing syndrome, Inborn genetic diseases, |
| | Macrocephaly/autism syndrome, Malignant tumor of prostate, Meningioma, |
| | Neoplasm of brain, Neoplasm of the breast, Neoplasm of the large intestine, Non- |
| | small cell lung cancer, Ovarian Neoplasms, PTEN hamartoma tumor syndrome, |
| | PTEN-related disorder, Proteus-like syndrome, VACTERL association with |
| | hydrocephalus, familial |
| PTH1R | Chondrodysplasia Blomstrand type |
| PTPN11 | Metachondromatosis |
| PTPRF | 2, Breasts and/or nipples, aplasia or hypoplasia of |
| PTPRO | Nephrotic syndrome, type 6 |
| PTS | BH4-deficient hyperphenylalaninemia A, Hyperphenylalaninemia, a, bh4- |
| | deficient, due to partial pts deficiency |
| PUF60 | Verheij syndrome |
| PURA | Apnea, Generalized hypotonia, Intellectual disability, Limb dystonia, Mental |
| | retardation, PURA Syndrome, PURA-related severe neonatal hypotonia-seizures- |
| | encephalopathy syndrome due to a point mutation, autosomal dominant 31 |
| PUS7 | AND SHORT STATURE, INTELLECTUAL DEVELOPMENTAL DISORDER |
| | WITH ABNORMAL BEHAVIOR, MICROCEPHALY |
| PXDN | Anterior segment dysgenesis 7 |
| PYCR1 | Autosomal recessive cutis laxa type 2B |
| PYGL | Glycogen storage disease, type VI |
| PYGM | Glycogen storage disease, type V |
| RAB23 | Carpenter syndrome, Carpenter syndrome 1 |
| RAB27A | Griscelli syndrome, Griscelli syndrome type 2 |
| RAB33B | Smith-McCort dysplasia 2 |
| RAB3GAP1 | Warburg micro syndrome 1 |
| RABL3 | 5, PANCREATIC CANCER, SUSCEPTIBILITY TO |
| RAD50 | Hereditary cancer-predisposing syndrome, Nijmegen breakage syndrome-like |
| | disorder |
| RAD51C | Breast-ovarian cancer, Fanconi anemia, Hereditary breast and ovarian cancer |
| | syndrome, Hereditary cancer-predisposing syndrome, Ovarian Neoplasms, |
| | RAD51C-Related Disorders, complementation group O, familial 3 |
| RAD51D, | Breast-ovarian cancer, Hereditary breast and ovarian cancer syndrome, Hereditary |
| RAD51L3-RFFL | cancer-predisposing syndrome, Ovarian Neoplasms, familial 4 |
| RAD51L3-RFFL, | Breast-ovarian cancer, Hereditary cancer-predisposing syndrome, familial 4 |
| RAD51D | |
| RAI1 | Smith-Magenis syndrome |
| RAPSN | 11, Myasthenic syndrome, associated with acetylcholine receptor deficiency, |
| | congenital |
| RARS1 | 9, Leukodystrophy, hypomyelinating |
| RASA1 | Capillary malformation-arteriovenous malformation, Capillary malformation- |
| | arteriovenous malformation 1 |
| RB1 | Hereditary cancer-predisposing syndrome, Neoplasm, Osteosarcoma, |
| | Retinoblastoma, Small cell lung cancer, Urinary bladder cancer, trilateral |
| RBBP8 | Microcephaly with mental retardation and digital anomalies |
| RBM20 | Cardiovascular phenotype, Dilated cardiomyopathy 1DD, Primary dilated |
| | cardiomyopathy |
| RBP3 | Retinitis pigmentosa 66 |
| RD3 | Leber congenital amaurosis 12 |
| RDH12 | Retinitis pigmentosa 53 |
| RDH5, | Fundus albipunctatus, Pigmentary retinal dystrophy, autosomal recessive |
| BLOC1S1-RDH5 | |
| RECQL | Hereditary cancer-predisposing syndrome |
| RECQL, | Hereditary cancer-predisposing syndrome |
| PYROXD1 | |
| RECQL4 | B lymphoblastic leukemia lymphoma with t(12; 21)(p13; q22); TEL-AML1 (ETV6- |
| | RUNX1), Baller-Gerold syndrome, High Grade Surface Osteosarcoma, Rapadilino |
| | syndrome, Rothmund-Thomson syndrome, Rothmund-Thomson syndrome type 2 |
| REEP6 | Retinitis pigmentosa 77 |
| RELT | AMELOGENESIS IMPERFECTA, TYPE IIIC |
| REN | Hyperproreninemia, familial |
| RET | Hirschsprung disease 1, Sensorineural hearing loss |
| RFX5 | Bare lymphocyte syndrome, complementation group c, type II |
| RFXANK | Bare lymphocyte syndrome, complementation group B, type II |
| RFXAP | Bare Lymphocyte Syndrome, Bare lymphocyte syndrome 2, Complementation |
| | Group D, Type II |
| RHAG | Rh-null, regulator type |
| RHCE | AMORPH TYPE, RH-NULL |
| RHO | Autosomal dominant retinitis pigmentosa |
| RIF1, NEB | Nemaline myopathy, Nemaline myopathy 2 |
| RIN2 | Macrocephaly, alopecia, and scoliosis, cutis laxa |
| RIPK1 | IMMUNODEFICIENCY 57 WITH AUTOINFLAMMATION |
| RIPK4 | Bartsocas-Papas syndrome |
| RNASEH2A | Aicardi Goutieres syndrome 4 |
| RNASEH2B | Aicardi Goutieres syndrome 2 |
| RNF113A | Trichothiodystrophy 5, nonphotosensitive |
| RNF216 | Gordon Holmes syndrome |
| ROBO3 | Gaze palsy, familial horizontal, with progressive scoliosis 1 |
| RORA, RORA- | INTELLECTUAL DEVELOPMENTAL DISORDER WITH OR WITHOUT |
| AS1 | EPILEPSY OR CEREBELLAR ATAXIA |
| RP1 | Retinal dystrophy, Retinitis pigmentosa, Retinitis pigmentosa 1 |
| RP1L1 | RETINITIS PIGMENTOSA 88 |
| RPE65 | Leber congenital amaurosis 2, RETINITIS PIGMENTOSA 87 WITH |
| | CHOROIDAL INVOLVEMENT, RPE65-Related Disorders, Retinal dystrophy, |
| | Retinitis pigmentosa 20 |
| RPGR | Inborn genetic diseases, Retinal dystrophy, Retinitis pigmentosa, Retinitis |
| | pigmentosa 15, X-linked, and sinorespiratory infections, with deafness |
| RPGRIP1 | Leber congenital amaurosis 6 |
| RPGRIP1L | Joubert syndrome, Joubert syndrome 7 |
| RPL36A- | Fabry disease |
| HNRNPH2, GLA | |
| RPL5, DIPK1A | Diamond-Blackfan anemia, Diamond-Blackfan anemia 1 |
| RPS10, RPS10- | Diamond-Blackfan anemia 9 |
| NUDT3 | |
| RPS27 | Diamond-Blackfan anemia 17 |
| RPS6KA3 | Coffin-Lowry syndrome, Mental retardation, X-linked 19 |
| RSPH1 | Kartagener syndrome, Primary ciliary dyskinesia, Primary ciliary dyskinesia 24 |
| RSPH4A | 11, Ciliary dyskinesia, Kartagener syndrome, Primary ciliary dyskinesia, primary |
| RSPO2 | TETRAAMELIA SYNDROME 2 |
| RTEL1, RTEL1- | 3, 4, 5, Dyskeratosis congenita, Idiopathic fibrosing alveolitis, Pulmonary fibrosis |
| TNFRSF6B | and/or bone marrow failure, autosomal dominant, autosomal recessive, chronic |
| | form, telomere-related |
| RTN2 | Hereditary spastic paraplegia 12 |
| RTTN | Congenital microcephaly, Microcephaly, and polymicrogyria with or without |
| | seizures, short stature |
| RUNX1 | Acute myeloid leukemia, Familial platelet disorder with associated myeloid |
| | malignancy |
| RYR1 | 1, Central core myopathy, Malignant hyperthermia, Minicore myopathy, Multi- |
| | minicore disease and atypical periodic paralysis, Neuromuscular disease, RYR1 - |
| | Related Disorders, susceptibility to |
| SACS | Autosomal recessive spastic ataxia, Charlevoix-Saguenay spastic ataxia, Spastic |
| | paraplegia |
| SAG | Oguchi s disease, Retinitis pigmentosa 47, SAG-Related Disorders |
| SALL1 | Townes syndrome |
| SAMD9L | Ataxia-pancytopenia syndrome |
| SAMHD1 | Aicardi Goutieres syndrome 5 |
| SASH1 | Dyschromatosis universalis hereditaria 1 |
| SATB2 | SATB2-Related Disorder |
| SBDS | Inborn genetic diseases, Shwachman-Diamond syndrome 1 |
| SBF1 | Charcot-Marie-Tooth disease type 4 |
| SCAPER | Attention deficit hyperactivity disorder, INTELLECTUAL DEVELOPMENTAL |
| | DISORDER AND RETINITIS PIGMENTOSA, Intellectual disability, Rod-cone |
| | dystrophy, moderate |
| SCARB2 | Epilepsy, progressive myoclonic 4, with or without renal failure |
| SCARF2 | Van den Ende-Gupta syndrome |
| SCN1A | Autosomal dominant epilepsy, Early infantile epileptic encephalopathy, Familial |
| | hemiplegic migraine type 3, Generalized epilepsy with febrile seizures plus, |
| | History of neurodevelopmental disorder, Severe myoclonic epilepsy in infancy, |
| | type 2, Dravet |
| SCN1A, | Autosomal dominant epilepsy, Early infantile epileptic encephalopathy, Epileptic |
| LOC102724058 | encephalopathy, Generalized epilepsy with febrile seizures plus, Seizures, Severe |
| | myoclonic epilepsy in infancy, type 2 |
| SCN2A | SCN2A-related disorder |
| SCN5A | Brugada syndrome, Brugada syndrome (shorter-than-normal QT interval), Brugada |
| | syndrome 1, Cardiovascular phenotype, Dilated cardiomyopathy 1E, Heart block, |
| | Long QT syndrome 1, nonprogressive |
| SCN5A, | Brugada syndrome, Brugada syndrome (shorter-than-normal QT interval) |
| LOC110121269 | |
| SCN9A, SCN1A- | Generalized epilepsy with febrile seizures plus, Hereditary sensory and autonomic |
| AS1 | neuropathy type IIA, Indifference to pain, autosomal recessive, congenital, type 7 |
| SCNN1A | Autosomal recessive pseudohypoaldosteronism type 1, Idiopathic bronchiectasis |
| SCNN1B | Liddle syndrome 1 |
| SCNN1G | Autosomal recessive pseudohypoaldosteronism type 1, LIDDLE SYNDROME 2 |
| SCO1 | Mitochondrial complex IV deficiency |
| SCP2 | Leukoencephalopathy with dystonia and motor neuropathy |
| SDCCAG8 | Bardet-Biedl syndrome, Bardet-Biedl syndrome 16, Senior-Loken syndrome 7 |
| SDHA | Carney triad, Dilated cardiomyopathy 1GG, Hereditary cancer-predisposing |
| | syndrome, Leigh syndrome, Mitochondrial complex II deficiency, Paragangliomas |
| | 5, Pilocytic astrocytoma |
| SDHAF2 | Hereditary Paraganglioma-Pheochromocytoma Syndromes |
| SDHB | Carney-Stratakis syndrome, Gastrointestinal stromal tumor, Hereditary |
| | Paraganglioma-Pheochromocytoma Syndromes, Hereditary cancer-predisposing |
| | syndrome, Paragangliomas 4, Pheochromocytoma |
| SDHC | Gastrointestinal stromal tumor, Hereditary Paraganglioma-Pheochromocytoma |
| | Syndromes, Hereditary cancer-predisposing syndrome, Paragangliomas 3 |
| SDHD | Carney-Stratakis syndrome, Cowden syndrome 3, Hereditary Paraganglioma- |
| | Pheochromocytoma Syndromes, Hereditary cancer-predisposing syndrome, |
| | Paragangliomas 1, Paragangliomas 1 with sensorineural hearing loss, |
| | Pheochromocytoma |
| SDR9C7 | AUTOSOMAL RECESSIVE 13, CONGENITAL, ICHTHYOSIS |
| SEC23B | Congenital dyserythropoietic anemia |
| SEC24D | Cole-Carpenter syndrome 2 |
| SECISBP2 | Thyroid hormone metabolism, abnormal |
| SELENBP1 | EXTRAORAL HALITOSIS DUE TO METHANETHIOL OXIDASE |
| | DEFICIENCY, Extra oral halitosis |
| SELENON | Eichsfeld type congenital muscular dystrophy |
| SEMA3A | Hypogonadotropic hypogonadism 16 with or without anosmia |
| SEPSECS | Pontocerebellar hypoplasia type 2D |
| SEPTIN12 | Spermatogenic failure 10 |
| SERAC1 | 3-methylglutaconic aciduria with deafness, Mitochondrial oxidative |
| | phosphorylation disorder, and Leigh-like syndrome, encephalopathy |
| SERPINA6 | Corticosteroid-binding globulin deficiency |
| SERPINA7 | Thyroxine-binding globulin quantitative trait locus |
| SERPINB6 | Rare genetic deafness |
| SERPINB7 | Palmoplantar keratoderma, nagashima type |
| SERPINC1 | Antithrombin III deficiency |
| SERPINF1 | Osteogenesis imperfecta, type VI |
| SERPING1 | Hereditary angioedema type 1 |
| SERPINH1 | Osteogenesis imperfecta type 10 |
| SETBP1 | SETBP1-Related Disorder |
| SETD5 | Inborn genetic diseases, Mental retardation, autosomal dominant 23 |
| SF3B4 | Hereditary hearing loss and deafness, Inborn genetic diseases, Nager syndrome |
| SFRP4 | Pyle metaphyseal dysplasia |
| SFTPA1 | Respiratory distress associated with prematurity |
| SFTPB | 1, Surfactant metabolism dysfunction, pulmonary |
| SGCA | Autosomal recessive limb-girdle muscular dystrophy type 2D |
| SGCD | Neuromuscular disease |
| SGCE, CASD1 | Myoclonic dystonia |
| SGCG | Severe autosomal recessive muscular dystrophy of childhood - North African type |
| SGSH | Developmental regression, Diarrhea, Gastrointestinal dysmotility, Global |
| | developmental delay, MPS-III-A, Mucopolysaccharidosis, Nystagmus, Retinal |
| | dystrophy, Sanfilippo syndrome, Severe visual impairment |
| SH2D1A | Lymphoproliferative syndrome 1, X-Linked Lymphoproliferative Syndrome, X- |
| | linked |
| SH3PXD2B | Frank-Ter Haar syndrome |
| SH3TC2 | Charcot-Marie-Tooth disease, Charcot-Marie-Tooth disease type 4, Inborn genetic |
| | diseases, Mononeuropathy of the median nerve, SH3TC2-Related Disorders, mild, |
| | type 4C |
| SHANK3 | 22q13.3 deletion syndrome, Autism spectrum disorder, History of |
| | neurodevelopmental disorder, Inborn genetic diseases, SHANK3-Related Disorder |
| SHOX | Leri-Weill dyschondrosteosis |
| SI | Sucrase-isomaltase deficiency |
| SIX6 | Colobomatous optic disc-macular atrophy-chorioretinopathy syndrome |
| SKIV2L | Trichohepatoenteric syndrome 2 |
| SLC10A7 | AMELOGENESIS IMPERFECTA, AND SKELETAL DYSPLASIA WITH |
| | SCOLIOSIS, SHORT STATURE |
| SLC12A1 | Barrier syndrome, antenatal, type 1 |
| SLC12A3 | Familial hypokalemia-hypomagnesemia |
| SLC12A6 | Agenesis of the corpus callosum with peripheral neuropathy, Charcot-Marie-Tooth |
| | disease |
| SLC17A5 | Salla disease, Sialic acid storage disease, severe infantile type |
| SLC19A1, | Knobloch syndrome 1 |
| COL18A1 | |
| SLC19A2 | Megaloblastic anemia, thiamine-responsive, with diabetes mellitus and |
| | sensorineural deafness |
| SLC19A3 | Biotin-responsive basal ganglia disease |
| SLC22A5 | Renal carnitine transport defect |
| SLC25A20 | Carnitine acylcarnitine translocase deficiency |
| SLC26A2 | 3MC syndrome 2, Achondrogenesis, Atelosteogenesis type II, Diastrophic |
| | dysplasia, Multiple epiphyseal dysplasia type 4, Osteochondrodysplasia, |
| | SLC26A2-Related Disorders, type IB |
| SLC26A3 | Congenital secretory diarrhea, chloride type |
| SLC26A4 | Enlarged vestibular aqueduct, Pendred syndrome, Rare genetic deafness |
| SLC2A10 | Arterial tortuosity syndrome, Cardiovascular phenotype |
| SLC2A2 | Fanconi-Bickel syndrome |
| SLC30A8 | Diabetes mellitus type 2 |
| SLC33A1 | Spastic paraplegia, Spastic paraplegia 42, autosomal dominant |
| SLC34A3 | Autosomal recessive hypophosphatemic bone disease |
| SLC35A2 | SLC35A2-CDG |
| SLC35D1 | Schneckenbecken dysplasia |
| SLC37A4 | Glucose-6-phosphate transport defect, Glycogen storage disease, Inborn genetic |
| | diseases, Phosphate transport defect |
| SLC38A8 | FOVEAL HYPOPLASIA 2 WITH OPTIC NERVE MISROUTING AND |
| | ANTERIOR SEGMENT DYSGENESIS |
| SLC39A4 | Hereditary acrodermatitis enteropathica |
| SLC45A2 | Oculocutaneous albinism type 4 |
| SLC4A1 | Autosomal dominant distal renal tubular acidosis |
| SLC4A11 | 4, Corneal dystrophy, Corneal endothelial dystrophy, Fuchs endothelial |
| SLC52A3 | Brown-Vialetto-Van Laere syndrome 1 |
| SLC6A1 | Myoclonic-atonic epilepsy, SLC6A1-Related Disorder |
| SLC9A3 | Diarrhea 8, congenital, secretory sodium |
| SLC9A3, | Diarrhea 8, congenital, secretory sodium |
| SLC9A3-AS1 | |
| SLC9A6 | Gastrostomy tube feeding in infancy, Global developmental delay, Recurrent |
| | respiratory infections, Scoliosis, Seizures, Sleep disturbance |
| SLCO2A1 | Primary hypertrophic osteoarthropathy, autosomal recessive 2 |
| SLITRK1 | Tourette Syndrome, Trichotillomania |
| SLURP1 | Acroerythrokeratoderma |
| SMAD3 | Familial thoracic aortic aneurysm and aortic dissection |
| SMAD4 | Carcinoma of pancreas, Hereditary cancer-predisposing syndrome, Juvenile |
| | polyposis syndrome, Juvenile polyposis/hereditary hemorrhagic telangiectasia |
| | syndrome, Myhre syndrome |
| SMAD6 | Aortic valve disease 2, Aortic valve disorder, CRANIOSYNOSTOSIS 7, |
| | SUSCEPTIBILITY TO |
| SMARCA4 | Neuroblastoma |
| SMARCAL1 | Schimke immuno-osseous dysplasia |
| SMARCB1 | Teratoid tumor, atypical |
| SMARCE1 | Meningioma, familial |
| SMC1A | 85, Congenital muscular hypertrophy-cerebral syndrome, EARLY INFANTILE, |
| | EPILEPTIC ENCEPHALOPATHY, WITH OR WITHOUT MIDLINE BRAIN |
| | DEFECTS |
| SMN1 | Werdnig-Hoffmann disease |
| SMPD1 | Niemann-Pick disease, Sphingomyelin/cholesterol lipidosis, type A, type B |
| SNAP29 | 2, CEDNIK syndrome, Leukodystrophy, hypomyelinating |
| SNRPB | Cerebro-costo-mandibular syndrome |
| SOHLH1 | Nonsyndromic hypergonadotropic hypogonadism, OVARIAN DYSGENESIS 5 |
| SON | Inborn genetic diseases, ZTTK syndrome |
| SOS1 | Gingival fibromatosis 1 |
| SOX2, SOX2-OT | Anophthalmia/microphthalmia-esophageal atresia syndrome |
| SOX9 | Campomelic dysplasia with autosomal sex reversal, Camptomelic dysplasia |
| SOX9, | Campomelic dysplasia with autosomal sex reversal |
| LOC108021846 | |
| SP110, SP140 | Hepatic veno-occlusive disease-immunodeficiency syndrome |
| SP7 | Osteogenesis imperfecta type 12 |
| SPART | Troyer syndrome |
| SPAST | Spastic paraplegia 4, autosomal dominant |
| SPEF2 | Primary ciliary dyskinesia, SPERMATOGENIC FAILURE 43 |
| SPEG | 5, Myopathy, centronuclear |
| SPEG, ASIC4- | 5, Myopathy, centronuclear |
| AS1 | |
| SPG11 | Amyotrophic lateral sclerosis type 5, Hereditary spastic paraplegia, Spastic |
| | paraplegia 11, autosomal recessive |
| SPG7 | Hereditary spastic paraplegia, Hereditary spastic paraplegia 7, Mitochondrial |
| | diseases |
| SPINK2 | Spermatogenic failure 29 |
| SPINK5 | Netherton syndrome |
| SPNS2 | AUTOSOMAL RECESSIVE 115, DEAFNESS, Inborn genetic diseases |
| SPRTN | Ruijs-Aalfs syndrome |
| SPTA1 | Elliptocytosis 2, Hereditary pyropoikilocytosis |
| SPTB | Hereditary spherocytosis, Spherocytosis type 2 |
| SQSTM1 | Amyotrophic lateral sclerosis and/or frontotemporal dementia 1, Paget disease of |
| | bone 2, SQSTM1-related disorder, early-onset |
| SRCAP | Floating-Harbor syndrome |
| SRPK2, KMT2E | See cases |
| SRY | 46, XY sex reversal, type 1 |
| ST14 | Ichthyosis, autosomal recessive 11, congenital |
| STAG1 | AUTOSOMAL DOMINANT 47, MENTAL RETARDATION |
| STAG3 | Abnormality of the ovary, Female infertility, Premature ovarian failure 8, |
| | Premature ovarian insufficiency |
| STAT1 | Mycobacterial and viral infections, autosomal recessive, susceptibility to |
| STIM1 | 1, Combined immunodeficiency due to STIM1 deficiency, Myopathy, Stormorken |
| | syndrome, tubular aggregate |
| STK11 | Hereditary cancer-predisposing syndrome, Peutz-Jeghers syndrome |
| STRA6 | Microphthalmia syndromic 9 |
| STRC | Deafness, Rare genetic deafness, autosomal recessive 16 |
| STXBP1 | Early infantile epileptic encephalopathy, Early infantile epileptic encephalopathy |
| | 4, Epileptic encephalopathy |
| STXBP2 | 5, Hemophagocytic lymphohistiocytosis, familial |
| SUCLG1 | Mitochondrial DNA depletion syndrome 9 (encephalomyopathic with |
| | methylmalonic aciduria) |
| SUFU | Gorlin syndrome, Medulloblastoma, Medulloblastoma with extensive nodularity, |
| | desmoplastic |
| SULT2B1 | AUTOSOMAL RECESSIVE 14, Autosomal recessive congenital ichthyosis 2, |
| | CONGENITAL, ICHTHYOSIS |
| SUMF1 | Multiple sulfatase deficiency |
| SUN5 | Spermatogenic failure 16 |
| SURF1 | Abnormal pyramidal signs, Cerebellar ataxia, Charcot-Marie-Tooth disease, |
| | Dysarthria, Inborn genetic diseases, Leigh syndrome, Leigh syndrome due to COX |
| | IV deficiency, Leigh syndrome due to mitochondrial complex IV deficiency, |
| | Mitochondrial complex IV deficiency, Muscle weakness, type 4k |
| SUZ12 | IMAGAWA-MATSUMOTO SYNDROME |
| SYCP2 | Cryptozoospermia, Early spermatogenesis maturation arrest, Oligosynaptic |
| | infertility |
| SYCP3 | Spermatogenic failure 4 |
| SYNE1 | ARTHROGRYPOSIS MULTIPLEX CONGENITA, Cerebellar ataxia, Emery- |
| | Dreifuss muscular dystrophy 4, MYOGENIC TYPE, Spinocerebellar ataxia, |
| | autosomal dominant, autosomal recessive 8 |
| SYNE4 | Rare genetic deafness |
| SYNGAP1 | Inborn genetic diseases, Mental retardation, autosomal dominant 5 |
| SZT2 | Early infantile epileptic encephalopathy 18 |
| TAC3 | Hypogonadotropic hypogonadism 10 with or without anosmia |
| TACO1 | Mitochondrial complex IV deficiency |
| TALDO1 | Deficiency of transaldolase |
| TANGO2 | AND NEURODEGENERATION, Acute rhabdomyolysis, CARDIAC |
| | ARRHYTHMIAS, Cardiac arrhythmia, Episodic flaccid weakness, Intellectual |
| | functioning disability, METABOLIC CRISES, RECURRENT, Seizures, WITH |
| | RHABDOMYOLYSIS |
| TAP1 | Bare lymphocyte syndrome type 1 |
| TAP2 | Bare lymphocyte syndrome type 1, PEPTIDE TRANSPORTER PSF2 |
| | POLYMORPHISM |
| TAZ | 3-Methylglutaconic aciduria type 2 |
| TBC1D20 | Warburg micro syndrome 4 |
| TBC1D24 | 1, Caused by mutation in the TBC1 domain family, DOORS syndrome, Deafness, |
| | Epileptic encephalopathy, Inborn genetic diseases, autosomal dominant 65, early |
| | infantile, member 24 |
| TBCK | Hypotonia, Inborn genetic diseases, Syndromic Infantile Encephalopathy, infantile, |
| | with psychomotor retardation and characteristic facies 3 |
| TBR1 | Autism 5, Autistic behavior, Intellectual disability, Moderate global developmental |
| | delay, Neurodevelopmental disorder, Severe global developmental delay |
| TBX19 | Adrenocorticotropic hormone deficiency |
| TBX22 | Cleft palate with ankyloglossia |
| TBX3 | Ulnar-mammary syndrome |
| TBX4 | Coxopodopatellar syndrome |
| TBX5 | Congenital heart disease (variable), Holt-Oram syndrome |
| TBXAS1 | Ghosal hematodiaphyseal dysplasia, Thromboxane synthetase deficiency |
| TCAP | Autosomal recessive limb-girdle muscular dystrophy type 2G, Dilated |
| | cardiomyopathy 1N, Primary familial hypertrophic cardiomyopathy |
| TCF12 | Craniosynostosis 3 |
| TCF20 | Neurodevelopmental abnormality |
| TCF4 | Intellectual disability, Pitt-Hopkins syndrome |
| TCN2 | Inborn genetic diseases, Transcobalamin II deficiency |
| TCOF1 | Treacher Collins syndrome 1 |
| TCTEX1D2 | Short-rib thoracic dysplasia 17 with or without polydactyly |
| TCTEX1D2, | Short-rib thoracic dysplasia 17 with or without polydactyly |
| TM4SF19- | |
| TCTEX1D2 | |
| TCTN2 | Joubert syndrome, Meckel syndrome type 8 |
| TCTN3 | Orofacial-digital syndrome IV |
| TDO2 | Hypertryptophanemia, familial |
| TDRD7 | Cataract, autosomal recessive congenital 4 |
| TDRD9 | SPERMATOGENIC FAILURE 30 |
| TECPR2 | Spastic paraplegia 49, autosomal recessive |
| TECTA | Deafness, Nonsyndromic hearing loss and deafness, Rare genetic deafness, |
| | autosomal dominant 12, autosomal recessive 21, neurosensory autosomal recessive |
| | 21 |
| TENM3 | MICROPHTHALMIA, SYNDROMIC 15 |
| TENT5A | Osteogenesis imperfecta, type 18 |
| TEX14 | SPERMATOGENIC FAILURE 23 |
| TEX15 | SPERMATOGENIC FAILURE 25 |
| TFAP2B | Patent ductus arteriosus 2 |
| TFR2 | Hemochromatosis type 3 |
| TG | Iodotyrosyl coupling defect |
| TGFB2 | Cardiovascular phenotype, Holt-Oram syndrome, Loeys-Dietz syndrome 4 |
| TGFB3 | Cardiovascular phenotype, Loeys-Dietz syndrome 5 |
| TGFBR1 | Familial thoracic aortic aneurysm and aortic dissection |
| TGFBR2 | Familial thoracic aortic aneurysm and aortic dissection, Hereditary nonpolyposis |
| | colorectal cancer type 6, Loeys-Dietz syndrome, Loeys-Dietz syndrome 2, |
| | Malignant tumor of esophagus |
| TGM1 | Autosomal recessive congenital ichthyosis 1, Ichthyosis (disease) |
| TGM5 | Peeling skin syndrome 2 |
| TH | Segawa syndrome, autosomal recessive |
| THRB | Thyroid hormone resistance, autosomal dominant, generalized |
| TICAM1 | 4, Herpes simplex encephalitis, susceptibility to |
| TIMM8A | Deafness dystonia syndrome |
| TIMMDC1 | Leigh syndrome |
| TJP2 | Progressive familial intrahepatic cholestasis 4 |
| TK2 | Mitochondrial DNA depletion syndrome 2 |
| TLR5 | 1, Legionellosis, Melioidosis, Systemic lupus erythematosus, resistance to |
| TM4SF20 | Specific language impairment 5 |
| TMC1 | Deafness, Dominant, Nonsyndromic Hearing Loss, Rare genetic deafness, |
| | autosomal recessive 7 |
| TMCO1 | Craniofacial dysmorphism, and mental retardation syndrome, skeletal anomalies |
| TMCO6, | Cystic Leukoencephalopathy |
| NDUFA2 | |
| TMEM127 | Hereditary Paraganglioma-Pheochromocytoma Syndromes, Hereditary cancer- |
| | predisposing syndrome, Pheochromocytoma |
| TMEM216 | Joubert syndrome, Joubert syndrome 2, Meckel syndrome, TMEM216-Related |
| | Disorders, type 2 |
| TMEM237 | Joubert syndrome |
| TMEM260 | Structural heart defects and renal anomalies syndrome |
| TMEM67 | Cerebellar vermis hypoplasia, Generalized hypotonia, Iris coloboma, Joubert |
| | syndrome, Joubert syndrome 6, Meckel syndrome, Meckel-Gruber syndrome, |
| | Nystagmus, TMEM67-Related Disorders, type 3 |
| TMEM70 | Mitochondrial proton-transporting ATP synthase complex deficiency, Nuclearly- |
| | encoded mitochondrial complex V (ATP synthase) deficiency 2 |
| TMEM94 | Intellectual developmental disorder with cardiac defects and dysmorphic facies |
| TMEM99, KRT10 | Bullous ichthyosiform erythroderma |
| TMPRSS3 | Deafness, Inborn genetic diseases, Rare genetic deafness, autosomal recessive 8 |
| TNFRSF10B | Squamous cell carcinoma of the head and neck |
| TNFRSF11B | Hyperphosphatasemia with bone disease |
| TNFRSF13B | Absent epiphyses, Chronic lung disease, Cleft palate, Clubfoot, Coat hanger sign |
| | of ribs, Common Variable Immune Deficiency, Common variable |
| | immunodeficiency 2, Dominant, Hemivertebrae, Immunoglobulin A deficiency 2, |
| | Interstitial pulmonary abnormality, Micrognathia, Patent ductus arteriosus, |
| | Preaxial foot polydactyly, Pseudoarthrosis, Respiratory failure, Short femur, |
| | Skeletal dysplasia, Vertebral hypoplasia, Vertebral segmentation defect |
| TNFRSF1A | 5, Familial Periodic Fever, Multiple sclerosis, susceptibility to |
| TNFSF11 | Autosomal recessive osteopetrosis 2 |
| TNNI3 | Cardiovascular phenotype |
| TNNI3K, FPGT- | Cardiac conduction disease with or without dilated cardiomyopathy |
| TNNI3K | |
| TNNT2 | Cardiomyopathy, Cardiovascular phenotype, Familial hypertrophic |
| | cardiomyopathy 2, Familial restrictive cardiomyopathy 3, Hypertrophic |
| | cardiomyopathy, Left ventricular noncompaction 6, Primary familial hypertrophic |
| | cardiomyopathy |
| TNPO3 | Limb-girdle muscular dystrophy, type 1F |
| TNXB | 1, Ehlers-Danlos syndrome, Ehlers-Danlos syndrome due to tenascin-X deficiency, |
| | classic-like |
| TONSL | Sponastrime dysplasia |
| TONSL, TONSL- | Sponastrime dysplasia |
| AS1 | |
| TOP3A | AND INCREASED SISTER CHROMATID EXCHANGE 2, GROWTH |
| | RESTRICTION, MICROCEPHALY |
| TOPORS | Retinal dystrophy, Retinitis pigmentosa |
| TP53 | Head and Neck Neoplasms, Hereditary cancer-predisposing syndrome, Li- |
| | Fraumeni syndrome, Li-Fraumeni syndrome 1, Li-Fraumeni-like syndrome, |
| | Multiple myeloma, Neoplasm of the large intestine, Ovarian Neoplasms |
| TP63 | Ectrodactyly, Orofacial cleft 8, and cleft lip/palate syndrome 3, ectodermal |
| | dysplasia |
| TPI1 | Triosephosphate isomerase deficiency |
| TPM2 | ARTHROGRYPOSIS, DISTAL, TYPE 2B4 |
| TPO | Deficiency of iodide peroxidase |
| TPP1 | Ceroid lipofuscinosis neuronal 2, Childhood-onset autosomal recessive slowly |
| | progressive spinocerebellar ataxia, Inborn genetic diseases, Neuronal ceroid |
| | lipofuscinosis |
| TPRN | Deafness, autosomal recessive 79 |
| TRAPPC11 | Limb-girdle muscular dystrophy, type 2S |
| TRAPPC2 | Spondyloepiphyseal dysplasia tarda |
| TRDN | 5, Catecholaminergic polymorphic ventricular tachycardia, Ventricular |
| | tachycardia, catecholaminergic polymorphic, with or without muscle weakness |
| TREX1, ATRIP, | Aicardi Goutieres syndrome 1, Chilblain Lupus, Retinal vasculopathy with |
| ATRIP-TREX1 | cerebral leukoencephalopathy and systemic manifestations, TREX1-Related |
| | Disorders |
| TRIM14, NANS | Genevieve type, Spondyloepimetaphyseal dysplasia |
| TRIM32, ASTN2 | Limb-girdle muscular dystrophy |
| TRIOBP | Nonsyndromic hearing loss and deafness |
| TRIP11 | Achondrogenesis, Goldblatt hypertension, Osteochondrodysplasia, type IA |
| TRMU | Acute infantile liver failure due to synthesis defect of mtDNA-encoded proteins |
| TRNT1 | Retinitis pigmentosa and erythrocytic microcytosis, Sideroblastic anemia with B- |
| | cell immunodeficiency, and developmental delay, periodic fevers |
| TRPM4 | Cardiomyopathy, Progressive familial heart block type IB, TRPM4-Related |
| | Disorders |
| TRPS1 | Trichorhinophalangeal dysplasia type I |
| TRPV4 | Charcot-Marie-Tooth disease axonal type 2C |
| TRPV6 | HYPERPARATHYROIDISM, TRANSIENT NEONATAL |
| TSC1 | Cortical dysplasia, Cortical tubers, Focal cortical dysplasia type II, Hereditary |
| | cancer-predisposing syndrome, Lymphangiomyomatosis, Multiple renal cysts, |
| | Renal cortical cysts, Renal insufficiency, Seizures, Tuberous sclerosis 1, Tuberous |
| | sclerosis syndrome, Urinary bladder cancer |
| TSC2 | Focal cortical dysplasia type II, Lymphangiomyomatosis, Tuberous sclerosis 2, |
| | Tuberous sclerosis syndrome |
| TSFM | Combined oxidative phosphorylation deficiency 3, Primary dilated |
| | cardiomyopathy |
| TSHB | Secondary hypothyroidism |
| TSHR | 1, Hypothyroidism, congenital, nongoitrous |
| TSHZ1 | Aural atresia, congenital |
| TSPAN1, | Congenital muscular alpha-dystroglycanopathy with brain and eye anomalies, |
| POMGNT1 | Congenital muscular dystrophy-dystroglycanopathy with mental retardation, Limb- |
| | girdle muscular dystrophy-dystroglycanopathy, Muscle eye brain disease, |
| | POMGNT1-Related Disorders, Retinitis pigmentosa 76, type B3, type C3 |
| TSPAN12 | Exudative vitreoretinopathy 5 |
| TSPAN7 | Mental retardation 58, X-linked |
| TSPEAR | ECTODERMAL DYSPLASIA 14, HAIR/TOOTH TYPE WITH |
| | HYPOHIDROSIS |
| TSPEAR-AS1, | Deafness, ECTODERMAL DYSPLASIA 14, HAIR/TOOTH TYPE WITH |
| TSPEAR | HYPOHIDROSIS, autosomal recessive 98 |
| TTC19 | Mitochondrial complex III deficiency, nuclear type 2 |
| TTC21A | SPERMATOGENIC FAILURE 37 |
| TTC21B, | SHORT-RIB THORACIC DYSPLASIA 4 WITH POLYDACTYLY |
| TTC21B-AS1 | |
| TTC29 | SPERMATOGENIC FAILURE 42 |
| TTC37 | Trichohepatoenteric syndrome, Trichohepatoenteric syndrome 1 |
| TTC7A | Multiple gastrointestinal atresias |
| TTLL5 | Cone-rod dystrophy 19 |
| TTN | Cardiomyopathy, Cardiovascular phenotype, Dilated cardiomyopathy 1G, Limb- |
| | girdle muscular dystrophy, Myotubular myopathy, Primary dilated |
| | cardiomyopathy, Tibial muscular dystrophy, type 2J |
| TTN-AS1, TTN | Cardiovascular phenotype, Dilated cardiomyopathy 1G, Limb-girdle muscular |
| | dystrophy, Primary dilated cardiomyopathy, TTN-Related Disorders, type 2J |
| TTN, | Primary dilated cardiomyopathy |
| LOC101927055 | |
| TTN, TTN-AS1 | 9, Broad-based gait, Cardiomyopathy, Cardiovascular phenotype, Congenital |
| | muscular dystrophy, Decreased patellar reflex, Delayed gross motor development, |
| | Dilated cardiomyopathy 1G, Dilated cardiomyopathy 1S, Distal muscle weakness, |
| | Familial dilated cardiomyopathy, Familial hypertrophic cardiomyopathy 9, Gowers |
| | sign, Heart murmur, Limb-girdle muscular dystrophy, Muscular dystrophy, |
| | Myopathy, Primary dilated cardiomyopathy, Proximal lower limb amyotrophy, |
| | Scoliosis, Severe muscular hypotonia, TTN-Related disorder, Tibial muscular |
| | dystrophy, Waddling gait, early-onset, myofibrillar, type 2J, with early respiratory |
| | failure, with fatal cardiomyopathy |
| TTPA | Ataxia, Familial isolated deficiency of vitamin E, Friedreich-like, with isolated |
| | vitamin E deficiency |
| TUB, RIC3 | Retinal dystrophy and obesity |
| TUBA3D, | KERATOCONUS 9 |
| MZT2A | |
| TUBB8 | Oocyte maturation defect 2 |
| TULP1 | Leber congenital amaurosis, Retinitis pigmentosa |
| TWIST1 | Craniosynostosis 1, Robinow-Sorauf syndrome, Saethre-Chotzen syndrome |
| TXNL4A | Burn-McKeown syndrome |
| TYK2 | Tyrosine kinase 2 deficiency |
| TYR | 3, Albinism, Inborn genetic diseases, Myopia (disease), Nonsyndromic |
| | Oculocutaneous Albinism, Nystagmus, Oculocutaneous albinism, Oculocutaneous |
| | albinism type 1B, Skin/hair/eye pigmentation, Tyrosinase-negative oculocutaneous |
| | albinism, ocular, variation in, with sensorineural deafness |
| TYRP1, | Oculocutaneous albinism type 3 |
| LURAP1L-AS1 | |
| UBAP1 | AUTOSOMAL DOMINANT, SPASTIC PARAPLEGIA 80 |
| UBE3A, SNHG14 | Angelman syndrome, History of neurodevelopmental disorder, Inborn genetic |
| | diseases |
| UBE3B | Kaufman oculocerebrofacial syndrome |
| UBR1 | Johanson-Blizzard syndrome |
| UCP3 | Obesity, and type II diabetes, severe |
| UGT1A, | Crigler-Najjar syndrome, Crigler-Najjar syndrome type 1, type II |
| UGT1A10, | |
| UGT1A8, | |
| UGT1A7, | |
| UGT1A6, | |
| UGT1A5, | |
| UGT1A9, | |
| UGT1A4, | |
| UGT1A1, | |
| UGT1A3 | |
| UNC13D | Familial hemophagocytic lymphohistiocytosis 3 |
| UNC80 | Hypotonia, Hypotonia-speech impairment-severe cognitive delay syndrome, |
| | infantile, with psychomotor retardation and characteristic facies 2 |
| UNG | Hyper-IgM syndrome type 5 |
| UPF3B | Mental retardation, X-linked, syndromic 14 |
| USH1C | Deafness, Rare genetic deafness, Retinal dystrophy, Retinitis pigmentosa, Usher |
| | syndrome, Usher syndrome type 1, autosomal recessive 18, type 1C |
| USH2A | Abnormality of the upper limb, Abnormality of upper limb bone, Abnormality of |
| | upper limb joint, Anxiety, Brisk reflexes, Chronic pain, Cognitive impairment, |
| | Cone-rod dystrophy, Congenital sensorineural hearing impairment, Congenital |
| | stationary night blindness, Dislocated radial head, Distal arthrogryposis, |
| | Dysautonomia, Hearing impairment, High palate, Inborn genetic diseases, Macular |
| | dystrophy, Multiple joint contractures, Rare genetic deafness, Retinal dystrophy, |
| | Retinitis pigmentosa, Retinitis pigmentosa 39, Short stature, USH2A-Related |
| | Disorders, Usher syndrome, Usher syndrome type 2, type 2A |
| USH2A, USH2A- | Rare genetic deafness, Retinal dystrophy, Retinitis pigmentosa 39, USH2A- |
| AS1 | Related Disorders, Usher syndrome, type 2A |
| USH2A, USH2A- | Rare genetic deafness, Retinitis pigmentosa 39, Usher syndrome, type 2A |
| AS2 | |
| USP18 | Pseudo-TORCH syndrome 2 |
| USP27X | Mental retardation, X-linked 105 |
| USP9X | Mental retardation, USP9X related disorders, X-linked 99, female-restricted, |
| | syndromic |
| VCL | Dilated cardiomyopathy 1W, Familial hypertrophic cardiomyopathy 15, Primary |
| | dilated cardiomyopathy |
| VHL | 2, Erythrocytosis, Hereditary cancer-predisposing syndrome, Von Hippel-Lindau |
| | syndrome, familial |
| VHL, | 1, 2, Erythrocytosis, Hereditary cancer-predisposing syndrome, Renal cell |
| LOC107303340 | carcinoma, Von Hippel-Lindau syndrome, familial, papillary |
| VIM, VIM-AS1 | Cataract 30, Congenital cataract |
| VIPAS39 | Arthrogryposis, and cholestasis 2, renal dysfunction |
| VPS13A | Choreoacanthocytosis |
| VPS13B | Abnormality of the eye, Cohen syndrome, Inborn genetic diseases, Intellectual |
| | disability, Microcephaly, Neutropenia, Progressive visual loss, Recurrent aphthous |
| | stomatitis, Retinal dystrophy, Short foot, Short stature, Small hand |
| VPS33B | Arthrogryposis, Inborn genetic diseases, and cholestasis 1, renal dysfunction |
| VRK2, FANCL | Fanconi anemia, complementation group A, complementation group L |
| VWF | von Willebrand disorder |
| WAC | Desanto-shinawi syndrome |
| WAS | Wiskott-Aldrich syndrome, X-linked severe congenital neutropenia, X-linked |
| | thrombocytopenia with normal platelets |
| WDR35 | Cranioectodermal dysplasia, Cranioectodermal dysplasia 2, Jeune thoracic |
| | dystrophy, SHORT-RIB THORACIC DYSPLASIA 7 WITHOUT |
| | POLYDACTYLY, Short Rib Polydactyly Syndrome, Short rib polydactyly |
| | syndrome 5, Short-rib thoracic dysplasia 7/20 with polydactyly, WDR35-Related |
| | Disorders, digenic |
| WDR45 | Neurodegeneration with brain iron accumulation, Neurodegeneration with brain |
| | iron accumulation 5 |
| WDR72 | Amelogenesis imperfecta |
| WDR73 | Galloway-Mowat syndrome 1 |
| WEE2-AS1, | OOCYTE MATURATION DEFECT 5 |
| WEE2 | |
| WFS1 | Autosomal dominant nonsyndromic deafness 6, Diabetes mellitus AND insipidus |
| | with optic atrophy AND deafness, WFS1-Related Spectrum Disorders, Wolfram- |
| | like syndrome, autosomal dominant |
| WHRN | Deafness, Rare genetic deafness, Usher syndrome, autosomal recessive 31, type |
| | 2D |
| WRN | Medulloblastoma, Werner syndrome |
| WT1 | Drash syndrome, Frasier syndrome, Wilms tumor, Wilms tumor 1, and mental |
| | retardation syndrome, aniridia, genitourinary anomalies |
| WT1, | Drash syndrome, Frasier syndrome, Pre-B-cell acute lymphoblastic leukemia, |
| LOC107982234 | Wilms tumor, Wilms tumor 1, and mental retardation syndrome, aniridia, |
| | genitourinary anomalies |
| XDH | Deficiency of xanthine oxidase |
| XIAP | Lymphoproliferative syndrome 2, X-linked |
| XK | McLeod neuroacanthocytosis syndrome |
| XPA | Xeroderma pigmentosum, Xeroderma pigmentosum group A |
| XPC | Xeroderma pigmentosum, group C |
| XRCC2 | Fanconi anemia, Hereditary Cancer Syndrome, Hereditary breast and ovarian |
| | cancer syndrome, Hereditary cancer-predisposing syndrome, Ovarian Neoplasms, |
| | complementation group U |
| XRCC4 | Short stature, and endocrine dysfunction, microcephaly |
| XYLT1 | Desbuquois dysplasia 2 |
| XYLT1, | Desbuquois dysplasia 2 |
| LOC102723692 | |
| XYLT2 | Inborn genetic diseases, Spondyloocular syndrome, autosomal recessive |
| YY1AP1 | Grange syndrome |
| ZBTB18 | Mental retardation, autosomal dominant 22 |
| ZDBF2 | Nasopalpebral lipoma-coloboma syndrome |
| ZEB2 | Mowat-Wilson syndrome |
| ZFYVE26 | Hereditary spastic paraplegia 15, Spastic paraplegia |
| ZFYVE26, | Abnormality of the eye, Leber congenital amaurosis 13, RDH12-Related |
| RDH12 | Disorders, Retinal dystrophy, Retinitis pigmentosa |
| ZMPSTE24 | Lethal tight skin contracture syndrome, Mandibuloacral dysplasia with type B |
| | lipodystrophy, ZMPSTE24-Related Disorders |
| ZNF408 | Retinitis pigmentosa 72 |
| ZNF462 | Craniosynostosis, Mental retardation, WEISS-KRUSZKA SYNDROME, |
| | autosomal dominant |
| ZNF711 | ZNF711-Related X-linked Mental Retardation |
| ZP1 | Oocyte maturation defect 1 |
| ZP2 | OOCYTE MATURATION DEFECT 6 |

[2247] In an embodiment, the disease or disorder associated with a PTC is a lysosomal storage disease (e.g., Fabry disease, Gaucher disease, or Niemann-Pick disease). In some embodiments, the disease or disorder associated with a PTC is Fabry disease. In an embodiment, upon administration of a TREM (e.g., a TREM described herein) to a cell or subject, the level of a GLA protein in the cell or subject is modulated, e.g., increased, by about 0.1%, 0.5%, 1%, 2%, 3%, 4% 5%, 6%, 7%, 8%, 9%, 10%, 15%, 20%, 25%, 30%, 35%, 40%, 45%, 50%, 55%, 60%, 65%, 70%, 75%, 80%, 85%, 90%, 95%, or more, e.g., compared with a reference value (e.g., level of a GLA protein in a healthy, non-Fabry disease fibroblast).

[2248] In some embodiments, the disease or disorder associated with a PTC is a blood clotting disorder, e.g., Hemophilia B. In an embodiment, upon administration of a TREM (e.g., a TREM described herein) to a cell or subject, the level of a Factor IX (FIX) protein in the cell or subject is modulated, e.g., increased, by about 0.1%, 0.5%, 1%, 2%, 3%, 4% 5%, 6%, 7%, 8%, 9%, 10%, 15%, 20%, 25%, 30%, 35%, 40%, 45%, 50%, 55%, 60%, 65%, 70%, 75%, 80%, 85%, 90%, 95%, or more, e.g., compared with a reference value (e.g., level of a FIX protein in a healthy, non-disease cell).

[2249] In some embodiments, the disease or disorder associated with a PTC is an autosomal recessive disorder, such as neuronal ceroid lipofuscinosis type 2 (CNL2). In an embodiment, upon administration of a TREM (e.g., a TREM described herein) to a cell or subject, the level of a tripeptidyl peptidase 1 (TPP1) protein in the cell or subject is modulated, e.g., increased, by about 0.1%, 0.5%, 1%, 2%, 3%, 4% 5%, 6%, 7%, 8%, 9%, 10%, 15%, 20%, 25%, 30%, 35%, 40%, 45%, 50%, 55%, 60%, 65%, 70%, 75%, 80%, 85%, 90%, 95%, or more, e.g., compared with a reference value (e.g., level of a TPP1 protein in a healthy, non-disease cell).

[2250] In some embodiments, the disease or disorder associated with a PTC is a disease or disorder associated with hearing loss, such as Usher syndrome (e.g., Usher syndrome type 1F). In an embodiment, upon administration of a TREM (e.g., a TREM described herein) to a cell or subject, the level of a protocadherin 15 precursor (PCDH15) protein in the cell or subject is modulated, e.g., increased, by about 0.1%, 0.5%, 1%, 2%, 3%, 4% 5%, 6%, 7%, 8%, 9%, 10%, 15%, 20%, 25%, 30%, 35%, 40%, 45%, 50%, 55%, 60%, 65%, 70%, 75%, 80%, 85%, 90%, 95%, or more, e.g., compared with a reference value (e.g., level of a PCDH15 protein in a healthy, non-disease cell).

[2251] In an embodiment, the disease or disorder associated with a PTC is a proliferative disease, such as a benign neoplasm or a cancer. In an embodiment, the proliferative disease is associated with a benign neoplasm. For example, a benign neoplasm may include adenoma, fibroma, hemangioma, tuberous sclerosis, and lipoma. All types of benign neoplasms disclosed herein or known in the art are contemplated as being within the scope of the disclosure.

[2252] In an embodiment, the proliferative disease is a cancer. As used herein, the term “cancer” refers to a malignant neoplasm (Stedman's Medical Dictionary, 25th ed.; Hensyl ed.; Williams & Wilkins: Philadelphia, 1990). All types of cancers disclosed herein or known in the art are contemplated as being within the scope of the disclosure. Exemplary cancers include, but are not limited to, acoustic neuroma; adenocarcinoma; adrenal gland cancer; anal cancer; angiosarcoma (e.g., lymphangiosarcoma, lymphangioendotheliosarcoma, hemangiosarcoma); appendix cancer; benign monoclonal gammopathy; biliary cancer (e.g., cholangiocarcinoma); bladder cancer; breast cancer (e.g., adenocarcinoma of the breast, papillary carcinoma of the breast, mammary cancer, medullary carcinoma of the breast); brain cancer (e.g., meningioma, glioblastomas, glioma (e.g., astrocytoma, oligodendroglioma), medulloblastoma); bronchus cancer; carcinoid tumor; cervical cancer (e.g., cervical adenocarcinoma); choriocarcinoma; chordoma; craniopharyngioma; colorectal cancer (e.g., colon cancer, rectal cancer, colorectal adenocarcinoma); connective tissue cancer; epithelial carcinoma; ependymoma; endotheliosarcoma (e.g., Kaposi's sarcoma, multiple idiopathic hemorrhagic sarcoma); endometrial cancer (e.g., uterine cancer, uterine sarcoma); esophageal cancer (e.g., adenocarcinoma of the esophagus, Barrett's adenocarcinoma); Ewing's sarcoma; eye cancer (e.g., intraocular melanoma, retinoblastoma); familiar hypereosinophilia; gall bladder cancer; gastric cancer (e.g., stomach adenocarcinoma); gastrointestinal stromal tumor (GIST); germ cell cancer; head and neck cancer (e.g., head and neck squamous cell carcinoma, oral cancer (e.g., oral squamous cell carcinoma), throat cancer (e.g., laryngeal cancer, pharyngeal cancer, nasopharyngeal cancer, oropharyngeal cancer), e.g., adenoid cystic carcinoma (ACC)); hematopoietic cancers (e.g., leukemia such as acute lymphocytic leukemia (ALL) (e.g., B-cell ALL, T-cell ALL), acute myelocytic leukemia (AML) (e.g., B-cell AML, T-cell AML), chronic myelocytic leukemia (CML) (e.g., B-cell CML, T-cell CML), and chronic lymphocytic leukemia (CLL) (e.g., B-cell CLL, T-cell CLL)); lymphoma such as Hodgkin lymphoma (HL) (e.g., B-cell HL, T-cell HL) and non-Hodgkin lymphoma (NHL) (e.g., B-cell NHL such as diffuse large cell lymphoma (DLCL) (e.g., diffuse large B-cell lymphoma), follicular lymphoma, chronic lymphocytic leukemia/small lymphocytic lymphoma (CLL/SLL), mantle cell lymphoma (MCL), marginal zone B-cell lymphomas (e.g., mucosa-associated lymphoid tissue (MALT) lymphomas, nodal marginal zone B-cell lymphoma, splenic marginal zone B-cell lymphoma), primary mediastinal B-cell lymphoma, Burkitt lymphoma, lymphoplasmacytic lymphoma (i.e., Waldenström's macroglobulinemia), hairy cell leukemia (HCL), immunoblastic large cell lymphoma, precursor B-lymphoblastic lymphoma and primary central nervous system (CNS) lymphoma; and T-cell NHL such as precursor T-lymphoblastic lymphoma/leukemia, peripheral T-cell lymphoma (PTCL) (e.g., cutaneous T-cell lymphoma (CTCL) (e.g., mycosis fungoides, Sezary syndrome), angioimmunoblastic T-cell lymphoma, extranodal natural killer T-cell lymphoma, enteropathy type T-cell lymphoma, subcutaneous panniculitis-like T-cell lymphoma, and anaplastic large cell lymphoma); a mixture of one or more leukemia/lymphoma as described above; and multiple myeloma (MM)), heavy chain disease (e.g., alpha chain disease, gamma chain disease, mu chain disease); hemangioblastoma; hypopharynx cancer; inflammatory myofibroblastic tumors; immunocytic amyloidosis; kidney cancer (e.g., nephroblastoma a.k.a. Wilms' tumor, renal cell carcinoma); liver cancer (e.g., hepatocellular cancer (HCC), malignant hepatoma); lung cancer (e.g., bronchogenic carcinoma, small cell lung cancer (SCLC), non-small cell lung cancer (NSCLC), adenocarcinoma of the lung); leiomyosarcoma (LMS); mastocytosis (e.g., systemic mastocytosis); muscle cancer; myelodysplastic syndrome (MDS); mesothelioma; myeloproliferative disorder (MPD) (e.g., polycythemia vera (PV), essential thrombocytosis (ET), agnogenic myeloid metaplasia (AMM) a.k.a. myelofibrosis (MF), chronic idiopathic myelofibrosis, chronic myelocytic leukemia (CML), chronic neutrophilic leukemia (CNL), hypercosinophilic syndrome (HES)); neuroblastoma; neurofibroma (e.g., neurofibromatosis (NF) type 1 or type 2, schwannomatosis); neuroendocrine cancer (e.g., gastroenteropancreatic neuroendocrine tumor (GEP-NET), carcinoid tumor); osteosarcoma (e.g., bone cancer); ovarian cancer (e.g., cystadenocarcinoma, ovarian embryonal carcinoma, ovarian adenocarcinoma); papillary adenocarcinoma; pancreatic cancer (e.g., pancreatic adenocarcinoma, intraductal papillary mucinous neoplasm (IPMN), Islet cell tumors); penile cancer (e.g., Paget's disease of the penis and scrotum); pinealoma; primitive neuroectodermal tumor (PNT); plasma cell neoplasia; parancoplastic syndromes; intraepithelial neoplasms; prostate cancer (e.g., prostate adenocarcinoma); rectal cancer; rhabdomyosarcoma; salivary gland cancer; skin cancer (e.g., squamous cell carcinoma (SCC), keratoacanthoma (KA), melanoma, basal cell carcinoma (BCC)); small bowel cancer (e.g., appendix cancer); soft tissue sarcoma (e.g., malignant fibrous histiocytoma (MFH), liposarcoma, malignant peripheral nerve sheath tumor (MPNST), chondrosarcoma, fibrosarcoma, myxosarcoma); sebaceous gland carcinoma; small intestine cancer; sweat gland carcinoma; synovioma; testicular cancer (e.g., seminoma, testicular embryonal carcinoma); thyroid cancer (e.g., papillary carcinoma of the thyroid, papillary thyroid carcinoma (PTC), medullary thyroid cancer); urethral cancer; vaginal cancer; and vulvar cancer (e.g., Paget's disease of the vulva). In some embodiments, the cancer is a solid tumor, such as a sarcoma or a carcinoma (e.g., lung cancer, brain cancer, breast cancer, bladder cancer, prostate cancer, colon cancer, rectal cancer).

[2253] In another aspect, the present disclosure features methods of treating a disease or disorder in a cell or subject by administration of a TREM (e.g., a TREM described herein) to the cell or subject. Exemplary diseases or disorders include hemophilias, aminoacidopathies, metal storage disorders, peroxisome biogenesis disorder, progressive rare lung disease, diseases related to lipid metabolism, diseases related to galactose metabolism, systemic organic acidemias, urea cycle disorders, cholestastis disorders, bilirubin metabolism disorders, lysososomal storage disorders, glycogen storage diseases, and oxalate metabolism disorders. In an embodiment, the disease or disorder is a hemophilia, e.g., hemophilia A or hemophilia B. In an embodiment, the disease or disorder is an aminoacidopathy, e.g., tyrosinemia type 1, tyrosinemia type 2, tyrosinemia type 3, maple syrup urine disease, alkaptonuria, or phenylketonuria. In an embodiment, the disease or disorder is a systemic organic acidemia, e.g., methylmalonic acidemia (MMUT), methylmalonic acidemia (non-MMUT), propionic acidemia type A, propionic acidemia type B, or isovaleric acidemia. In an embodiment, the disease or disorder is a urea cycle disorder, e.g. argininosuccinate lyase deficiency, argininosuccinate lyase deficiency-D, citrullinemia type 1, citrullinemia type 2, carbamoyl phosphate synthetase-D, ornithine transcarbamylase, arginemia, or hyperornithinemia-hyperammonemia-homocitrullinuria (HHH) syndrome. In an embodiment, the disease or disorder is lysosomal storage disorder, e.g., mucopolysaccharidosis 1, mucopolysaccharidosis 2. Fabry disease, lysosomal acid lipas deficiency, Pompe disease, Gaucher disease, Niemann Pick A, or Niemann Pick B. In an embodiment, the disease or disorder is a bilirubin metabolism disorder, e.g., Crigler-Najjar syndrome. In an embodiment, the disease or disorder is a cholestastis disorder, e.g., progressive familial intrahepatic cholestasis (PFIC) type 1, PFIC type 2, or PFIC type 3. In an embodiment, the disease or disorder is a disease related to lipid metabolism, e.g., sitosterolemia (ABCG5) or sitosterolemia (ABCG8). In an embodiment, the disease or disorder is a glycogen storage disease, e.g., glycogen storage disease 1a, glycogen storage disease 1b, or glycogen storage disease 3a. In an embodiment, the disease or disorder is a metal storage disorder, e.g., Wilson disease or hereditary hemochromatosis. In an embodiment, the disease or disorder is a progressive rare lung disease, e.g., alpha-1 antitrypsin deficiency. In an embodiment, the disease or disorder is a peroxisome biogenesis disorder, e.g., PBD RCDP1. In an embodiment, the disease or disorder is an oxalate metabolism disorder, e.g. primary hyperoxaluria type 1, primary hyperoxaluria type 2, or primary hyperoxaluria type 3. In an embodiment, the disease or disorder is a congenital disorder related to Notch signaling, e.g., Alagille syndrome. In an embodiment, the disease or disorder is an amyloidosis, e.g., familial amyloid polyneuropathy.

[2254] In one aspect, the present disclosure features a method of treating a disease or disorder in a subject, the method comprising administering to the subject a TREM comprising the nucleotide sequence of any one of the TREMS listed in FIG. 2. In an embodiment, the disease or disorder is selected from a hemophilia, aminoacidopathy, metal storage disorder, peroxisome biogenesis disorder, progressive rare lung disease, disease related to lipid metabolism, disease related to galactose metabolism, systemic organic acidemia, urea cycle disorder, cholestastis disorder, bilirubin metabolism disorder, lysososomal storage disorder, glycogen storage disease, and oxalate metabolism disorder. In an embodiment, the TREM comprises the sequence of any one of SEQ ID NO: 622, 623, 624, 4249, 4386, 4834, 5630, 6707, 6749, 6947, or 8051, or a fragment or variant thereof. [WILL EXPAND HERE A BIT]

### Method of Making TREMs, TREM Core Fragments, and TREM Fragments

[2255] In vitro methods for synthesizing oligonucleotides are known in the art and can be used to make a TREM, a TREM core fragment or a TREM fragment disclosed herein. For example, a TREM, TREM core fragment or TREM fragment can be synthesized using solid state synthesis or liquid phase synthesis.

[2256] In an embodiment, a TREM, a TREM core fragment or a TREM fragment made according to an in vitro synthesis method disclosed herein has a different modification profile compared to a TREM expressed and isolated from a cell, or compared to a naturally occurring tRNA.

[2257] An exemplary method for making a modified TREM is provided in Example 1. The method provided in Example 1 can also be used to make a synthetic TREM core fragment or synthetic TREM fragment. Additional synthetic methods are disclosed in Hartsel SA et al., (2005) Oligonucleotide Synthesis, 033-050, the entire contents of which are hereby incorporated by reference.

### TREM Composition

[2258] In an embodiment, a TREM composition, e.g., a TREM pharmaceutical composition, comprises a pharmaceutically acceptable excipient. Exemplary excipients include those provided in the FDA Inactive Ingredient Database (https://www.accessdata.fda.gov/scripts/cder/iig/index. Cfm).

[2259] In an embodiment, a TREM composition, e.g., a TREM pharmaceutical composition, comprises at least 1, 2, 3, 4, 5, 6, 7, 8, 9, 10, 15, 20, 30, 40, 50, 60, 70, 80, 90, 100 or 150 grams of TREM, TREM core fragment or TREM fragment. In an embodiment, a TREM composition, e.g., a TREM pharmaceutical composition, comprises at least 1, 2, 3, 4, 5, 6, 7, 8, 9, 10, 15, 20, 30, 40, 50 or 100 milligrams of TREM, TREM core fragment or TREM fragment.

[2260] In an embodiment, a TREM composition, e.g., a TREM pharmaceutical composition, is at least 10, 20, 30, 40, 50, 60, 70, 80, 90, 95 or 99% dry weight TREMs, TREM core fragments or TREM fragments.

[2261] In an embodiment, a TREM composition comprises at least 1×10⁶ TREM molecules, at least 1×10⁷ TREM molecules, at least 1×10⁸ TREM molecules or at least 1×10⁹ TREM molecules.

[2262] In an embodiment, a TREM composition comprises at least 1×10⁶ TREM core fragment molecules, at least 1×10⁷ TREM core fragment molecules, at least 1×10⁸ TREM core fragment molecules or at least 1×10⁹ TREM core fragment molecules.

[2263] In an embodiment, a TREM composition comprises at least 1×10⁶ TREM fragment molecules, at least 1×10⁷ TREM fragment molecules, at least 1×10⁸ TREM fragment molecules or at least 1×10⁹ TREM fragment molecules.

[2264] In an embodiment, a TREM composition produced by any of the methods of making disclosed herein can be charged with an amino acid using an in vitro charging reaction as known in the art.

[2265] In an embodiment, a TREM composition comprise one or more species of TREMs, TREM core fragments, or TREM fragments. In an embodiment, a TREM composition comprises a single species of TREM. TREM core fragment, or TREM fragment. In an embodiment, a TREM composition comprises a first TREM, TREM core fragment, or TREM fragment species and a second TREM, TREM core fragment, or TREM fragment species. In an embodiment, the TREM composition comprises X TREM, TREM core fragment, or TREM fragment species, wherein X=2, 3, 4, 5, 6, 7, 8, 9, or 10.

[2266] In an embodiment, the TREM, TREM core fragment, or TREM fragment has at least 70, 75, 80, 85, 90, or 95, or has 100%, identity with a sequence encoded by a nucleic acid in Table 1.

[2267] In an embodiment, the TREM comprises a consensus sequence provided herein.

[2268] A TREM composition can be formulated as a liquid composition, as a lyophilized composition or as a frozen composition.

[2269] In some embodiments, a TREM composition can be formulated to be suitable for pharmaceutical use, e.g., a pharmaceutical TREM composition. In an embodiment, a pharmaceutical TREM composition is substantially free of materials and/or reagents used to separate and/or purify a TREM, TREM core fragment, or TREM fragment.

[2270] In some embodiments, a TREM composition can be formulated with water for injection. In some embodiments, a TREM composition formulated with water for injection is suitable for pharmaceutical use, e.g., comprises a pharmaceutical TREM composition.

### TREM Characterization

[2271] A TREM, TREM core fragment, or TREM fragment, or a TREM composition, e.g., a pharmaceutical TREM composition, produced by any of the methods disclosed herein can be assessed for a characteristic associated with the TREM, TREM core fragment, or TREM fragment or the TREM composition, such as purity, sterility, concentration, structure, or functional activity of the TREM, TREM core fragment, or TREM fragment. Any of the above-mentioned characteristics can be evaluated by providing a value for the characteristic, e.g., by evaluating or testing the TREM, TREM core fragment, or TREM fragment, or the TREM composition, or an intermediate in the production of the TREM composition. The value can also be compared with a standard or a reference value. Responsive to the evaluation, the TREM composition can be classified, e.g., as ready for release, meets production standard for human trials, complies with ISO standards, complies with cGMP standards, or complies with other pharmaceutical standards. Responsive to the evaluation, the TREM composition can be subjected to further processing, e.g., it can be divided into aliquots, e.g., into single or multi-dosage amounts, disposed in a container, e.g., an end-use vial, packaged, shipped, or put into commerce. In embodiments, in response to the evaluation, one or more of the characteristics can be modulated, processed or re-processed to optimize the TREM composition. For example, the TREM composition can be modulated, processed or re-processed to (i) increase the purity of the TREM composition; (ii) decrease the amount of fragments in the composition; (iii) decrease the amount of endotoxins in the composition; (iv) increase the in vitro translation activity of the composition; (v) increase the TREM concentration of the composition; or (vi) inactivate or remove any viral contaminants present in the composition, e.g., by reducing the pH of the composition or by filtration.

[2272] In an embodiment, the TREM, TREM core fragment, or TREM fragment (e.g., TREM composition or an intermediate in the production of the TREM composition) has a purity of at least 30%, 40%, 50%, 60%, 70%, 80%, 85%, 90%, 91%, 92%, 93%, 94%, 95%, 96%, 97%, 98%, or 99%, i.e., by mass.

[2273] In an embodiment, the TREM (e.g., TREM composition or an intermediate in the production of the TREM composition) has less than 0.1%, 0.5%, 1%, 2%, 3%, 4%, 5%, 6%, 7%, 8%, 9%, 10%, 15%, 20%, 25% TREM fragments relative to full length TREMs.

[2274] In an embodiment, the TREM, TREM core fragment, or TREM fragment (e.g., TREM composition or an intermediate in the production of the TREM composition) has low levels or absence of endotoxins, e.g., a negative result as measured by the Limulus amebocyte lysate (LAL) test.

[2275] In an embodiment, the TREM. TREM core fragment, or TREM fragment (e.g., TREM composition or an intermediate in the production of the TREM composition) has in-vitro translation activity, e.g., as measured by an assay described in Examples 12-13.

[2276] In an embodiment, the TREM, TREM core fragment, or TREM fragment (e.g., TREM composition or an intermediate in the production of the TREM composition) has a TREM concentration of at least 0.1 ng/mL, 0.5 ng/ml, 1 ng/ml, 5 ng/ml, 10 ng/ml, 50 ng/ml, 0.1 ug/mL, 0.5 ug/mL, 1 ug/mL, 2 ug/mL, 5 ug/mL, 10 ug/mL, 20 ug/mL, 30 ug/mL, 40 ug/mL, 50 ug/mL, 60 ug/mL, 70 ug/mL, 80 ug/mL. 100 ug/mL, 200 ug/mL, 300 ug/mL, 500 ug/mL, 1000 ug/mL, 5000 ug/mL, 10,000 ug/mL, or 100,000 ug/mL.

[2277] In an embodiment, the TREM, TREM core fragment, or TREM fragment (e.g., TREM composition or an intermediate in the production of the TREM composition) is sterile, e.g., the composition or preparation supports the growth of fewer than 100 viable microorganisms as tested under aseptic conditions, the composition or preparation meets the standard of USP <71>, and/or the composition or preparation meets the standard of USP <85>.

[2278] In an embodiment, the TREM, TREM core fragment, or TREM fragment (e.g., TREM composition or an intermediate in the production of the TREM composition) has an undetectable level of viral contaminants, e.g., no viral contaminants. In an embodiment, any viral contaminant, e.g., residual virus, present in the composition is inactivated or removed. In an embodiment, any viral contaminant, e.g., residual virus, is inactivated, e.g., by reducing the pH of the composition. In an embodiment, any viral contaminant, e.g., residual virus, is removed, e.g., by filtration or other methods known in the field.

### TREM Administration

[2279] Any TREM composition or pharmaceutical composition described herein can be administered to a cell, tissue or subject, e.g., by direct administration to a cell, tissue and/or an organ in vitro, ex-vivo or in vivo. In-vivo administration may be via, e.g., by local, systemic and/or parenteral routes, for example intravenous, subcutaneous, intraperitoneal, intrathecal, intramuscular, ocular, nasal, urogenital, intradermal, dermal, enteral, intravitreal, intracerebral, intrathecal, or epidural.

### Vectors and Carriers

[2280] In some embodiments the TREM, TREM core fragment, or TREM fragment or TREM composition described herein, is delivered to cells, e.g. mammalian cells or human cells, using a vector. The vector may be, e.g., a plasmid or a virus. In some embodiments, delivery is in vivo, in vitro, ex vivo, or in situ. In some embodiments, the virus is an adeno associated virus (AAV), a lentivirus, or an adenovirus. In some embodiments, the system or components of the system are delivered to cells with a viral-like particle or a virosome. In some embodiments, the delivery uses more than one virus, viral-like particle or virosome.

### Carriers

[2281] A TREM, a TREM composition or a pharmaceutical TREM composition described herein may comprise, may be formulated with, or may be delivered in, a carrier.

### Viral Vectors

[2282] The carrier may be a viral vector (e.g., a viral vector comprising a sequence encoding a TREM, a TREM core fragment or a TREM fragment). The viral vector may be administered to a cell or to a subject (e.g., a human subject or animal model) to deliver a TREM, a TREM core fragment or a TREM fragment, a TREM composition or a pharmaceutical TREM composition.

[2283] A viral vector may be systemically or locally administered (e.g., injected). Viral genomes provide a rich source of vectors that can be used for the efficient delivery of exogenous genes into a mammalian cell. Viral genomes are known in the art as useful vectors for delivery because the polynucleotides contained within such genomes are typically incorporated into the nuclear genome of a mammalian cell by generalized or specialized transduction. These processes occur as part of the natural viral replication cycle, and do not require added proteins or reagents in order to induce gene integration. Examples of viral vectors include a retrovirus (e.g., Retroviridae family viral vector), adenovirus (e.g., Ad5, Ad26, Ad34, Ad35, and Ad48), parvovirus (e.g., adeno-associated viruses), coronavirus, negative strand RNA viruses such as orthomyxovirus (e.g., influenza virus), rhabdovirus (e.g., rabies and vesicular stomatitis virus), paramyxovirus (e.g., measles and Sendai), positive strand RNA viruses, such as picornavirus and alphavirus, and double stranded DNA viruses including adenovirus, herpesvirus (e.g., Herpes Simplex virus types 1 and 2, Epstein-Barr virus, cytomegalovirus, replication deficient herpes virus), and poxvirus (e.g., vaccinia, modified vaccinia Ankara (MVA), fowlpox and canarypox). Other viruses include Norwalk virus, togavirus, flavivirus, reoviruses, papovavirus, hepadnavirus, human papilloma virus, human foamy virus, and hepatitis virus, for example. Examples of retroviruses include: avian leukosis-sarcoma, avian C-type viruses, mammalian C-type, B-type viruses, D-type viruses, oncoretroviruses, HTLV-BLV group, lentivirus, alpharetrovirus, gammaretrovirus, spumavirus (Coffin, J. M., Retroviridae: The viruses and their replication, Virology (Third Edition) Lippincott-Raven, Philadelphia, 1996). Other examples include murine leukemia viruses, murine sarcoma viruses, mouse mammary tumor virus, bovine leukemia virus, feline leukemia virus, feline sarcoma virus, avian leukemia virus, human T-cell leukemia virus, baboon endogenous virus, Gibbon ape leukemia virus, Mason Pfizer monkey virus, simian immunodeficiency virus, simian sarcoma virus, Rous sarcoma virus and lentiviruses. Other examples of vectors are described, for example, in U.S. Pat. No. 5,801,030, the teachings of which are incorporated herein by reference. In some embodiments the system or components of the system are delivered to cells with a viral-like particle or a virosome.

### Cell and Vesicle-Based Carriers

[2284] A TREM, a TREM core fragment or a TREM fragment, a TREM composition or a pharmaceutical TREM composition described herein can be administered to a cell in a vesicle or other membrane-based carrier.

[2285] In embodiments, a TREM, a TREM core fragment or a TREM fragment, or TREM composition, or pharmaceutical TREM composition described herein is administered in or via a cell, vesicle or other membrane-based carrier. In one embodiment, the TREM, TREM core fragment, TREM fragment, or TREM composition or pharmaceutical TREM composition can be formulated in liposomes or other similar vesicles. Liposomes are spherical vesicle structures composed of a uni- or multilamellar lipid bilayer surrounding internal aqueous compartments and a relatively impermeable outer lipophilic phospholipid bilayer. Liposomes may be anionic, neutral or cationic. Liposomes are biocompatible, nontoxic, can deliver both hydrophilic and lipophilic drug molecules, protect their cargo from degradation by plasma enzymes, and transport their load across biological membranes and the blood brain barrier (BBB) (see, e.g., Spuch and Navarro, Journal of Drug Delivery, vol. 2011, Article ID 469679, 12 pages, 2011. doi: 10.1155/2011/469679 for review).

[2286] Vesicles can be made from several different types of lipids; however, phospholipids are most commonly used to generate liposomes as drug carriers. Methods for preparation of multilamellar vesicle lipids are known in the art (see for example U.S. Pat. No. 6,693,086, the teachings of which relating to multilamellar vesicle lipid preparation are incorporated herein by reference). Although vesicle formation can be spontaneous when a lipid film is mixed with an aqueous solution, it can also be expedited by applying force in the form of shaking by using a homogenizer, sonicator, or an extrusion apparatus (see, e.g., Spuch and Navarro, Journal of Drug Delivery, vol. 2011, Article ID 469679, 12 pages, 2011. doi: 10.1155/2011/469679 for review). Extruded lipids can be prepared by extruding through filters of decreasing size, as described in Templeton et al., Nature Biotech, 15:647-652, 1997, the teachings of which relating to extruded lipid preparation are incorporated herein by reference.

[2287] Lipid nanoparticles are another example of a carrier that provides a biocompatible and biodegradable delivery system for the TREM, TREM core fragment, TREM fragment, or TREM composition or pharmaceutical TREM composition described herein. Nanostructured lipid carriers (NLCs) are modified solid lipid nanoparticles (SLNs) that retain the characteristics of the SLN, improve drug stability and loading capacity, and prevent drug leakage. Polymer nanoparticles (PNPs) are an important component of drug delivery. These nanoparticles can effectively direct drug delivery to specific targets and improve drug stability and controlled drug release. Lipid-polymer nanoparticles (PLNs), a new type of carrier that combines liposomes and polymers, may also be employed. These nanoparticles possess the complementary advantages of PNPs and liposomes. A PLN is composed of a core-shell structure; the polymer core provides a stable structure, and the phospholipid shell offers good biocompatibility. As such, the two components increase the drug encapsulation efficiency rate, facilitate surface modification, and prevent leakage of water-soluble drugs. For a review, see, e.g., Li et al. 2017, Nanomaterials 7, 122; doi: 10.3390/nano7060122.

[2288] Exemplary lipid nanoparticles are disclosed in International Application PCT/US2014/053907, the entire contents of which are hereby incorporated by reference. For example, an LNP described in paragraphs [403-406] or [410-413] of PCT/US2014/053907 can be used as a carrier for the TREM, TREM core fragment, TREM fragment, or TREM composition or pharmaceutical TREM composition described herein.

[2289] Additional exemplary lipid nanoparticles are disclosed in U.S. Pat. No. 10,562,849 the entire contents of which are hereby incorporated by reference. For example, an LNP of formula (I) as described in columns 1-3 of U.S. Pat. No. 10,562,849 can be used as a carrier for the TREM, TREM core fragment, TREM fragment, or TREM composition or pharmaceutical TREM composition described herein.

[2290] Lipids that can be used in nanoparticle formations (e.g., lipid nanoparticles) include, for example those described in Table 4 of WO2019217941, which is incorporated by reference, e.g., a lipid-containing nanoparticle can comprise one or more of the lipids in Table 4 of WO2019217941. Lipid nanoparticles can include additional elements, such as polymers, such as the polymers described in Table 5 of WO2019217941, incorporated by reference.

[2291] In some embodiments, conjugated lipids, when present, can include one or more of PEG-diacylglycerol (DAG) (such as 1-(monomethoxy-polyethyleneglycol)-2,3-dimyristoylglycerol (PEG-DMG)), PEG-dialkyloxypropyl (DAA), PEG-phospholipid, PEG-ceramide (Cer), a pegylated phosphatidylethanoloamine (PEG-PE), PEG succinate diacylglycerol (PEGS-DAG) (such as 4-O-(2′,3′-di (tetradecanoyloxy) propyl-1-O-(w-methoxy (polyethoxy)ethyl) butanedioate (PEG-S-DMG)), PEG dialkoxypropylcarbam, N-(carbonyl-methoxypoly ethylene glycol 2000)-1,2-distearoyl-sn-glycero-3-phosphoethanolamine sodium salt, and those described in Table 2 of WO2019051289 (incorporated by reference), and combinations of the foregoing.

[2292] In some embodiments, sterols that can be incorporated into lipid nanoparticles include one or more of cholesterol or cholesterol derivatives, such as those in WO2009/127060 or US2010/0130588, which are incorporated by reference. Additional exemplary sterols include phytosterols, including those described in Eygeris et al (2020), incorporated herein by reference.

[2293] In some embodiments, the lipid particle comprises an ionizable lipid, a non-cationic lipid, a conjugated lipid that inhibits aggregation of particles, and a sterol. The amounts of these components can be varied independently and to achieve desired properties. For example, in some embodiments, the lipid nanoparticle comprises an ionizable lipid is in an amount from about 20 mol % to about 90 mol % of the total lipids (in other embodiments it may be 20-70% (mol), 30-60% (mol) or 40-50% (mol); about 50 mol % to about 90 mol % of the total lipid present in the lipid nanoparticle), a non-cationic lipid in an amount from about 5 mol % to about 30 mol % of the total lipids, a conjugated lipid in an amount from about 0.5 mol % to about 20 mol % of the total lipids, and a sterol in an amount from about 20 mol % to about 50 mol % of the total lipids. The ratio of total lipid to nucleic acid can be varied as desired. For example, the total lipid to nucleic acid (mass or weight) ratio can be from about 10:1 to about 30:1.

[2294] In some embodiments, the lipid to nucleic acid ratio (mass/mass ratio; w/w ratio) can be in the range of from about 1:1 to about 25:1, from about 10:1 to about 14:1, from about 3:1 to about 15:1, from about 4:1 to about 10:1, from about 5:1 to about 9:1, or about 6:1 to about 9:1. The amounts of lipids and nucleic acid can be adjusted to provide a desired N/P ratio, for example, N/P ratio of 3, 4, 5, 6, 7, 8, 9, 10 or higher. Generally, the lipid nanoparticle formulation's overall lipid content can range from about 5 mg/ml to about 30 mg/mL.

[2295] Some non-limiting example of lipid compounds that may be used (e.g., in combination with other lipid components) to form lipid nanoparticles for the delivery of compositions described herein, e.g., nucleic acid (e.g., RNA) described herein includes,

[chemical structure]

[2296] In some embodiments an LNP comprising Formula (i) is used to deliver a TREM composition described herein to the liver and/or hepatocyte cells.

[chemical structure]

[2297] In some embodiments an LNP comprising Formula (ii) is used to deliver a TREM composition described herein to the liver and/or hepatocyte cells.

[chemical structure]

[2298] In some embodiments an LNP comprising Formula (iii) is used to deliver a TREM composition described herein to the liver and/or hepatocyte cells.

[chemical structure]

[2299] In some embodiments an LNP comprising Formula (v) is used to deliver a TREM composition described herein to the liver and/or hepatocyte cells.

[chemical structure]

[2300] In some embodiments an LNP comprising Formula (vi) is used to deliver a TREM composition described herein to the liver and/or hepatocyte cells.

[chemical structure]

[2301] In some embodiments an LNP comprising Formula (viii) is used to deliver a TREM composition described herein to the liver and/or hepatocyte cells.

[chemical structure]

[2302] In some embodiments an LNP comprising Formula (ix) is used to deliver a TREM composition described herein to the liver and/or hepatocyte cells.

[chemical structure]

wherein X¹ is O, NR¹, or a direct bond, X² is C2-5 alkylene, X³ is C(═O) or a direct bond, R¹ is H or Me, R³ is C1-3 alkyl, R² is C1-3 alkyl, or R² taken together with the nitrogen atom to which it is attached and 1-3 carbon atoms of X² form a 4-, 5-, or 6-membered ring, or X¹ is NR¹, R¹ and R² taken together with the nitrogen atoms to which they are attached form a 5- or 6-membered ring, or R² taken together with R³ and the nitrogen atom to which they are attached form a 5-, 6-, or 7-membered ring, Y¹ is C2-12 alkylene, Y² is selected from

[chemical structure]

n is 0 to 3, R⁴ is C1-15 alkyl, Z¹ is C1-6 alkylene or a direct bond, Z² is

[chemical structure]

(in either orientation) or absent, provided that if Z′ is a direct bond, Z² is absent; R⁵ is C5-9 alkyl or C6-10 alkoxy, R⁶ is C5-9 alkyl or C6-10 alkoxy, W is methylene or a direct bond, and R⁷ is H or Me, or a salt thereof, provided that if R³ and R² are C2 alkyls, X¹ is O, X² is linear C3 alkylene, X³ is C(=0), Y¹ is linear Ce alkylene, (Y²) n-R⁴ is:

[chemical structure]

R⁴ is linear C5 alkyl, Z¹ is C2 alkylene, Z² is absent, W is methylene, and R⁷ is H, then R⁵ and R⁶ are not Cx alkoxy.

[2303] In some embodiments an LNP comprising Formula (xii) is used to deliver a TREM composition described herein to the liver and/or hepatocyte cells.

[chemical structure]

[2304] In some embodiments an LNP comprising Formula (xi) is used to deliver a TREM composition described herein to the liver and/or hepatocyte cells.

[chemical structure]

[2305] In some embodiments an LNP comprises a compound of Formula (xiii) and a compound of Formula (xiv).

[chemical structure]

[2306] In some embodiments, an LNP comprising Formula (xv) is used to deliver a TREM composition described herein to the liver and/or hepatocyte cells.

[chemical structure]

[2307] In some embodiments an LNP comprising a formulation of Formula (xvi) is used to deliver a TREM composition described herein to the lung endothelial cells.

[chemical structure]

[chemical structure]

[2308] In some embodiments, a lipid compound used to form lipid nanoparticles for the delivery of compositions described herein, e.g., a TREM described herein is made by one of the following reactions:

[chemical structure]

[2309] In some embodiments, a composition described herein (e.g., TREM composition) is provided in an LNP that comprises an ionizable lipid. In some embodiments, the ionizable lipid is heptadecan-9-yl 8-((2-hydroxyethyl) (6-oxo-6-(undecyloxy) hexyl)amino) octanoate (SM-102); e.g., as described in Example 1 of U.S. Pat. No. 9,867,888 (incorporated by reference herein in its entirety). In some embodiments, the ionizable lipid is 9Z,12Z)-3-((4,4-bis (octyloxy) butanoyl)oxy)-2-((((3-(diethylamino) propoxy) carbonyl)oxy)methyl) propyl octadeca-9,12-dienoate (LP01), e.g., as synthesized in Example 13 of WO2015/095340 (incorporated by reference herein in its entirety). In some embodiments, the ionizable lipid is Di ((Z)-non-2-en-1-yl) 9-((4-dimethylamino)-butanoyl)oxy) heptadecanedioate (L319), e.g. as synthesized in Example 7, 8, or 9 of US2012/0027803 (incorporated by reference herein in its entirety). In some embodiments, the ionizable lipid is 1,1′-((2-(4-(2-((2-(Bis (2-hydroxydodecyl)amino)ethyl) (2-hydroxydodecyl) amino)ethyl) piperazin-1-yl)ethyl) azanediyl)bis (dodecan-2-ol) (C12-200), e.g., as synthesized in Examples 14 and 16 of WO2010/053572 (incorporated by reference herein in its entirety). In some embodiments, the ionizable lipid is Imidazole cholesterol ester (ICE) lipid (3S, 10R, 13R, 17R)-10, 13-dimethyl-17-((R)-6-methylheptan-2-yl)-2, 3, 4, 7, 8, 9, 10, 11, 12, 13, 14, 15, 16, 17-tetradecahydro-IH-cyclopenta[a] phenanthren-3-yl 3-(1H-imidazol-4-yl) propanoate, e.g., Structure (I) from WO2020/106946 (incorporated by reference herein in its entirety).

[2310] In some embodiments, an ionizable lipid may be a cationic lipid, an ionizable cationic lipid, e.g., a cationic lipid that can exist in a positively charged or neutral form depending on pH, or an amine-containing lipid that can be readily protonated. In some embodiments, the cationic lipid is a lipid capable of being positively charged, e.g., under physiological conditions. Exemplary cationic lipids include one or more amine group(s) which bear the positive charge. In some embodiments, the lipid particle comprises a cationic lipid in formulation with one or more of neutral lipids, ionizable amine-containing lipids, biodegradable alkyne lipids, steroids, phospholipids including polyunsaturated lipids, structural lipids (e.g., sterols), PEG, cholesterol and polymer conjugated lipids. In some embodiments, the cationic lipid may be an ionizable cationic lipid. An exemplary cationic lipid as disclosed herein may have an effective pKa over 6.0. In embodiments, a lipid nanoparticle may comprise a second cationic lipid having a different effective pKa (e.g., greater than the first effective pKa), than the first cationic lipid. A lipid nanoparticle may comprise between 40 and 60 mol percent of a cationic lipid, a neutral lipid, a steroid, a polymer conjugated lipid, and a therapeutic agent, e.g., a TREM described herein, encapsulated within or associated with the lipid nanoparticle. In some embodiments, the TREM is co-formulated with the cationic lipid. The TREM may be adsorbed to the surface of an LNP, e.g., an LNP comprising a cationic lipid. In some embodiments, the TREM may be encapsulated in an LNP, e.g., an LNP comprising a cationic lipid. In some embodiments, the lipid nanoparticle may comprise a targeting moiety, e.g., coated with a targeting agent. In embodiments, the LNP formulation is biodegradable. In some embodiments, a lipid nanoparticle comprising one or more lipid described herein, e.g., Formula (i), (ii), (ii), (vii) and/or (ix) encapsulates at least 1%, at least 5%, at least 10%, at least 20%, at least 30%, at least 40%, at least 50%, at least 60%, at least 70%, at least 80%, at least 90%, at least 92%, at least 95%, at least 97%, at least 98% or 100% of a TREM.

[2311] Exemplary ionizable lipids that can be used in lipid nanoparticle formulations include, without limitation, those listed in Table 1 of WO2019051289, incorporated herein by reference. Additional exemplary lipids include, without limitation, one or more of the following formulae: X of US2016/0311759; I of US20150376115 or in US2016/0376224; I, II or III of US20160151284; I, IA, II, or IIA of US20170210967; I-c of US20150140070; A of US2013/0178541; I of US2013/0303587 or US2013/0123338; I of US2015/0141678; II, III, IV, or V of US2015/0239926; I of US2017/0119904; I or II of WO2017/117528; A of US2012/0149894; A of US2015/0057373; A of WO2013/116126; A of US2013/0090372; A of US2013/0274523; A of US2013/0274504; A of US2013/0053572; A of WO2013/016058; A of WO2012/162210; I of US2008/042973; I, II, III, or IV of US2012/01287670; I or II of US2014/0200257; I, II, or III of US2015/0203446; I or III of US2015/0005363; I, IA, IB, IC, ID, II, IIA, IIB, IIC, IID, or III-XXIV of US2014/0308304; of US2013/0338210; I, II, III, or IV of WO2009/132131; A of US2012/01011478; I or XXXV of US2012/0027796; XIV or XVII of US2012/0058144; of US2013/0323269; I of US2011/0117125; I, II, or III of US2011/0256175; I, II, III, IV, V, VI, VII, VIII, IX, X, XI, XII of US2012/0202871; I, II, III, IV, V, VI, VII, VIII, X, XII, XIII, XIV, XV, or XVI of US2011/0076335; I or II of US2006/008378; I of US2013/0123338; I or X-A-Y-Z of US2015/0064242; XVI, XVII, or XVIII of US2013/0022649; I, II, or III of US2013/0116307; I, II, or III of US2013/0116307; I or II of US2010/0062967; I-X of US2013/0189351; I of US2014/0039032; V of US2018/0028664; I of US2016/0317458; I of US2013/0195920; 5, 6, or 10 of U.S. Pat. No. 10,221,127; III-3 of WO2018/081480; I-5 or I-8 of WO2020/081938; 18 or 25 of U.S. Pat. No. 9,867,888; A of US2019/0136231; II of WO2020/219876; 1 of US2012/0027803; OF-02 of US2019/0240349; 23 of U.S. Pat. No. 10,086,013; cKK-E12/A6 of Miao et al (2020); C12-200 of WO2010/053572; 7C1 of Dahlman et al (2017); 304-013 or 503-013 of Whitehead et al; TS-P4C2 of U.S. Pat. No. 9,708,628; I of WO2020/106946; I of WO2020/106946.

[2312] In some embodiments, the ionizable lipid is MC3 (6Z,9Z,28Z.3 IZ)-heptatriaconta-6,9,28,3 1-tetraen-19-yl-4-(dimethylamino) butanoate (DLin-MC3-DMA or MC3), e.g., as described in Example 9 of WO2019051289A9 (incorporated by reference herein in its entirety). In some embodiments, the ionizable lipid is the lipid ATX-002, e.g., as described in Example 10 of WO2019051289A9 (incorporated by reference herein in its entirety). In some embodiments, the ionizable lipid is (13Z,16Z)-A,A-dimethyl-3-nonyldocosa-13, 16-dien-1-amine (Compound 32), e.g., as described in Example 11 of WO2019051289A9 (incorporated by reference herein in its entirety). In some embodiments, the ionizable lipid is Compound 6 or Compound 22, e.g., as described in Example 12 of WO2019051289A9 (incorporated by reference herein in its entirety).

[2313] Exemplary non-cationic lipids include, but are not limited to, distearoyl-sn-glycero-phosphoethanolamine, distearoylphosphatidylcholine (DSPC), dioleoylphosphatidylcholine (DOPC), dipalmitoylphosphatidylcholine (DPPC), diolcoylphosphatidylglycerol (DOPG), dipalmitoylphosphatidylglycerol (DPPG), dioleoyl-phosphatidylethanolamine (DOPE), palmitoyloleoylphosphatidylcholine (POPC), palmitoyloleoylphosphatidylethanolamine (POPE), dioleoyl-phosphatidylethanolamine 4-(N-maleimidomethyl)-cyclohexane-1-carboxylate (DOPE-mal), dipalmitoyl phosphatidyl ethanolamine (DPPE), dimyristoylphosphoethanolamine (DMPE), distearoyl-phosphatidyl-ethanolamine (DSPE), monomethyl-phosphatidylethanolamine (such as 16-O-monomethyl PE), dimethyl-phosphatidylethanolamine (such as 16-O-dimethyl PE), 18-1-trans PE, 1-stearoyl-2-oleoyl-phosphatidyethanolamine (SOPE), hydrogenated soy phosphatidylcholine (HSPC), egg phosphatidylcholine (EPC), dioleoylphosphatidylserine (DOPS), sphingomyelin (SM), dimyristoyl phosphatidylcholine (DMPC), dimyristoyl phosphatidylglycerol (DMPG), distearoylphosphatidylglycerol (DSPG), dierucoylphosphatidylcholine (DEPC), palmitoyloleyolphosphatidylglycerol (POPG), dielaidoyl-phosphatidylethanolamine (DEPE), lecithin, phosphatidylethanolamine, lysolecithin, lysophosphatidylethanolamine, phosphatidylserine, phosphatidylinositol, sphingomyelin, egg sphingomyelin (ESM), cephalin, cardiolipin, phosphatidicacid, cerebrosides, dicetylphosphate, lysophosphatidylcholine, dilinoleoylphosphatidylcholine, or mixtures thereof. It is understood that other diacylphosphatidylcholine and diacylphosphatidylethanolamine phospholipids can also be used. The acyl groups in these lipids are preferably acyl groups derived from fatty acids having C10-C24 carbon chains, e.g., lauroyl, myristoyl, paimitoyl, stearoyl, or olcoyl. Additional exemplary lipids, in certain embodiments, include, without limitation, those described in Kim et al. (2020) dx.doi.org/10.1021/acs.nanolett.0c01386, incorporated herein by reference. Such lipids include, in some embodiments, plant lipids found to improve liver transfection with mRNA (e.g., DGTS).

[2314] Other examples of non-cationic lipids suitable for use in the lipid nanoparticles include, without limitation, nonphosphorous lipids such as, e.g., stearylamine, dodecylamine, hexadecylamine, acetyl palmitate, glycerol ricinoleate, hexadecyl stercate, isopropyl myristate, amphoteric acrylic polymers, triethanolamine-lauryl sulfate, alkyl-aryl sulfate polyethyloxylated fatty acid amides, dioctadecyl dimethyl ammonium bromide, ceramide, sphingomyelin, and the like. Other non-cationic lipids are described in WO2017/099823 or US patent publication US2018/0028664, the contents of which is incorporated herein by reference in their entirety.

[2315] In some embodiments, the non-cationic lipid is oleic acid or a compound of Formula I, II, or IV of US2018/0028664, incorporated herein by reference in its entirety. The non-cationic lipid can comprise, for example, 0-30% (mol) of the total lipid present in the lipid nanoparticle. In some embodiments, the non-cationic lipid content is 5-20% (mol) or 10-15% (mol) of the total lipid present in the lipid nanoparticle. In embodiments, the molar ratio of ionizable lipid to the neutral lipid ranges from about 2:1 to about 8:1 (e.g., about 2:1, 3:1, 4:1, 5:1, 6:1, 7:1, or 8:1).

[2316] In some embodiments, the lipid nanoparticles do not comprise any phospholipids.

[2317] In some aspects, the lipid nanoparticle can further comprise a component, such as a sterol, to provide membrane integrity. One exemplary sterol that can be used in the lipid nanoparticle is cholesterol and derivatives thereof. Non-limiting examples of cholesterol derivatives include polar analogues such as 5a-choiestanol, 53-coprostanol, choiesteryl-(2′-hydroxy)-ethyl ether, choiesteryl-(4′-hydroxy)-butyl ether, and 6-ketocholestanol; non-polar analogues such as 5a-cholestane, cholestenone, 5a-cholestanone, 5p-cholestanone, and cholesteryl decanoate; and mixtures thereof. In some embodiments, the cholesterol derivative is a polar analogue, e.g., choiesteryl-(4 '-hydroxy)-butyl ether. Exemplary cholesterol derivatives are described in PCT publication WO2009/127060 and US patent publication US2010/0130588, each of which is incorporated herein by reference in its entirety.

[2318] In some embodiments, the component providing membrane integrity, such as a sterol, can comprise 0-50% (mol) (e.g., 0-10%, 10-20%, 20-30%, 30-40%, or 40-50%) of the total lipid present in the lipid nanoparticle. In some embodiments, such a component is 20-50% (mol) 30-40% (mol) of the total lipid content of the lipid nanoparticle.

[2319] In some embodiments, the lipid nanoparticle can comprise a polyethylene glycol (PEG) or a conjugated lipid molecule. Generally, these are used to inhibit aggregation of lipid nanoparticles and/or provide steric stabilization. Exemplary conjugated lipids include, but are not limited to, PEG-lipid conjugates, polyoxazoline (POZ)-lipid conjugates, polyamide-lipid conjugates (such as ATTA-lipid conjugates), cationic-polymer lipid (CPL) conjugates, and mixtures thereof. In some embodiments, the conjugated lipid molecule is a PEG-lipid conjugate, for example, a (methoxy polyethylene glycol)-conjugated lipid.

[2320] Exemplary PEG-lipid conjugates include, but are not limited to, PEG-diacylglycerol (DAG) (such as 1-(monomethoxy-polyethyleneglycol)-2,3-dimyristoylglycerol (PEG-DMG)), PEG-dialkyloxypropyl (DAA), PEG-phospholipid, PEG-ceramide (Cer), a pegylated phosphatidylethanoloamine (PEG-PE), PEG succinate diacylglycerol (PEGS-DAG) (such as 4-O-(2′,3′-di (tetradecanoyloxy) propyl-1-O-(w-methoxy (polyethoxy)ethyl) butanedioate (PEG-S-DMG)), PEG dialkoxypropylcarbam, N-(carbonyl-methoxypolyethylene glycol 2000)-1,2-distearoyl-sn-glycero-3-phosphoethanolamine sodium salt, or a mixture thereof. Additional exemplary PEG-lipid conjugates are described, for example, in U.S. Pat. Nos. 5,885,613, 6,287,591, US2003/0077829, US2003/0077829, US2005/0175682, US2008/0020058, US2011/0117125, US2010/0130588, US2016/0376224, US2017/0119904, and US/099823, the contents of all of which are incorporated herein by reference in their entirety. In some embodiments, a PEG-lipid is a compound of Formula III, III-a-I, III-a-2, III-b-1, III-b-2, or V of US2018/0028664, the content of which is incorporated herein by reference in its entirety. In some embodiments, a PEG-lipid is of Formula II of US20150376115 or US2016/0376224, the content of both of which is incorporated herein by reference in its entirety. In some embodiments, the PEG-DAA conjugate can be, for example, PEG-dilauryloxypropyl, PEG-dimyristyloxypropyl, PEG-dipalmityloxypropyl, or PEG-distearyloxypropyl. The PEG-lipid can be one or more of PEG-DMG, PEG-dilaurylglycerol, PEG-dipalmitoylglycerol, PEG-disterylglycerol, PEG-dilaurylglycamide, PEG-dimyristylglycamide, PEG-dipalmitoylglycamide, PEG-disterylglycamide, PEG-cholesterol (1-[8′-(Cholest-5-en-3 [beta]-oxy) carboxamido-3′,6′-dioxaoctanyl] carbamoyl-[omega]-methyl-poly (ethylene glycol), PEG-DMB (3,4-Ditetradecoxylbenzyl-[omega]-methyl-poly (ethylene glycol) ether), and 1,2-dimyristoyl-sn-glycero-3-phosphoethanolamine-N-[methoxy (polyethylene glycol)-2000]. In some embodiments, the PEG-lipid comprises PEG-DMG, 1,2-dimyristoyl-sn-glycero-3-phosphoethanolamine-N-[methoxy (polyethylene glycol)-2000]. In some embodiments, the PEG-lipid comprises a structure selected from:

[chemical structure]

[2321] In some embodiments, lipids conjugated with a molecule other than a PEG can also be used in place of PEG-lipid. For example, polyoxazoline (POZ)-lipid conjugates, polyamide-lipid conjugates (such as ATTA-lipid conjugates), and cationic-polymer lipid (GPL) conjugates can be used in place of or in addition to the PEG-lipid.

[2322] Exemplary conjugated lipids, i.e., PEG-lipids, (POZ)-lipid conjugates, ATTA-lipid conjugates and cationic polymer-lipids are described in the PCT and LIS patent applications listed in Table 2 of WO2019051289A9, the contents of all of which are incorporated herein by reference in their entirety.

[2323] In some embodiments, the PEG or the conjugated lipid can comprise 0-20% (mol) of the total lipid present in the lipid nanoparticle. In some embodiments, PEG or the conjugated lipid content is 0.5-10% or 2-5% (mol) of the total lipid present in the lipid nanoparticle. Molar ratios of the ionizable lipid, non-cationic-lipid, sterol, and PEG/conjugated lipid can be varied as needed. For example, the lipid particle can comprise 30-70% ionizable lipid by mole or by total weight of the composition, 0-60% cholesterol by mole or by total weight of the composition, 0-30% non-cationic-lipid by mole or by total weight of the composition and 1-10% conjugated lipid by mole or by total weight of the composition. Preferably, the composition comprises 30-40% ionizable lipid by mole or by total weight of the composition, 40-50% cholesterol by mole or by total weight of the composition, and 10-20% non-cationic-lipid by mole or by total weight of the composition. In some other embodiments, the composition is 50-75% ionizable lipid by mole or by total weight of the composition, 20-40% cholesterol by mole or by total weight of the composition, and 5 to 10% non-cationic-lipid, by mole or by total weight of the composition and 1-10% conjugated lipid by mole or by total weight of the composition. The composition may contain 60-70% ionizable lipid by mole or by total weight of the composition, 25-35% cholesterol by mole or by total weight of the composition, and 5-10% non-cationic-lipid by mole or by total weight of the composition. The composition may also contain up to 90% ionizable lipid by mole or by total weight of the composition and 2 to 15% non-cationic lipid by mole or by total weight of the composition. The formulation may also be a lipid nanoparticle formulation, for example comprising 8-30% ionizable lipid by mole or by total weight of the composition, 5-30% non-cationic lipid by mole or by total weight of the composition, and 0-20% cholesterol by mole or by total weight of the composition; 4-25% ionizable lipid by mole or by total weight of the composition, 4-25% non-cationic lipid by mole or by total weight of the composition, 2 to 25% cholesterol by mole or by total weight of the composition, 10 to 35% conjugate lipid by mole or by total weight of the composition, and 5% cholesterol by mole or by total weight of the composition; or 2-30% ionizable lipid by mole or by total weight of the composition, 2-30% non-cationic lipid by mole or by total weight of the composition, 1 to 15% cholesterol by mole or by total weight of the composition, 2 to 35% conjugate lipid by mole or by total weight of the composition, and 1-20% cholesterol by mole or by total weight of the composition; or even up to 90% ionizable lipid by mole or by total weight of the composition and 2-10% non-cationic lipids by mole or by total weight of the composition, or even 100% cationic lipid by mole or by total weight of the composition. In some embodiments, the lipid particle formulation comprises ionizable lipid, phospholipid, cholesterol and a PEG-ylated lipid in a molar ratio of 50:10:38.5:1. 5. In some other embodiments, the lipid particle formulation comprises ionizable lipid, cholesterol and a PEG-ylated lipid in a molar ratio of 60:38.5:1.5.

[2324] In some embodiments, the lipid particle comprises ionizable lipid, non-cationic lipid (e.g. phospholipid), a sterol (e.g., cholesterol) and a PEG-ylated lipid, where the molar ratio of lipids ranges from 20 to 70 mole percent for the ionizable lipid, with a target of 40-60, the mole percent of non-cationic lipid ranges from 0 to 30, with a target of 0 to 15, the mole percent of sterol ranges from 20 to 70, with a target of 30 to 50, and the mole percent of PEG-ylated lipid ranges from 1 to 6, with a target of 2 to 5.

[2325] In some embodiments, the lipid particle comprises ionizable lipid/non-cationic-lipid/sterol/conjugated lipid at a molar ratio of 50:10:38.5:1.5.

[2326] In an aspect, the disclosure provides a lipid nanoparticle formulation comprising phospholipids, lecithin, phosphatidylcholine and phosphatidylethanolamine.

[2327] In some embodiments, one or more additional compounds can also be included. Those compounds can be administered separately, or the additional compounds can be included in the lipid nanoparticles of the invention. In other words, the lipid nanoparticles can contain other compounds in addition to the nucleic acid or at least a second nucleic acid, different than the first. Without limitations, other additional compounds can be selected from the group consisting of small or large organic or inorganic molecules, monosaccharides, disaccharides, trisaccharides, oligosaccharides, polysaccharides, peptides, proteins, peptide analogs and derivatives thereof, peptidomimetics, nucleic acids, nucleic acid analogs and derivatives, an extract made from biological materials, or any combinations thereof.

[2328] In some embodiments, LNPs are directed to specific tissues by the addition of targeting domains. For example, biological ligands may be displayed on the surface of LNPs to enhance interaction with cells displaying cognate receptors, thus driving association with and cargo delivery to tissues wherein cells express the receptor. In some embodiments, the biological ligand may be a ligand that drives delivery to the liver, e.g., LNPs that display GalNAc result in delivery of nucleic acid cargo to hepatocytes that display asialoglycoprotein receptor (ASGPR). The work of Akinc et al. Mol Ther 18 (7): 1357-1364 (2010) teaches the conjugation of a trivalent GalNAc ligand to a PEG-lipid (GalNAc-PEG-DSG) to yield LNPs dependent on ASGPR for observable LNP cargo effect (see, e.g., FIG. 6 of Akinc et al. 2010, supra). Other ligand-displaying LNP formulations, e.g., incorporating folate, transferrin, or antibodies, are discussed in WO2017223135, which is incorporated herein by reference in its entirety, in addition to the references used therein, namely Kolhatkar et al., Curr Drug Discov Technol. 2011 8:197-206; Musacchio and Torchilin, Front Biosci. 2011 16:1388-1412; Yu et al., Mol Membr Biol. 2010 27:286-298; Patil et al., Crit Rev Ther Drug Carrier Syst. 2008 25:1-61; Benoit et al., Biomacromolecules. 2011 12:2708-2714; Zhao et al., Expert Opin Drug Deliv. 2008 5:309-319; Akinc et al., Mol Ther. 2010 18:1357-1364; Srinivasan et al., Methods Mol Biol. 2012 820:105-116; Ben-Arie et al., Methods Mol Biol. 2012 757:497-507; Peer 2010 J Control Release. 20:63-68; Peer et al., Proc Natl Acad Sci USA. 2007 104:4095-4100; Kim et al., Methods Mol Biol. 2011 721:339-353; Subramanya et al., Mol Ther. 2010 18:2028-2037; Song et al., Nat Biotechnol. 2005 23:709-717; Peer et al., Science. 2008 319:627-630; and Peer and Lieberman, Gene Ther. 2011 18:1127-1133.

[2329] In some embodiments, LNPs are selected for tissue-specific activity by the addition of a Selective ORgan Targeting (SORT) molecule to a formulation comprising traditional components, such as ionizable cationic lipids, amphipathic phospholipids, cholesterol and poly (cthylene glycol) (PEG) lipids. The teachings of Cheng et al. Nat Nanotechnol 15 (4): 313-320 (2020) demonstrate that the addition of a supplemental “SORT” component precisely alters the in vivo RNA delivery profile and mediates tissue-specific (e.g., lungs, liver, spleen) gene delivery and editing as a function of the percentage and biophysical property of the SORT molecule.

[2330] In some embodiments, the LNPs comprise biodegradable, ionizable lipids. In some embodiments, the LNPs comprise (9Z.12Z)-3-((4,4-bis (octyloxy) butanoyl)oxy)-2-((((3-(diethylamino) propoxy) carbonyl)oxy)methyl) propyl octadeca-9,12-dienoate, also called 3-((4,4-bis (octyloxy) butanoyl)oxy)-2-((((3-(diethylamino) propoxy) carbonyl)oxy)methyl) propyl (9Z,12Z)-octadeca-9,12-dienoate) or another ionizable lipid. Sec, e.g. lipids of WO2019/067992, WO/2017/173054, WO2015/095340, and WO2014/136086, as well as references provided therein. In some embodiments, the term cationic and ionizable in the context of LNP lipids is interchangeable, e.g., wherein ionizable lipids are cationic depending on the pH.

[2331] In some embodiments, the average LNP diameter of the LNP formulation may be between 10s of nm and 100s of nm, e.g., measured by dynamic light scattering (DLS). In some embodiments, the average LNP diameter of the LNP formulation may be from about 40 nm to about 150 nm, such as about 40 nm, 45 nm, 50 nm, 55 nm, 60 nm, 65 nm, 70 nm, 75 nm, 80 nm, 85 nm, 90 nm, 95 nm, 100 nm, 105 nm, 110 nm, 115 nm, 120 nm, 125 nm, 130 nm, 135 nm, 140 nm, 145 nm, or 150 nm. In some embodiments, the average LNP diameter of the LNP formulation may be from about 50 nm to about 100 nm, from about 50 nm to about 90 nm, from about 50 nm to about 80 nm, from about 50 nm to about 70 nm, from about 50 nm to about 60 nm, from about 60 nm to about 100 nm, from about 60 nm to about 90 nm, from about 60 nm to about 80 nm, from about 60 nm to about 70 nm, from about 70 nm to about 100 nm, from about 70 nm to about 90 nm, from about 70 nm to about 80 nm, from about 80 nm to about 100 nm, from about 80 nm to about 90 nm, or from about 90 nm to about 100 nm. In some embodiments, the average LNP diameter of the LNP formulation may be from about 70 nm to about 100 nm. In a particular embodiment, the average LNP diameter of the LNP formulation may be about 80 nm. In some embodiments, the average LNP diameter of the LNP formulation may be about 100 nm. In some embodiments, the average LNP diameter of the LNP formulation ranges from about 1 mm to about 500 mm, from about 5 mm to about 200 mm, from about 10 mm to about 100 mm, from about 20 mm to about 80 mm, from about 25 mm to about 60 mm, from about 30 mm to about 55 mm, from about 35 mm to about 50 mm, or from about 38 mm to about 42 mm.

[2332] A LNP may, in some instances, be relatively homogenous. A polydispersity index may be used to indicate the homogeneity of a LNP, e.g., the particle size distribution of the lipid nanoparticles. A small (e.g., less than 0.3) polydispersity index generally indicates a narrow particle size distribution. A LNP may have a polydispersity index from about 0 to about 0.25, such as 0.01, 0.02, 0.03, 0.04, 0.05, 0.06, 0.07, 0.08, 0.09, 0.10, 0.11, 0.12, 0.13, 0.14, 0.15, 0.16, 0.17, 0.18, 0.19, 0.20, 0.21, 0.22, 0.23, 0.24, or 0.25. In some embodiments, the polydispersity index of a LNP may be from about 0.10 to about 0.20.

[2333] The zeta potential of a LNP may be used to indicate the electrokinetic potential of the composition. In some embodiments, the zeta potential may describe the surface charge of an LNP. Lipid nanoparticles with relatively low charges, positive or negative, are generally desirable, as more highly charged species may interact undesirably with cells, tissues, and other elements in the body. In some embodiments, the zeta potential of a LNP may be from about-10 mV to about +20 mV, from about-10 mV to about +15 mV, from about-10 mV to about +10 mV, from about-10 mV to about +5 mV, from about-10 mV to about 0 mV, from about-10 mV to about-5 mV, from about-5 mV to about +20 mV, from about-5 mV to about +15 mV, from about-5 mV to about +10 mV, from about-5 mV to about +5 mV, from about-5 mV to about 0 mV, from about 0 mV to about +20 mV, from about 0 mV to about +15 mV, from about 0 mV to about +10 mV, from about 0 mV to about +5 mV, from about +5 mV to about +20 mV, from about +5 mV to about +15 mV, or from about +5 mV to about +10 mV.

[2334] The efficiency of encapsulation of a TREM describes the amount of TREM that is encapsulated or otherwise associated with a LNP after preparation, relative to the initial amount provided. The encapsulation efficiency is desirably high (e.g., close to 100%). The encapsulation efficiency may be measured, for example, by comparing the amount of TREM in a solution containing the lipid nanoparticle before and after breaking up the lipid nanoparticle with one or more organic solvents or detergents. An anion exchange resin may be used to measure the amount of free protein or nucleic acid (e.g., RNA) in a solution. Fluorescence may be used to measure the amount of free TREM in a solution. For the lipid nanoparticles described herein, the encapsulation efficiency of a TREM may be at least 50%, for example 50%, 55%, 60%, 65%, 70%, 75%, 80%, 85%, 90%, 91%, 92%, 93%, 94%, 95%, 96%, 97%, 98%, 99%, or 100%. In some embodiments, the encapsulation efficiency may be at least 80%. In some embodiments, the encapsulation efficiency may be at least 90%. In some embodiments, the encapsulation efficiency may be at least 95%.

[2335] A LNP may optionally comprise one or more coatings. In some embodiments, a LNP may be formulated in a capsule, film, or table having a coating. A capsule, film, or tablet including a composition described herein may have any useful size, tensile strength, hardness or density.

[2336] Additional exemplary lipids, formulations, methods, and characterization of LNPs are taught by WO2020061457, which is incorporated herein by reference in its entirety.

[2337] In some embodiments, in vitro or ex vivo cell lipofections are performed using Lipofectamine MessengerMax (Thermo Fisher) or TransIT-mRNA Transfection Reagent (Mirus Bio). In certain embodiments, LNPs are formulated using the GenVoy_ILM ionizable lipid mix (Precision NanoSystems). In certain embodiments, LNPs are formulated using 2,2-dilinoleyl-4-dimethylaminoethyl-[1,3]-dioxolane (DLin-KC2-DMA) or dilinoleylmethyl-4-dimethylaminobutyrate (DLin-MC3-DMA or MC3), the formulation and in vivo use of which are taught in Jayaraman et al. Angew Chem Int Ed Engl 51 (34): 8529-8533 (2012), incorporated herein by reference in its entirety.

[2338] LNP formulations optimized for the delivery of CRISPR-Cas systems, e.g., Cas9-gRNA RNP, gRNA, Cas9 mRNA, are described in WO2019067992 and WO2019067910, both incorporated by reference.

[2339] Additional specific LNP formulations useful for delivery of nucleic acids are described in U.S. Pat. Nos. 8,158,601 and 8,168,775, both incorporated by reference, which include formulations used in patisiran, sold under the name ONPATTRO.

[2340] Exosomes can also be used as drug delivery vehicles for the TREM, TREM core fragment, TREM fragment, or TREM compositions or pharmaceutical TREM composition described herein. For a review, see Ha et al. July 2016. Acta Pharmaceutica Sinica B. Volume 6, Issue 4, Pages 287-296; https://doi.org/10.1016/j.apsb.2016.02.001.

[2341] Ex vivo differentiated red blood cells can also be used as a carrier for a TREM, TREM core fragment, TREM fragment, or TREM composition, or pharmaceutical TREM composition described herein. See, e.g., WO2015073587; WO2017123646; WO2017123644; WO2018102740; wO2016183482; WO2015153102; WO2018151829; WO2018009838; Shi et al. 2014. Proc Natl Acad Sci USA. 111 (28): 10131-10136; U.S. Pat. No. 9,644,180; Huang et al. 2017. Nature Communications 8:423; Shi et al. 2014. Proc Natl Acad Sci USA. 111 (28): 10131-10136.

[2342] Fusosome compositions, e.g., as described in WO2018208728, can also be used as carriers to deliver the TREM, TREM core fragment, TREM fragment, or TREM composition, or pharmaceutical TREM composition described herein.

[2343] Virosomes and virus-like particles (VLPs) can also be used as carriers to deliver a TREM, TREM core fragment, TREM fragment, or TREM composition, or pharmaceutical TREM composition described herein to targeted cells.

[2344] Plant nanovesicles, e.g., as described in WO2011097480A1, WO2013070324A1, or WO2017004526A1 can also be used as carriers to deliver the TREM, TREM core fragment, TREM fragment, or TREM composition, or pharmaceutical TREM composition described herein.

Delivery without a Carrier

[2345] A TREM, a TREM core fragment or a TREM fragment, a TREM composition or a pharmaceutical TREM composition described herein can be administered to a cell without a carrier, e.g., via naked delivery of the TREM, a TREM core fragment or a TREM fragment, a TREM composition or a pharmaceutical TREM composition.

[2346] In some embodiments, naked delivery as used herein refers to delivery without a carrier. In some embodiments, delivery without a carrier, e.g., naked delivery, comprises delivery with a moiety, e.g., a targeting peptide.

[2347] In some embodiments, a TREM, a TREM core fragment or a TREM fragment, or TREM composition, or pharmaceutical TREM composition described herein is delivered to a cell without a carrier, e.g., via naked delivery. In some embodiments, the delivery without a carrier, e.g., naked delivery, comprises delivery with a moiety, e.g., a targeting peptide.

### Use of TREMs

[2348] A TREM composition (e.g., a pharmaceutical TREM composition described herein) can modulate a function in a cell, tissue or subject. In embodiments, a TREM composition (e.g., a pharmaceutical TREM composition) described herein is contacted with a cell or tissue, or administered to a subject in need thereof, in an amount and for a time sufficient to modulate (increase or decrease) one or more of the following parameters: adaptor function (e.g., cognate or non-cognate adaptor function), e.g., the rate, efficiency, robustness, and/or specificity of initiation or elongation of a polypeptide chain; ribosome binding and/or occupancy; regulatory function (e.g., gene silencing or signaling); cell fate; mRNA stability; protein stability; protein transduction; protein compartmentalization. A parameter may be modulated, e.g., by at least 5% (e.g., at least 10%, 15%, 20%, 25%, 30%, 40%, 50%, 60%, 70%, 80%, 90%, 100%, 150%, 200% or more) compared to a reference tissue, cell or subject (e.g., a healthy, wild-type or control cell, tissue or subject).

[2349] All references and publications cited herein are hereby incorporated by reference.

[2350] The following examples are provided to further illustrate some embodiments of the present invention, but are not intended to limit the scope of the invention; it will be understood by their exemplary nature that other procedures, methodologies, or techniques known to those skilled in the art may alternatively be used.

### EXAMPLES

TABLE of
Contents for Examples

| | |
|---|---|
| Example 1 | Synthesis of modified TREMs |
| Example 2 | HPLC and MS analysis of modified TREMs |
| Example 3 | Analysis of modified TREMs via anion-exchange HPLC |
| Example 4 | Analysis of TREMs via PAGE Purification and Analysis |
| Example 5 | Deprotection of synthesized TREM |
| Example 6 | Characterization of chemically modified TREMs for |
| | readthrough of a premature termination codon (PTC) in a |
| | reporter protein |
| Example 7 | Characterization of chemically modified TREMs for |
| | readthrough of a premature termination codon (PTC) in a |
| | disease reporter cell line |
| Example 8 | Correction of a missense mutation in an ORF with |
| | administration of a TREM |
| Example 9 | Evaluation of protein expression levels of SMC-containing |
| | ORF with administration of a TREM |
| Example 10 | Modulation of translation rate of SMC-containing ORF |
| | with TREM administration |
| Example 11 | Rescue of full-length GLA expression and activity in Fabry |
| | patient fibroblasts upon administration of an exemplary |
| | TREM |
| Example 12 | In Vivo PTC Readthrough and Target Engagement of |
| | TREM by Hydrodynamic Gene Delivery |
| Example 13 | In Vivo Administration of a Lipid Nanoparticle TREM |
| | Formulation |

### Example 1: Synthesis of Modified TREMs

[2351] Generally, TREM molecules (e.g., modified TREMs) may be chemically synthesized and purified by HPLC according to standard solid phase synthesis methods using phosphoramidite chemistry. (see, e.g., Scaringe S. et al. (2004) Curr Protoc Nucleic Acid Chem, 2.10.1-2.10.16; Usman N. et al. (1987) J. Am. Chem. Soc, 109, 7845-7854). Individually modified TREM molecules containing one or more 2′-methoxy (2′OMe), 2′fluoro (2′F), 2′-methoxyethyl (2′-MOE), or phosphorothioate (PS) modifications were prepared using either TREM-Arg-TGA, TREM-Ser-TAG, or TREM-Gln-TAA sequences as a framework according to phosphoramidite technology on solid phase used in oligonucleotide synthesis. For clarity, the arginine non-cognate TREM molecule named TREM-Arg-TGA contains the sequence of ARG-UCU-TREM body but with the anticodon sequence corresponding to UCA instead of UCU (i.e., SEQ ID NO: 622). Simlarly, a serine non-cognate TREM molecule named TREM-Ser-TAG contains the sequence of SER-GCU-TREM body but with the anticodon sequence corresponding to CUA instead of GCU (i.e., SEQ ID NO: 623). A glutamine non-cognate TREM molecule named TREM-Gln-TAA contains the sequence of GLN-CUG-TREM body but with the anticodon sequence corresponding to UUA instead of CUG (i.e., SEQ ID NO: 624).

[2352] To make the 2′OMe modified TREMs, the following 2′-O-methyl phosphoramidites were used: (5′-O-dimethoxytrityl-N6-(benzoyl)-2′-O-methyl-adenosine-3′-O-(2-cyanocthyl-N,N-diisopropy-lamino) phosphoramidite, 5′-O-dimethoxy-trityl-N4-(acetyl)-2′-O-methyl-cytidine-3′-O-(2-cyanocthyl-N,N-diisopropyl-amino)phosphoramidite, (5′-O-dimethoxytrityl-N2-(isobutyryl)-2′-O-methyl-guanosine-3′-O-(2-cyano-ethyl-N,N-diisopropylamino)-phosphoramidite, and 5′-O-dimethoxy-trityl-2′-O-methyluridine-3′-O-(2-cyanoethyl-N,N-diisopropylamino) phosphoramidite. To make the 2′-deoxy and 2′-F modified TREMs, analogous 2′-deoxy and 2′-fluoro-phosphoramidites with the same protecting groups as the 2′-O-methyl RNA amidites were used. To make the 2′-MOE modified TREMs, the following 2′-MOE-phosphoramidites were used: 5′-O-(4,4′-Dimethoxytrityl)-2′-O-methoxyethyl-N6-benzoyl-adenosine-3′-O-[(2-cyanocthyl)-(N,N-diisopropyl)]-phosphoramidite, 5′-O-(4,4′-Dimethoxytrityl)-2′-O-methoxyethyl-5-methyl-N4-benzoyl-cytidine-3′-O-[(2-cyanocthyl)-(N,N-diisopropyl)]-phosphoramidite, 5′-O-(4,4′-Dimethoxytrityl)-2′-O-methoxyethyl-N2-isobutyryl-guanosine-3′-O-[(2-cyanocthyl)-(N,N-diisopropyl)]-phosphoramidite, 5′-O-(4,4′-Dimethoxytrityl)-2′-O-methoxyethyl-5-methyl-uridine-3′-O-[(2-cyanoethyl)-(N,N-diisopropyl)]-phosphoramidite.

[2353] During the oligonucleotide synthesis via this phosphoramidites approach, the phosphorothioate was introduced by oxidizing the phosphite triester using a sulfur transfer reagent, such as tetraethylthiuram disulfide (TETD), bis (O,O-diisopropoxy phosphinothioyl) disulfide (Stec's reagent), 3H-1,2-benzodithiol-3-one-1,1,-dioxide (Beaucage reagent), phenylacetyl disulfide (PADS), 3-ethoxy-1,2,4-dithiazoline-5-one (EDITH), 1,2-dithiazole-5-thione (xanthane hydride or ADTT), 3-((dimethylamino-methylidene)amino)-3H-1,2,4-dithiazole-3-thione (DDTT), dimethylthiuram disulfide (DTD), 3-phenyl-1,2,4-dithiazoline-5-one (PolyOrg Sulfa or POS).

[2354] FIG. 2 describes a series of singly and multiply modified TREMs synthesized according to this procedure. The sequences of each of these TREMs are provided in the table, wherein r: ribonucleotide; m: 2′-OMe; *: PS linkage; f: 2′-fluoro; moe: 2′-moc; d: deoxyribonucleotide; 5MeC: 5-methylcytosine. Thus, for example, mA represents 2′-O-methyl adenosine, moe5MeC represents 2′-MOE nucleotide with 5-methylcytosine nucleobase, and dA represents an adenosine deoxyribonucleotide.

### Example 2: HPLC and MS Analysis of Modified TREMs

[2355] Chemically modified TREM molecules may be analyzed by HPLC, for example, to evaluate the purity and homogeneity of the compositions. A Waters Aquity UPLC system using a Waters BEH C18 column (2.1 mm×50 mm×1.7 μm) may be used for this analysis. Samples may be prepared by dissolving 0.5 nmol of the TREM in 75 μL of water and injecting 2 μL of the solution. The buffers used may be 50 mM dimethylhexylammonium acetate with 10% CH₃CN (acetonitrile) as buffer A and 50 mM dimethylhexylammonium acetate with 75% CH₃CN as buffer B (gradient 25-75% buffer B over 5 mins), with a flow rate of 0.5 mL/min at 60° C. ESI-LCMS data for the chemically modified TREMs may be acquired on a Thermo Ultimate 3000-LTQ-XL mass spectrometer.

[2356] FIG. 2 describe a series of singly and multiply modified TREMs synthesized according to the protocol outlined in Example 1. The calculated and detected molecular weights for each sequence were determined as outlined herein.

### Example 3: Analysis of modified TREMs via anion-exchange HPLC

[2357] This example describes the quality control of a synthesized TREM via anion-exchange HPLC. Using the Dionex DNA-Pac-PA-100 column, a gradient is employed using HPLC buffer A and HPLC buffer B. 0.5 ODUs of a sample that has been dissolved in H20 or Tris buffer, pH 7.5 is injected onto the gradient. The gradient employed is based on oligonucleotide length and can be applied according to Table 13. The parameters provided in Table 14 can be used to program a linear gradient on the HPLC analyzer.

TABLE 13
Oligonucleotide length and gradient percentages

| Length | Gradient |
|---|---|
| (bases) | (% B) |
| 0-5 | 0-30 |
| 6-10 | 10-40 |
| 11-16 | 20-50 |
| 17-32 | 30-60 |
| 33-50 | 40-70 |
| >50 | 50-80 |

TABLE 14
Parameters for a linear gradient on HPLC analyzer

| Time | Flow | % Buffer | % Buffer |
|---|---|---|---|
| (min) | (mL/min) | A | B |
| 0 | 1.5 | 100 | 0 |
| 1 | 1.5 | 100 | 0 |
| 3 | 1.5 | 70a | 30a |
| 15 | 1.5 | 40a | 60a |
| 15.5 | 2.5 | 0 | 100 |
| 17 | 2.5 | 0 | 100 |
| 17.25 | 2.5 | 100 | 0 |
| 23 | 2.5 | 100 | 0 |
| s23.1 | 1.5 | 100 | 0 |
| 24 | 1.5 | 100 | 0 |
| 25 | 0.1 | 100 | 0 |

### Example 4: Analysis of TREMs via PAGE Purification and Analysis

[2358] This example describes the quality control of a synthesized TREM via PAGE Purification and Analysis. Gel purification and analysis of 2′-ACE protected RNA follows standard protocols for denaturing PAGE (Ellington and Pollard (1998) In Current Protocols in Molecular Biology, Chanda, V). Briefly, the 2′-ACE protected oligo is resuspended in 200 mL of gel loading buffer. Invitrogen™ NuPAGE™ 4-12% Bis-Tris Gels or similar gel is prepared in gel apparatus. Samples are loaded and gel ran at 50-120 W, maintaining the apparatus at 40° C. When complete, the gel is exposed to ultraviolet (UV) light at 254 nm to visualize the purity of the RNA using UV shadowing. If necessary, the desired gel band is excised with a clean razor blade. The gel slice is crushed and 0.3M NaOAc elution buffer is added to the gel particles, and soaked overnight. The mixture is decanted and filtered through a Sephadex column such as Nap-10 or Nap-25.

### Example 5: Deprotection of Synthesized TREM

[2359] This example describes the deprotection of a TREM made according to an in vitro synthesis method. The 2′-protecting groups are removed using 100 mM acetic acid, pH 3.8. The formic acid and ethylene glycol byproducts are removed by incubating at 60° C. for 30 min followed by lyophilization or SpeedVac-ing to dryness. After this final deprotection step, the oligonucleotides are ready for use.

### Example 6. Characterization of Chemically Modified TREMs for Readthrough of a Premature Termination Codon (PTC) in a Reporter Protein

[2360] This example describes an assay to test the ability of a non-cognate chemically modified TREM to readthrough a PTC in a cell line expressing a reporter protein having a PTC. This protocol describes analysis of chemically modified arginine, serine, and glutamine non-cognate TREM (i.e., Arg-TGA, Ser-TAG, Gln-TAA, Lys-TAA, Leu-TGA, Trp-TAG, Gln-TAG, Ser-TAA, Ser-TGA, Tyr-TAA, Tyr-TAG), though a non-cognate TREM specifying any one of the other amino acids can also be used.

[2361] A cell line engineered to stably express the NanoLuc reporter construct containing a premature termination codon (PTC) may be generated using the FlpIn and/or JumpIN cell system (ThermoFisher Scientific, USA) according to the manufacturer's instructions. The NanoLuc reporter can also be modified with a destabilizing PEST domain at its C-terminus to reduce the protein half-life. Delivery of the chemically modified TREMs into the NanoLuc reporter cells is carried out via a reverse transfection reaction using lipofectamine RNAiMAX (ThermoFisher Scientific, USA) according to manufacturer instructions. Briefly, 5 μL of a 2.5 uM solution of chemically modified TREM sample are diluted in a 20 uL RNAiMAX/OptiMEM mixture. After 30 min gentle mixing at room temperature, the 25 uL TREM/transfection mixture is added to a 96-well plate and kept still for 20-30 min before adding the cells stably expressing the NanoLuc reporter construct containing a PTC. The NanoLuc reporter cells are harvested and diluted to 4x 10⁵ cells/mL in complete growth medium, and 100 μL of the diluted cell suspension is added and mixed to the plate containing the TREM.

[2362] To monitor the efficacy of the chemically modified TREM to read through the PTC in the reporter construct at 24 or 48 hours after TREM delivery into cells, a NanoGlo bioluminescent assay (Promega, USA) may be performed according to manufacturer instruction. Briefly, for cells that are to be assayed after 48 hours, 100 uL complete growth medium is added to the 96-well plate 24 hours post-transfection to dilute the transfection reagent for cell health. At the time of harvest, either 24- or 48-hours post-transfection, cell media is replaced and allowed to equilibrate to room temperature. NanoGlo reagent is prepared by mixing the buffer with substrate in a 50:1 ratio. 50 μL of mixed NanoGlo reagent is added to the 96-well plate and mixed on the shaker at 600 rpm for 10 min. Then the plate is centrifuged at 1000g for 2 min, followed by a 5 min incubation step at room temperature before measuring sample bioluminescence. As a positive control, a host cell expressing the NanoLuc reporter construct without a PTC is used. As a negative control, a host cell expressing the NanoLuc reporter construct with a PTC is used, but no TREM is transfected. The efficacyof the chemically modified TREMs is measured as a ratio of the NanoLuc luminescence in the experimental sample to the NanoLuc luminescence of the positive control or as a ratio of the NanoLuc luminescence in the experimental sample to the NanoLuc luminescence of the negative control. It is expected that if the sample TREM is functional, it may be able to read-through the stop mutation in the NanoLuc reporter and produce a luminescent reading higher than the luminescent reading measured in the negative control. If the sample TREM is not functional, the stop mutation is not rescued, and luminescence less or equal to the negative control is detected.

[2363] The impacts of chemical modifications were evaluated in singly and multiply modified TREM sequences and are summarized in FIG. 2. In this figure, the TREMs are annotated as follows: r: ribonucleotide; m: 2′-OMe; *: PS linkage; f: 2′-fluoro; moc: 2′-moc; d: deoxyribonucleotide; 5MeC: 5-methylcytosine. Thus, for example, mA represents 2′-O-methyl adenosine, moc5MeC represents 2′-MOE nucleotide with 5-methylcytosine nucleobase, and dA represents an adenosine deoxyribonucleotide.

[2364] FIG. 2 also summarizes the results of the activity screen in column “A” for measurements made using NanoLuc reporter cells at 48 hours post-transfection, which reported as log 2 fold changes compared with the appropriate unmodified TREM, wherein “1” indicates less than a 1 log 2 fold change; “2” indicates greater than or equal to 1 and less than 3.32 log 2 fold change; and “3” indicates greater than or equal to 3.32 log 2 fold change. The results show that certain modifications were tolerated at many positions, but particular sites were sensitive to modification or exhibited improved activity when modified

### Example 7: Characterization of Chemically Modified TREMs for Readthrough of a Premature Termination Codon (PTC) in a Disease Reporter Cell Line

[2365] This example describes an assay to test the ability of an exemplary TREM to readthrough a PTC in a cell line expressing a disease reporter protein bearing the PTC.

### Host Cell Modification

[2366] A cell line engineered to stably express a HaloTag and HiBiT-tagged disease reporter construct containing a premature termination codon (PTC), such as Factor IX at position 298 (FIXR298X), Factor IX at position 29 (FIXR29X), Factor IX at position 44 (FIXQ++X), Tripeptidyl-peptidase 1 at position 208 (TPP1^{R208X}) , Protocadherin Related 15 at position 245 (PCDH15^{R245X}), or Rhodopsin at position 334 (Rho^{S334X}) was generated using the Jump-In system according to manufacturer's instructions. Briefly, Jump-In GripTite HEK293 (Thermo Scientific A14150) cells were co-transfected with an expression vector containing the disease reporter, such as pJTI-R⁴-DEST-CMV—FIX-R298X-HaloTag-HiBiT-pA for FIX^{R298X} to make the Factor IX disease reporter expressing cell line, and a pJTI-R4-Int PhiC31 integrase expression vector using Lipofectamine2000 according to manufacturer's instructions. After 24 hours, the media was replaced with fresh media. The next day, the cells were re-seeded at 50% confluency and selected with 10 ug/mL Blasticidin and 600 ug/mL G418 for 7 days with media change every 2 days. The remaining cells were expanded and tested for reporter construct expression.

### Translation Suppression Assay

[2367] Exemplary TREMs were synthesized and characterized as described herein, then transfected into cells. Forty-eight hours after TREM delivery into cells, conditioned media was collected, fresh media was added to the cells and allowed to equilibrate to room temperature. To measure the efficacy of arginine TREMs in PTC readthrough, full-length HiBiT-tagged disease reporter protein was assayed in both cells, and 48-hour conditioned media. Briefly, reconstituted Nano-Glo® HiBiT Lytic Reagent was added to both cells containing fresh media and 48-hour conditioned media at a 1:1 v/v ratio, mixed on an orbital shaker at 500 rpm for 10 minutes, and incubated at room temperature for 10 minutes. The HiBiT-tagged disease reporter activity is measured by reading the luminescence in a plate reader. The results of this experiment in the three HiBiT-tagged disease reporter constructs is shown below in Table 21. In this table, the results for each TREM tested are reported as log 2 fold changes compared with the appropriate unmodified TREM (TREM NO. 2309), wherein “1” indicates less than a −0.05 log 2 fold change; “2” indicates greater than or equal to −0.05 and less than 0.55 log 2 fold change; and “3” indicates greater than or equal to 0.55 log 2 fold change.

TABLE 21

| | | TPP1 | PCDH15 | FIX |
|---|---|---|---|---|
| TREM | SEQ ID | (R208X) | (R245X) | (R298X) |
| NO. | NO. | 100 nM | 100 nM | 100 nM |
| 4 | 625 | 3 | 3 | 3 |
| 7 | 628 | 3 | 3 | 3 |
| 24 | 645 | 3 | 3 | 3 |
| 29 | 650 | 3 | 3 | 3 |
| 47 | 668 | 3 | 3 | 3 |
| 61 | 682 | 3 | 3 | 3 |
| 77 | 698 | 3 | 3 | 3 |
| 78 | 699 | 3 | 3 | 3 |
| 84 | 705 | 3 | 3 | 3 |
| 96 | 717 | 3 | 3 | 3 |
| 103 | 724 | 3 | 3 | 3 |
| 124 | 745 | 3 | 3 | 3 |
| 125 | 746 | 3 | 3 | 3 |
| 127 | 748 | 3 | 3 | 3 |
| 138 | 759 | 3 | 3 | 3 |
| 139 | 760 | 3 | 3 | 3 |
| 143 | 764 | 3 | 3 | 3 |
| 146 | 767 | 3 | 3 | 3 |
| 148 | 769 | 3 | 3 | 3 |
| 149 | 770 | 3 | 3 | 3 |
| 168 | 789 | 3 | 3 | 3 |
| 169 | 790 | 3 | 3 | 3 |
| 173 | 794 | 3 | 3 | 3 |
| 174 | 795 | 3 | 3 | 3 |
| 175 | 796 | 3 | 3 | 3 |
| 176 | 797 | 3 | 3 | 3 |
| 177 | 798 | 2 | 2 | 2 |
| 180 | 801 | 3 | 3 | 3 |
| 186 | 807 | 3 | 3 | 3 |
| 187 | 808 | 2 | 2 | 2 |
| 188 | 809 | 2 | 3 | 3 |
| 203 | 824 | 3 | 3 | 3 |
| 204 | 825 | 3 | 3 | 3 |
| 225 | 846 | 3 | 3 | 3 |
| 234 | 855 | 3 | 3 | 3 |
| 256 | 877 | 3 | 3 | 3 |
| 312 | 933 | 2 | 2 | 2 |
| 313 | 934 | 3 | 3 | 3 |
| 314 | 935 | 3 | 3 | 3 |
| 315 | 936 | 3 | 3 | 3 |
| 316 | 937 | 3 | 3 | 3 |
| 317 | 938 | 3 | 3 | 3 |
| 341 | 962 | 3 | 3 | 3 |
| 345 | 966 | 3 | 3 | 3 |
| 346 | 967 | 3 | 3 | 3 |
| 349 | 970 | 3 | 3 | 3 |
| 350 | 971 | 3 | 3 | 3 |
| 356 | 977 | 3 | 3 | 3 |
| 2309 | 2930 | 3 | 3 | 3 |
| 2355 | 2976 | 2 | 2 | 2 |
| 2359 | 2980 | 3 | 3 | 3 |
| 2368 | 2989 | 2 | 2 | 2 |
| 2370 | 2991 | 2 | 2 | 2 |
| 2377 | 2998 | 3 | 3 | 3 |
| 2381 | 3002 | 3 | 3 | 3 |
| 2393 | 3014 | 3 | 3 | 3 |
| 2396 | 3017 | 2 | 2 | 2 |
| 2397 | 3018 | 3 | 3 | 3 |
| 2407 | 3028 | 3 | 3 | 3 |
| 2410 | 3031 | 3 | 3 | 3 |
| 2411 | 3032 | 3 | 3 | 3 |
| 2412 | 3033 | 3 | 3 | 3 |
| 2413 | 3034 | 2 | 2 | 2 |
| 2417 | 3038 | 2 | 2 | 3 |
| 2419 | 3040 | 3 | 3 | 3 |
| 2421 | 3042 | 3 | 3 | 3 |
| 2429 | 3050 | 2 | 3 | 3 |
| 2442 | 3063 | 3 | 3 | 3 |
| 2422 | 3043 | 3 | 3 | 3 |
| 2476 | 3097 | 3 | 3 | 3 |
| 2524 | 3145 | 3 | 3 | 3 |
| 2536 | 3157 | 3 | 3 | 3 |
| 2538 | 3159 | 3 | 3 | 3 |
| 2540 | 3161 | 3 | 3 | 3 |
| 2541 | 3162 | 3 | 3 | 3 |
| 2565 | 3186 | 3 | 3 | 3 |
| 2566 | 3187 | 3 | 3 | 3 |
| 2585 | 3206 | 3 | 3 | 3 |
| 2592 | 3213 | 2 | 2 | 2 |
| 2594 | 3215 | 2 | 3 | 3 |
| 2596 | 3217 | 3 | 3 | 3 |
| 2621 | 3242 | 3 | 3 | 3 |
| 2630 | 3251 | 3 | 3 | 3 |
| 2632 | 3253 | 3 | 3 | 3 |
| 2637 | 3258 | 3 | 3 | 3 |
| 2642 | 3263 | 2 | 2 | 2 |
| 2650 | 3271 | 3 | 3 | 3 |
| 2657 | 3278 | 3 | 3 | 3 |
| 2664 | 3285 | 2 | 2 | 2 |

Additional testing was carried on a larger panel of TREMs with the results summarized in FIG. 2. Each TREM, TREM core fragment, and TREM fragment was screened against three disease reporter constructions, each of which contained a premature termination codon (PTC): Factor IX-R²⁹TGA (B), Factor IX-Q44TAG (C), and RHO-S334TAA (D). The results from these screens are reported to the same scheme described above for Table 21, except only reporting results from the cell line corresponding to the type of stop codon designed to be recognized by the TREM.

### Example 8: Correction of a Missense Mutation in an ORF with Administration of a TREM

[2368] This example describes the administration of a TREM to correct a missense mutation. In this example, a TREM translates a reporter with a missense mutation into a wild type (WT) protein by incorporation of the WT amino acid (at the missense position) in the protein.

### Host Cell Modification

[2369] A cell line stably expressing a GFP reporter construct containing a missense mutation, for example T2031 or E222G, which prevent GFP excitation at the 470 nm and 390 nm wavelengths, is generated using the FlpIn system according to manufacturer's instructions. Briefly, HEK293T (293T ATCC® CRL-3216) cells are co-transfected with an expression vector containing a GFP reporter with a missense mutation, such as pcDNA5/FRT-NanoLuc-TAA and a pOG44 Flp-Recombinase expression vector using Lipofectamine2000 according to manufacturer's instructions. After 24 hours, the media is replaced with fresh media. The next day, the cells are split 1:2 and selected with 100 ug/mL Hygromycin for 5 days. The remaining cells are expanded and tested for reporter construct expression.

### Synthesis and Preparation of TREM

[2370] The TREM is synthesized as described in Example 1 and quality control methods as described in Examples 2-5 are performed. To ensure proper folding, the TREM is heated at 85° C. for 2 minutes and then snap cooled at 4° C. for 5 minutes.

Transfection of Non-Cognate TREM into Host Cells

[2371] To deliver the TREM to mammalian cells, 100 nM of TREM is transfected into cells expressing the ORF having a missense mutation using lipofectamine 2000 reagents according to the manufacturer's instructions. After 6-18 hours, the transfection media is removed and replaced with fresh complete media.

### Missense Mutation Correction Assay

[2372] To monitor the efficacy of the TREM to correct the missense mutation in the reporter construct, 24-48 hours after TREM transfection, cell media is replaced, and cell fluorescence is measured. As a negative control, no TREM is transfected in the cells and as a positive control, cells expressing WT GFP are used for this assay. If the TREM is functional, it is expected that the GFP protein produced fluoresces when illuminated with a 390 nm excitation wavelength using a fluorimeter, as observed in the positive control. If the TREM is not functional, the GFP protein produced fluoresces only when excited with a 470 nm wavelength, as is observed in the negative control.

### Example 9: Evaluation of Protein Expression Levels of SMC-Containing ORF with Administration of a TREM

[2373] This example describes administration of a TREM to alter expression levels of an SMC-containing ORF.

[2374] To create a system in which to study the effects of TREM administration on protein expression levels of an SMC-containing protein, in this example, from the PNPL3A gene coding for adiponutrin, a plasmid containing the PNPL3A rs738408 ORF sequence is transfected in the normal human hepatocyte cell line THLE-3, edited by CRISPR/Cas to contain a frameshift mutation in a coding exon of PNPLA3 to knock out endogenous PNPLA3 (THLE-3_PNPLA3KO cells). As a control, an aliquot of THLE-3_PNPLA3KO cells are transfected with a plasmid containing the wildtype PNPL3A ORF sequence.

### Synthesis and Preparation of TREM

[2375] An arginine TREM is synthesized as described in Example 1 and quality control methods as described in Examples 2-5 are performed. To ensure proper folding, the TREM is heated at 85° C. for 2 minutes and then snap cooled at 4° C. for 5 minutes.

### Evaluation of Protein Level of SMC-Containing ORF

[2376] A TREM is delivered to the THLE-3_PNPLA3KO cells containing the rs738408 ORF sequence as well as to the THLE-3_PNPLA3KO cells containing the wildtype PNPLA3 ORF sequence. In this example, the TREM contains a proline isoacceptor containing an AGG anticodon, that base pairs to the CCT codon, i.e. with the sequence GGCUCGUUGGUCUAGGGGUAUGAUUCUCGCUUAGGGUGCGAGAGGUCCCGGGUU

[2377] CAAAUCCCGGACGAGCCC. A time course is performed ranging from 30 minutes to 6 hours with hour-long interval time points. At each time point, cells are trypsinized, washed and lysed. Cell lysates are analyzed by Western blotting and blots are probed with antibodies against the adiponutrin protein. A total protein loading control, such as GAPDH, actin or tubulin, is also probed as a loading control.

[2378] The methods described in this example can be adopted for use to evaluate the expression levels of the adiponutrin protein in rs738408 ORF containing cells.

### Example 10: Modulation of Protein Translation Rate of SMC-Containing ORF with TREM Administration

[2379] This example describes administration of a TREM to alter the rate of protein translation of an SMC-containing ORF.

[2380] To monitor the effects of TREM addition on translation elongation rates, an in vitro translation system, in this example the RRL system from Promega, is used in which the fluorescence change over time of a reporter gene, in this example GFP, is a surrogate for translation rates.

### Synthesis and Preparation of TREM

[2381] An arginine TREM is synthesized as described in Example 1 and quality control methods as described in Examples 2-5 are performed. To ensure proper folding, the TREM is heated at 85° C. for 2 minutes and then snap cooled at 4° C. for 5 minutes.

### Evaluation of Protein Translation Rate of SMC-Containing ORF

[2382] First, a rabbit reticulocyte lysate that is depleted of the endogenous tRNA using an antisense oligonucleotide targeting the sequence between the anticodon and variable loop is generated (see, e.g., Cui et al. 2018. Nucleic Acids Res. 46 (12): 6387-6400). In this example, a TREM comprising an alanine isoacceptor containing an UGC anticodon, that base pairs to the GCA codon, i.e. with the sequence GGGGAUGUAGCUCAGUGGUAGAGCGCAUGCUUUGCAUGUAUGAGGUCCCGGGUU CGAUCCCCGGCAUCUCCA is added to the in vitro translation assay lysate in addition to 0.1-0.5 ug/uL of mRNA coding for the wildtype TERT ORF fused to the GFP ORF by a linker or an mRNA coding for the rs2736098 TERT ORF fused to the GFP ORF by a linker. The progress of GFP mRNA translation is monitored by fluorescence increase on a microplate reader at 37° C. using Mex485/hem528 with data points collected every 30 seconds over a period of 1 hour. The amount of fluorescence change over time is plotted to determine the rate of translation elongation of the wildtype ORF compared to the rs2736098 ORF with and without TREM addition. The methods described in this example can be adopted for use to evaluate the translation rate of the rs2736098 ORF and the wildtype ORF in the presence or absence of TREM.

### Example 11: Rescue of Full-Length GLA Expression and Activity in Fabry Patient Fibroblasts Upon Administration of an Exemplary TREM

[2383] This example describes administration of exemplary TREMs to Fabry-patient derived fibroblasts (GLA R220X) to assess rescue of full-length GLA protein expression and activity. Fabry patient fibroblasts (Coriell, GM00881; GLAR220X) and normal healthy fibroblasts (Coriell, GM03377) were transfected with 40 nM of either a chemically unmodified TREM (TREM NO. 2309) or an exemplary TREM comprising non-naturally occurring modifications (TREM NO. 78). GLA protein rescue was assessed by Western blotting 48 hours post-transfection in both cell lines. As shown in FIG. 4, administration of both TREMs induced rescue of full-length GLA protein, with the chemically modified TREM NO. 78 affording a considerable increase in the total GLA produced over the chemically unmodified TREM NO. 2309.

[2384] To expand on these findings, both time course and dose-response studies were carried out. In the time course study, patient fibroblasts were transiently transfected with the chemically modified TREM NO. 78 for 48 hours, 72 houts, and 96 hours, and full-length GLA protein rescue was assessed by Western blot. As shown in FIG. 5A, maximal protein rescue (approximately 50% versus normal healthy fibroblasts) across all time points was observed 96 hours post-transfection. In the dose-response study, TREM NO. 78 was provided to cells at doses of 2.6 nM, 16 nM, 40 nM, and 100 nM, and cells were harvested 96 hours post-transfection. As shown in FIG. 5B & FIG. 5D, full-length GLA protein rescue levels rise until reaching a plateau at 40 nM. In addition, GLA transcript levels also increased in a concentration-dependent fashion as measured by qPCR, suggesting that TREM NO. 78 also rescues GLA mRNA nonsense mediated decay (NMD) in Fabry patient fibroblasts as shown in FIG. 5E.

[2385] Additional studies were carried out to assess whether administration of exemplary TREMs was sufficient to rescue GLA enzymatic activity. Fabry patient fibroblasts were treated with either TREM NO. 2309 or TREM NO. 78 at a dose of either 20 nM or 40 nM, and GLA activity was measured 96 hours post-transfection. An established GLA enzymatic activity was performed on cell extracts using a GLA-specific substrate that results in the generation of a fluorescent cleavage product (4-methylumbelliferone). As shown in FIG. 6, GLA activity increased following treatment with both TREMs, though administration of chemically modified TREM NO. 78 resulted in a profound rescue of GLA activity greater than or equal to GLA activity levels in normal healthy fibroblasts at both doses.

### Example 12: In Vivo PTC Readthrough and Target Engagement of TREM by Hydrodynamic Gene Delivery

[2386] Hydrodynamic gene delivery (HGD) is a simple, fast, safe, and effective method for delivering transgenes in rodent models. A set of plasmids expressing both an cGFP-Luc-TGA reporter and and a TREM were designed. To evaluate tolerability and determine optimal plasmid concentration for maximum TREM delivery to the liver, the eGFP-WT Luc plasmid was administered to adult CD-1 mice via tail vein hydrodynamic injection at three doses: 10 ug, 30 ug, and 50 ug. As shown in FIG. 7A, plasmids in saline were successfully delivered to liver in a dose-dependent manner as shown by the luciferase readout signal. Next, 50 ug of DNA in saline (100 mg/kg) was administered to mice via tail vein hydrodynamic injuction to assess target engagement and PTC readthrough using either 1) eGFP-Nluc TGA reporter plasmid (PL-854), or 2) eGFP-Nluc WT reporter (PL1202), or 3) all-in-one plasmid eGFP-Nluc-TGA reporter with S-TAG (PL-1216), or 4) all-in-one plasmid eGFP-Nluc-TGA reporter with R-TGA (PL-1215). The Arg-TGA selectively rescued the TGA nonsense mutation in the reporter plasmid and showed a ˜1000-fold increase in luciferase signal compared to controls (FIG. 7B).

The application's sequence listing, which the Patent Office published only in electronic form, follows.

SEQUENCE LISTING (9821 sequences)

SEQ ID NO: 1 - DNA, 72 bp, Homo sapiens
  source 1..72: mol_type = genomic DNA
gggggtatagctcagtggtagagcgcgtgcttagcatgcacgaggtcctgggttcgatccccagtacctcca

SEQ ID NO: 2 - DNA, 73 bp, Homo sapiens
  source 1..73: mol_type = genomic DNA
ggggaattagctcaagtggtagagcgcttgcttagcacgcaagaggtagtgggatcgatgcccacattctcca

SEQ ID NO: 3 - DNA, 73 bp, Homo sapiens
  source 1..73: mol_type = genomic DNA
ggggaattagctcaaatggtagagcgctcgcttagcatgcgagaggtagcgggatcgatgcccgcattctcca

SEQ ID NO: 4 - DNA, 73 bp, Homo sapiens
  source 1..73: mol_type = genomic DNA
ggggaattagctcaagtggtagagcgcttgcttagcatgcaagaggtagtgggatcgatgcccacattctcca

SEQ ID NO: 5 - DNA, 73 bp, Homo sapiens
  source 1..73: mol_type = genomic DNA
ggggaattagctcaagcggtagagcgcttgcttagcatgcaagaggtagtgggatcgatgcccacattctcca

SEQ ID NO: 6 - DNA, 73 bp, Homo sapiens
  source 1..73: mol_type = genomic DNA
ggggaattagctcaagtggtagagcgcttgcttagcatgcaagaggtagtgggatcaatgcccacattctcca

SEQ ID NO: 7 - DNA, 73 bp, Homo sapiens
  source 1..73: mol_type = genomic DNA
ggggaattagctcaagtggtagagcgctcgcttagcatgcgagaggtagtgggatcgatgcccgcattctcca

SEQ ID NO: 8 - DNA, 73 bp, Homo sapiens
  source 1..73: mol_type = genomic DNA
ggggaattagcccaagtggtagagcgcttgcttagcatgcaagaggtagtgggatcgatgcccacattctcca

SEQ ID NO: 9 - DNA, 72 bp, Homo sapiens
  source 1..72: mol_type = genomic DNA
gggggtgtagctcagtggtagagcgcgtgcttagcatgcacgaggccccgggttcaatccccggcacctcca

SEQ ID NO: 10 - DNA, 72 bp, Homo sapiens
  source 1..72: mol_type = genomic DNA
gggggtgtagctcagtggtagagcgcgtgcttagcatgtacgaggtcccgggttcaatccccggcacctcca

SEQ ID NO: 11 - DNA, 72 bp, Homo sapiens
  source 1..72: mol_type = genomic DNA
ggggatgtagctcagtggtagagcgcatgcttagcatgcatgaggtcccgggttcgatccccagcatctcca

SEQ ID NO: 12 - DNA, 72 bp, Homo sapiens
  source 1..72: mol_type = genomic DNA
gggggtgtagctcagtggtagagcgcgtgcttagcatgcacgaggccctgggttcaatccccagcacctcca

SEQ ID NO: 13 - DNA, 72 bp, Homo sapiens
  source 1..72: mol_type = genomic DNA
gggggtatagctcagcggtagagcgcgtgcttagcatgcacgaggtcctgggttcaatccccaatacctcca

SEQ ID NO: 14 - DNA, 72 bp, Homo sapiens
  source 1..72: mol_type = genomic DNA
gggggtgtagctcagtggtagagcgcgtgcttagcatgcacgaggccccgggttcaatccctggcacctcca

SEQ ID NO: 15 - DNA, 73 bp, Homo sapiens
  source 1..73: mol_type = genomic DNA
gggggattagctcaaatggtagagcgctcgcttagcatgcgagaggtagcgggatcgatgcccgcatcctcca

SEQ ID NO: 16 - DNA, 73 bp, Homo sapiens
  source 1..73: mol_type = genomic DNA
ggggaattagctcaggcggtagagcgctcgcttagcatgcgagaggtagcgggatcgacgcccgcattctcca

SEQ ID NO: 17 - DNA, 72 bp, Homo sapiens
  source 1..72: mol_type = genomic DNA
ggggatgtagctcagtggtagagcgcatgcttcgcatgtatgaggtcccgggttcgatccccggcatctcca

SEQ ID NO: 18 - DNA, 72 bp, Homo sapiens
  source 1..72: mol_type = genomic DNA
ggggatgtagctcagtggtagagcgcatgcttcgcatgtatgaggccccgggttcgatccccggcatctcca

SEQ ID NO: 19 - DNA, 72 bp, Homo sapiens
  source 1..72: mol_type = genomic DNA
ggggatgtagctcagtggtagagcgcgcgcttcgcatgtgtgaggtcccgggttcaatccccggcatctcca

SEQ ID NO: 20 - DNA, 72 bp, Homo sapiens
  source 1..72: mol_type = genomic DNA
gggggtgtagctcagtggtagagcgcgtgcttcgcatgtacgaggccccgggttcgacccccggctcctcca

SEQ ID NO: 21 - DNA, 72 bp, Homo sapiens
  source 1..72: mol_type = genomic DNA
gggggtgtagctcagtggtagagcgcatgctttgcatgtatgaggtcccgggttcgatccccggcacctcca

SEQ ID NO: 22 - DNA, 72 bp, Homo sapiens
  source 1..72: mol_type = genomic DNA
ggggatgtagctcagtggtagagcgcatgctttgcatgtatgaggtcccgggttcgatccccggcatctcca

SEQ ID NO: 23 - DNA, 72 bp, Homo sapiens
  source 1..72: mol_type = genomic DNA
ggggatgtagctcagtggtagagcgcatgctttgcatgtatgaggccccgggttcgatccccggcatctcca

SEQ ID NO: 24 - DNA, 72 bp, Homo sapiens
  source 1..72: mol_type = genomic DNA
ggggatgtagctcagtggtagagcgcatgctttgcacgtatgaggccccgggttcaatccccggcatctcca

SEQ ID NO: 25 - DNA, 72 bp, Homo sapiens
  source 1..72: mol_type = genomic DNA
gggggtgtagctcagtggtagagcgcatgctttgcatgtatgaggcctcgggttcgatccccgacacctcca

SEQ ID NO: 26 - DNA, 72 bp, Homo sapiens
  source 1..72: mol_type = genomic DNA
gggggtgtagctcagtggtagagcacatgctttgcatgtgtgaggccccgggttcgatccccggcacctcca

SEQ ID NO: 27 - DNA, 71 bp, Homo sapiens
  source 1..71: mol_type = genomic DNA
gggggtgtagctcagtggtagagcgcatgctttgcatgtatgaggcctcggttcgatccccgacacctcca

SEQ ID NO: 28 - DNA, 73 bp, Homo sapiens
  source 1..73: mol_type = genomic DNA
gggccagtggcgcaatggataacgcgtctgactacggatcagaagattccaggttcgactcctggctggctcg

SEQ ID NO: 29 - DNA, 73 bp, Homo sapiens
  source 1..73: mol_type = genomic DNA
gggccagtggcgcaatggataacgcgtctgactacggatcagaagattctaggttcgactcctggctggctcg

SEQ ID NO: 30 - DNA, 73 bp, Homo sapiens
  source 1..73: mol_type = genomic DNA
ggccgcgtggcctaatggataaggcgtctgattccggatcagaagattgagggttcgagtcccttcgtggtcg

SEQ ID NO: 31 - DNA, 73 bp, Homo sapiens
  source 1..73: mol_type = genomic DNA
gacccagtggcctaatggataaggcatcagcctccggagctggggattgtgggttcgagtcccatctgggtcg

SEQ ID NO: 32 - DNA, 73 bp, Homo sapiens
  source 1..73: mol_type = genomic DNA
gccccagtggcctaatggataaggcactggcctcctaagccagggattgtgggttcgagtcccacctggggta

SEQ ID NO: 33 - DNA, 73 bp, Homo sapiens
  source 1..73: mol_type = genomic DNA
gccccagtggcctaatggataaggcactggcctcctaagccagggattgtgggttcgagtcccacctggggtg

SEQ ID NO: 34 - DNA, 73 bp, Homo sapiens
  source 1..73: mol_type = genomic DNA
gccccggtggcctaatggataaggcattggcctcctaagccagggattgtgggttcgagtcccacccggggta

SEQ ID NO: 35 - DNA, 73 bp, Homo sapiens
  source 1..73: mol_type = genomic DNA
gccccagtggcctaatggataaggcattggcctcctaagccagggattgtgggttcgagtcccatctggggtg

SEQ ID NO: 36 - DNA, 73 bp, Homo sapiens
  source 1..73: mol_type = genomic DNA
gccccagtggcctgatggataaggtactggcctcctaagccagggattgtgggttcgagttccacctggggta

SEQ ID NO: 37 - DNA, 73 bp, Homo sapiens
  source 1..73: mol_type = genomic DNA
ggccgcgtggcctaatggataaggcgtctgacttcggatcagaagattgcaggttcgagtcctgccgcggtcg

SEQ ID NO: 38 - DNA, 73 bp, Homo sapiens
  source 1..73: mol_type = genomic DNA
gaccacgtggcctaatggataaggcgtctgacttcggatcagaagattgagggttcgaatccctccgtggtta

SEQ ID NO: 39 - DNA, 73 bp, Homo sapiens
  source 1..73: mol_type = genomic DNA
gaccgcgtggcctaatggataaggcgtctgacttcggatcagaagattgagggttcgagtcccttcgtggtcg

SEQ ID NO: 40 - DNA, 73 bp, Homo sapiens
  source 1..73: mol_type = genomic DNA
gaccacgtggcctaatggataaggcgtctgacttcggatcagaagattgagggttcgaatcccttcgtggtta

SEQ ID NO: 41 - DNA, 73 bp, Homo sapiens
  source 1..73: mol_type = genomic DNA
gaccacgtggcctaatggataaggcgtctgacttcggatcagaagattgagggttcgaatcccttcgtggttg

SEQ ID NO: 42 - DNA, 73 bp, Homo sapiens
  source 1..73: mol_type = genomic DNA
ggccgtgtggcctaatggataaggcgtctgacttcggatcaaaagattgcaggtttgagttctgccacggtcg

SEQ ID NO: 43 - DNA, 85 bp, Homo sapiens
  source 1..85: mol_type = genomic DNA
ggctccgtggcgcaatggatagcgcattggacttctagaggctgaaggcattcaaaggttccgggttcgagtcccggcggagtcg

SEQ ID NO: 44 - DNA, 88 bp, Homo sapiens
  source 1..88: mol_type = genomic DNA
ggctctgtggcgcaatggatagcgcattggacttctagtgacgaatagagcaattcaaaggttgtgggttcgaatcccaccagagtcg

SEQ ID NO: 45 - DNA, 91 bp, Homo sapiens
  source 1..91: mol_type = genomic DNA
ggctctgtggcgcaatggatagcgcattggacttctagctgagcctagtgtggtcattcaaaggttgtgggttcgagtcccaccagagtcg

SEQ ID NO: 46 - DNA, 86 bp, Homo sapiens
  source 1..86: mol_type = genomic DNA
ggctctgtggcgcaatggatagcgcattggacttctagatagttagagaaattcaaaggttgtgggttcgagtcccaccagagtcg

SEQ ID NO: 47 - DNA, 74 bp, Homo sapiens
  source 1..74: mol_type = genomic DNA
gtctctgtggcgcaatggacgagcgcgctggacttctaatccagaggttccgggttcgagtcccggcagagatg

SEQ ID NO: 48 - DNA, 87 bp, Homo sapiens
  source 1..87: mol_type = genomic DNA
ggctctgtggcgcaatggatagcgcattggacttctagcctaaatcaagagattcaaaggttgcgggttcgagtccctccagagtcg

SEQ ID NO: 49 - DNA, 74 bp, Homo sapiens
  source 1..74: mol_type = genomic DNA
gtctctgtggcgcaatcggttagcgcgttcggctgttaaccgaaaggttggtggttcgatcccacccagggacg

SEQ ID NO: 50 - DNA, 74 bp, Homo sapiens
  source 1..74: mol_type = genomic DNA
gtctctgtggcgcaatcggctagcgcgtttggctgttaactaaaaggttggcggttcgaacccacccagaggcg

SEQ ID NO: 51 - DNA, 74 bp, Homo sapiens
  source 1..74: mol_type = genomic DNA
gtctctgtggtgcaatcggttagcgcgttccgctgttaaccgaaagcttggtggttcgagcccacccagggatg

SEQ ID NO: 52 - DNA, 74 bp, Homo sapiens
  source 1..74: mol_type = genomic DNA
gtctctgtggcgcaatcggctagcgcgtttggctgttaactaaaaagttggtggttcgaacacacccagaggcg

SEQ ID NO: 53 - DNA, 74 bp, Homo sapiens
  source 1..74: mol_type = genomic DNA
gtctctgtggcgcaatcggttagcgcgttcggctgttaaccgaaaggttggtggttcgagcccacccagggacg

SEQ ID NO: 54 - DNA, 74 bp, Homo sapiens
  source 1..74: mol_type = genomic DNA
gtctctgtggcgcaatcggttagcgcattcggctgttaaccgaaaggttggtggttcgagcccacccagggacg

SEQ ID NO: 55 - DNA, 74 bp, Homo sapiens
  source 1..74: mol_type = genomic DNA
gtctctgtggcgcaatcggttagcgcgttcggctgttaaccgaaagattggtggttcgagcccacccagggacg

SEQ ID NO: 56 - DNA, 74 bp, Homo sapiens
  source 1..74: mol_type = genomic DNA
gtctctgtggcgcaatcggttagcgcgttcggctgttaactgaaaggttggtggttcgagcccacccagggacg

SEQ ID NO: 57 - DNA, 74 bp, Homo sapiens
  source 1..74: mol_type = genomic DNA
gtctctgtggcgcaatgggttagcgcgttcggctgttaaccgaaaggttggtggttcgagcccatccagggacg

SEQ ID NO: 58 - DNA, 74 bp, Homo sapiens
  source 1..74: mol_type = genomic DNA
gtctctgtggcgtagtcggttagcgcgttcggctgttaaccgaaaagttggtggttcgagcccacccaggaacg

SEQ ID NO: 59 - DNA, 74 bp, Homo sapiens
  source 1..74: mol_type = genomic DNA
gtctctgtggcgcaatcggctagcgcgtttggctgttaactaaaaggttggtggttcgaacccacccagaggcg

SEQ ID NO: 60 - DNA, 74 bp, Homo sapiens
  source 1..74: mol_type = genomic DNA
gtctctgtggcgcaatcggttagcgcgttcggctgttaactgaaaggttagtggttcgagcccacccggggacg

SEQ ID NO: 61 - DNA, 72 bp, Homo sapiens
  source 1..72: mol_type = genomic DNA
tcctcgttagtatagtggttagtatccccgcctgtcacgcgggagaccggggttcaattccccgacggggag

SEQ ID NO: 62 - DNA, 72 bp, Homo sapiens
  source 1..72: mol_type = genomic DNA
tcctcgttagtatagtggtgagtatccccgcctgtcacgcgggagaccggggttcgattccccgacggggag

SEQ ID NO: 63 - DNA, 72 bp, Homo sapiens
  source 1..72: mol_type = genomic DNA
tcctcgttagtatagtggtgagtgtccccgtctgtcacgcgggagaccggggttcgattccccgacggggag

SEQ ID NO: 64 - DNA, 72 bp, Homo sapiens
  source 1..72: mol_type = genomic DNA
gggggcatagctcagtggtagagcatttgactgcagatcaagaggtccctggttcaaatccaggtgccccct

SEQ ID NO: 65 - DNA, 72 bp, Homo sapiens
  source 1..72: mol_type = genomic DNA
gggggtatagctcaggggtagagcatttgactgcagatcaagaggtccctggttcaaatccaggtgcccccc

SEQ ID NO: 66 - DNA, 72 bp, Homo sapiens
  source 1..72: mol_type = genomic DNA
gggggtatagcttagcggtagagcatttgactgcagatcaagaggtccccggttcaaatccgggtgccccct

SEQ ID NO: 67 - DNA, 72 bp, Homo sapiens
  source 1..72: mol_type = genomic DNA
gggggtatagcttaggggtagagcatttgactgcagatcaaaaggtccctggttcaaatccaggtgcccctt

SEQ ID NO: 68 - DNA, 72 bp, Homo sapiens
  source 1..72: mol_type = genomic DNA
gggggtatagctcaggggtagagcatttgactgcagatcaagaggtccccagttcaaatctgggtgccccct

SEQ ID NO: 69 - DNA, 72 bp, Homo sapiens
  source 1..72: mol_type = genomic DNA
gggggtatagctcaggggtagagcatttgactgcagatcaagaagtccccggttcaaatccgggtgccccct

SEQ ID NO: 70 - DNA, 72 bp, Homo sapiens
  source 1..72: mol_type = genomic DNA
gggggtatagctcaggggtagagcatttgactgcagatcaagaggtctctggttcaaatccaggtgccccct

SEQ ID NO: 71 - DNA, 72 bp, Homo sapiens
  source 1..72: mol_type = genomic DNA
gggggtatagctcaggggtagagcacttgactgcagatcaagaagtccttggttcaaatccaggtgccccct

SEQ ID NO: 72 - DNA, 72 bp, Homo sapiens
  source 1..72: mol_type = genomic DNA
ggggatatagctcaggggtagagcatttgactgcagatcaagaggtccccggttcaaatccgggtgcccccc

SEQ ID NO: 73 - DNA, 72 bp, Homo sapiens
  source 1..72: mol_type = genomic DNA
gggggtatagttcaggggtagagcatttgactgcagatcaagaggtccctggttcaaatccaggtgccccct

SEQ ID NO: 74 - DNA, 72 bp, Homo sapiens
  source 1..72: mol_type = genomic DNA
gggggtatagctcaggggtagagcatttgactgcaaatcaagaggtccctgattcaaatccaggtgccccct

SEQ ID NO: 75 - DNA, 72 bp, Homo sapiens
  source 1..72: mol_type = genomic DNA
gggggtatagctcagtggtagagcatttgactgcagatcaagaggtccccggttcaaatccgggtgccccct

SEQ ID NO: 76 - DNA, 72 bp, Homo sapiens
  source 1..72: mol_type = genomic DNA
gggcgtatagctcaggggtagagcatttgactgcagatcaagaggtccccagttcaaatctgggtgccccct

SEQ ID NO: 77 - DNA, 72 bp, Homo sapiens
  source 1..72: mol_type = genomic DNA
gggggtatagctcacaggtagagcatttgactgcagatcaagaggtccccggttcaaatctgggtgccccct

SEQ ID NO: 78 - DNA, 70 bp, Homo sapiens
  source 1..70: mol_type = genomic DNA
gggcgtatagctcaggggtagagcatttgactgcagatcaagaggtccccagttcaaatctgggtgccca

SEQ ID NO: 79 - DNA, 72 bp, Homo sapiens
  source 1..72: mol_type = genomic DNA
gggggtatagctcacaggtagagcatttgactgcagatcaagaggtccccggttcaaatccggttactccct

SEQ ID NO: 80 - DNA, 72 bp, Homo sapiens
  source 1..72: mol_type = genomic DNA
gggggtatagctcaggggtagagcacttgactgcagatcaagaggtccctggttcaaatccaggtgccccct

SEQ ID NO: 81 - DNA, 72 bp, Homo sapiens
  source 1..72: mol_type = genomic DNA
gggggtatagctcagtggtagagcatttgactgcagatcaagaggtccctggttcaaatccgggtgccccct

SEQ ID NO: 82 - DNA, 73 bp, Homo sapiens
  source 1..73: mol_type = genomic DNA
gggggtatagctcagtgggtagagcatttgactgcagatcaagaggtccccggttcaaatccgggtgccccct

SEQ ID NO: 83 - DNA, 72 bp, Homo sapiens
  source 1..72: mol_type = genomic DNA
gggggtgtagctcagtggtagagcatttgactgcagatcaagaggtccctggttcaaatccaggtgccccct

SEQ ID NO: 84 - DNA, 73 bp, Homo sapiens
  source 1..73: mol_type = genomic DNA
gggggtatagctcaggtggtagagcatttgactgcagatcaagaggtccccggttcaaatccgggtgccccct

SEQ ID NO: 85 - DNA, 72 bp, Homo sapiens
  source 1..72: mol_type = genomic DNA
gggggtatagctcaggggtagagcatttgactgcagatcaagaggtccccggttcaaatccgggtgccccct

SEQ ID NO: 86 - DNA, 72 bp, Homo sapiens
  source 1..72: mol_type = genomic DNA
gggggtatagctcaggggtagagcatttgactgcagatcaagaggtccctggttcaaatccaggtgccccct

SEQ ID NO: 87 - DNA, 72 bp, Homo sapiens
  source 1..72: mol_type = genomic DNA
ggttccatggtgtaatggttagcactctggactctgaatccagcgatccgagttcaaatctcggtggaacct

SEQ ID NO: 88 - DNA, 72 bp, Homo sapiens
  source 1..72: mol_type = genomic DNA
ggttccatggtgtaatggttagcactctggactctgaatccagcgatccgagttcaagtctcggtggaacct

SEQ ID NO: 89 - DNA, 72 bp, Homo sapiens
  source 1..72: mol_type = genomic DNA
ggttccatggtgtaatggtgagcactctggactctgaatccagcgatccgagttcgagtctcggtggaacct

SEQ ID NO: 90 - DNA, 72 bp, Homo sapiens
  source 1..72: mol_type = genomic DNA
ggttccatggtgtaatggtaagcactctggactctgaatccagcgatccgagttcgagtctcggtggaacct

SEQ ID NO: 91 - DNA, 72 bp, Homo sapiens
  source 1..72: mol_type = genomic DNA
ggttccatggtgtaatggttagcactctggactctgaatccggtaatccgagttcaaatctcggtggaacct

SEQ ID NO: 92 - DNA, 72 bp, Homo sapiens
  source 1..72: mol_type = genomic DNA
ggccccatggtgtaatggtcagcactctggactctgaatccagcgatccgagttcaaatctcggtgggaccc

SEQ ID NO: 93 - DNA, 72 bp, Homo sapiens
  source 1..72: mol_type = genomic DNA
ggttccatggtgtaatggtaagcactctggactctgaatccagccatctgagttcgagtctctgtggaacct

SEQ ID NO: 94 - DNA, 72 bp, Homo sapiens
  source 1..72: mol_type = genomic DNA
ggtcccatggtgtaatggttagcactctggactttgaatccagcgatccgagttcaaatctcggtgggacct

SEQ ID NO: 95 - DNA, 72 bp, Homo sapiens
  source 1..72: mol_type = genomic DNA
ggtcccatggtgtaatggttagcactctggactttgaatccagcaatccgagttcgaatctcggtgggacct

SEQ ID NO: 96 - DNA, 72 bp, Homo sapiens
  source 1..72: mol_type = genomic DNA
ggccccatggtgtaatggttagcactctggactttgaatccagcgatccgagttcaaatctcggtgggacct

SEQ ID NO: 97 - DNA, 72 bp, Homo sapiens
  source 1..72: mol_type = genomic DNA
ggtcccatggtgtaatggttagcactctgggctttgaatccagcaatccgagttcgaatcttggtgggacct

SEQ ID NO: 98 - DNA, 72 bp, Homo sapiens
  source 1..72: mol_type = genomic DNA
tccctggtggtctagtggttaggattcggcgctctcaccgccgcggcccgggttcgattcccggtcagggaa

SEQ ID NO: 99 - DNA, 72 bp, Homo sapiens
  source 1..72: mol_type = genomic DNA
tccctggtggtctagtggttaggattcggcgctctcaccgccgcggcccgggttcgattcccggtcaggaaa

SEQ ID NO: 100 - DNA, 72 bp, Homo sapiens
  source 1..72: mol_type = genomic DNA
tcccatatggtctagcggttaggattcctggttttcacccaggtggcccgggttcgactcccggtatgggaa

SEQ ID NO: 101 - DNA, 72 bp, Homo sapiens
  source 1..72: mol_type = genomic DNA
tcccacatggtctagcggttaggattcctggttttcacccaggcggcccgggttcgactcccggtgtgggaa

SEQ ID NO: 102 - DNA, 72 bp, Homo sapiens
  source 1..72: mol_type = genomic DNA
tccctggtggtctagtggctaggattcggcgctttcaccgccgcggcccgggttcgattcccggccagggaa

SEQ ID NO: 103 - DNA, 72 bp, Homo sapiens
  source 1..72: mol_type = genomic DNA
tccctggtggtctagtggctaggattcggcgctttcaccgccgcggcccgggttcgattcccggtcagggaa

SEQ ID NO: 104 - DNA, 71 bp, Homo sapiens
  source 1..71: mol_type = genomic DNA
gcattggtggttcagtggtagaattctcgcctcccacgcgggagacccgggttcaattcccggccaatgca

SEQ ID NO: 105 - DNA, 71 bp, Homo sapiens
  source 1..71: mol_type = genomic DNA
gcgccgctggtgtagtggtatcatgcaagattcccattcttgcgacccgggttcgattcccgggcggcgca

SEQ ID NO: 106 - DNA, 71 bp, Homo sapiens
  source 1..71: mol_type = genomic DNA
gcattggtggttcaatggtagaattctcgcctcccacgcaggagacccaggttcgattcctggccaatgca

SEQ ID NO: 107 - DNA, 71 bp, Homo sapiens
  source 1..71: mol_type = genomic DNA
gcatgggtggttcagtggtagaattctcgcctgccacgcgggaggcccgggttcgattcccggcccatgca

SEQ ID NO: 108 - DNA, 71 bp, Homo sapiens
  source 1..71: mol_type = genomic DNA
gcattggtggttcagtggtagaattctcgcctgccacgcgggaggcccgggttcgattcccggccaatgca

SEQ ID NO: 109 - DNA, 71 bp, Homo sapiens
  source 1..71: mol_type = genomic DNA
gcattggtggttcagtggtagaattctcgcctgccacgcgggaggcccgggtttgattcccggccagtgca

SEQ ID NO: 110 - DNA, 71 bp, Homo sapiens
  source 1..71: mol_type = genomic DNA
gcataggtggttcagtggtagaattcttgcctgccacgcaggaggcccaggtttgattcctggcccatgca

SEQ ID NO: 111 - DNA, 71 bp, Homo sapiens
  source 1..71: mol_type = genomic DNA
gcattggtggttcagtggtagaattctcgcctgccatgcgggcggccgggcttcgattcctggccaatgca

SEQ ID NO: 112 - DNA, 72 bp, Homo sapiens
  source 1..72: mol_type = genomic DNA
gcgttggtggtatagtggttagcatagctgccttccaagcagttgacccgggttcgattcccggccaacgca

SEQ ID NO: 113 - DNA, 72 bp, Homo sapiens
  source 1..72: mol_type = genomic DNA
gcgttggtggtatagtggtgagcatagctgccttccaagcagttgacccgggttcgattcccggccaacgca

SEQ ID NO: 114 - DNA, 72 bp, Homo sapiens
  source 1..72: mol_type = genomic DNA
gcgttggtggtatagtggtaagcatagctgccttccaagcagttgacccgggttcgattcccggccaacgca

SEQ ID NO: 115 - DNA, 72 bp, Homo sapiens
  source 1..72: mol_type = genomic DNA
gcgttggtggtatagtggtgagcatagttgccttccaagcagttgacccgggctcgattcccgcccaacgca

SEQ ID NO: 116 - DNA, 72 bp, Homo sapiens
  source 1..72: mol_type = genomic DNA
gccgtgatcgtatagtggttagtactctgcgttgtggccgcagcaacctcggttcgaatccgagtcacggca

SEQ ID NO: 117 - DNA, 72 bp, Homo sapiens
  source 1..72: mol_type = genomic DNA
gccatgatcgtatagtggttagtactctgcgctgtggccgcagcaacctcggttcgaatccgagtcacggca

SEQ ID NO: 118 - DNA, 74 bp, Homo sapiens
  source 1..74: mol_type = genomic DNA
ggccggttagctcagttggttagagcgtggcgctaataacgccaaggtcgcgggttcgatccccgtacgggcca

SEQ ID NO: 119 - DNA, 74 bp, Homo sapiens
  source 1..74: mol_type = genomic DNA
ggccggttagctcagttggttagagcgtggtgctaataacgccaaggtcgcgggttcgatccccgtactggcca

SEQ ID NO: 120 - DNA, 74 bp, Homo sapiens
  source 1..74: mol_type = genomic DNA
ggctggttagctcagttggttagagcgtggtgctaataacgccaaggtcgcgggttcgatccccgtactggcca

SEQ ID NO: 121 - DNA, 74 bp, Homo sapiens
  source 1..74: mol_type = genomic DNA
ggccggttagctcagttggttagagcgtggtgctaataacgccaaggtcgcgggttcgaaccccgtacgggcca

SEQ ID NO: 122 - DNA, 74 bp, Homo sapiens
  source 1..74: mol_type = genomic DNA
ggccggttagctcagttggttagagcgtggtgctaataacgccaaggtcgcgggttcgatccccgtacgggcca

SEQ ID NO: 123 - DNA, 74 bp, Homo sapiens
  source 1..74: mol_type = genomic DNA
ggccggttagctcagttggttagagcgtggtgctaataacgctaaggtcgcgggttcgatccccgtactggcca

SEQ ID NO: 124 - DNA, 74 bp, Homo sapiens
  source 1..74: mol_type = genomic DNA
ggccggttagctcagttggtcagagcgtggtgctaataacgccaaggtcgcgggttcgatccccgtacgggcca

SEQ ID NO: 125 - DNA, 74 bp, Homo sapiens
  source 1..74: mol_type = genomic DNA
ggccggttagctcagtcggctagagcgtggtgctaataacgccaaggtcgcgggttcgatccccgtacgggcca

SEQ ID NO: 126 - DNA, 74 bp, Homo sapiens
  source 1..74: mol_type = genomic DNA
ggctggttagttcagttggttagagcgtggtgctaataacgccaaggtcgtgggttcgatccccatatcggcca

SEQ ID NO: 127 - DNA, 74 bp, Homo sapiens
  source 1..74: mol_type = genomic DNA
ggccggttagctcagttggtaagagcgtggtgctgataacaccaaggtcgcgggctcgactcccgcaccggcca

SEQ ID NO: 128 - DNA, 93 bp, Homo sapiens
  source 1..93: mol_type = genomic DNA
gctccagtggcgcaatcggttagcgcgcggtacttatatgacagtgcgagcggagcaatgccgaggttgtgagttcgatcctcacctggagca

SEQ ID NO: 129 - DNA, 93 bp, Homo sapiens
  source 1..93: mol_type = genomic DNA
gctccagtggcgcaatcggttagcgcgcggtacttatacagcagtacatgcagagcaatgccgaggttgtgagttcgagcctcacctggagca

SEQ ID NO: 130 - DNA, 94 bp, Homo sapiens
  source 1..94: mol_type = genomic DNA
gctccagtggcgcaatcggttagcgcgcggtacttatatggcagtatgtgtgcgagtgatgccgaggttgtgagttcgagcctcacctggagca

SEQ ID NO: 131 - DNA, 94 bp, Homo sapiens
  source 1..94: mol_type = genomic DNA
gctccagtggcgcaatcggttagcgcgcggtacttatacaacagtatatgtgcgggtgatgccgaggttgtgagttcgagcctcacctggagca

SEQ ID NO: 132 - DNA, 94 bp, Homo sapiens
  source 1..94: mol_type = genomic DNA
gctccagtggcgcaatcggttagcgcgcggtacttataagacagtgcacctgtgagcaatgccgaggttgtgagttcaagcctcacctggagca

SEQ ID NO: 133 - DNA, 82 bp, Homo sapiens
  source 1..82: mol_type = genomic DNA
ggtagcgtggccgagcggtctaaggcgctggattaaggctccagtctcttcggaggcgtgggttcgaatcccaccgctgcca

SEQ ID NO: 134 - DNA, 82 bp, Homo sapiens
  source 1..82: mol_type = genomic DNA
ggtagcgtggccgagcggtctaaggcgctggattaaggctccagtctcttcgggggcgtgggttcgaatcccaccgctgcca

SEQ ID NO: 135 - DNA, 82 bp, Homo sapiens
  source 1..82: mol_type = genomic DNA
ggtagcgtggccgagcggtctaaggcgctggattaaggctccagtctcttcgggggcgtgggttcaaatcccaccgctgcca

SEQ ID NO: 136 - DNA, 82 bp, Homo sapiens
  source 1..82: mol_type = genomic DNA
ggtagcgtggccgagtggtctaagacgctggattaaggctccagtctcttcgggggcgtgggtttgaatcccaccgctgcca

SEQ ID NO: 137 - DNA, 106 bp, Homo sapiens
  source 1..106: mol_type = genomic DNA
gtcaggatggccgagtggtctaaggcgccagactcaagctaagcttcctccgcggtggggattctggtctccaatggaggcgtgggttcgaatcccacttctgaca

SEQ ID NO: 138 - DNA, 105 bp, Homo sapiens
  source 1..105: mol_type = genomic DNA
gtcaggatggccgagtggtctaaggcgccagactcaagcttggcttcctcgtgttgaggattctggtctccaatggaggcgtgggttcgaatcccacttctgaca

SEQ ID NO: 139 - DNA, 108 bp, Homo sapiens
  source 1..108: mol_type = genomic DNA
gtcaggatggccgagtggtctaaggcgccagactcaagcttactgcttcctgtgttcgggtcttctggtctccgtatggaggcgtgggttcgaatcccacttctgaca

SEQ ID NO: 140 - DNA, 107 bp, Homo sapiens
  source 1..107: mol_type = genomic DNA
gtcaggatggccgagtggtctaaggcgccagactcaagttgctacttcccaggtttggggcttctggtctccgcatggaggcgtgggttcgaatcccacttctgaca

SEQ ID NO: 141 - DNA, 106 bp, Homo sapiens
  source 1..106: mol_type = genomic DNA
gtcaggatggccgagtggtctaaggcgccagactcaaggtaagcaccttgcctgcgggctttctggtctccggatggaggcgtgggttcgaatcccacttctgaca

SEQ ID NO: 142 - DNA, 74 bp, Homo sapiens
  source 1..74: mol_type = genomic DNA
gcctccttagtgcagtaggtagcgcatcagtctcaaaatctgaatggtcctgagttcaagcctcagagggggca

SEQ ID NO: 143 - DNA, 84 bp, Homo sapiens
  source 1..84: mol_type = genomic DNA
gtcaggatggccgagcagtcttaaggcgctgcgttcaaatcgcaccctccgctggaggcgtgggttcgaatcccacttttgaca

SEQ ID NO: 144 - DNA, 83 bp, Homo sapiens
  source 1..83: mol_type = genomic DNA
gtcaggatggccgagcggtctaaggcgctgcgttcaggtcgcagtctcccctggaggcgtgggttcgaatcccactcctgaca

SEQ ID NO: 145 - DNA, 83 bp, Homo sapiens
  source 1..83: mol_type = genomic DNA
gtcaggatggccgagcggtctaaggcgctgcgttcaggtcgcagtctcccctggaggcgtgggttcgaatcccacttctgaca

SEQ ID NO: 146 - DNA, 83 bp, Homo sapiens
  source 1..83: mol_type = genomic DNA
accaggatggccgagtggttaaggcgttggacttaagatccaatggacatatgtccgcgtgggttcgaaccccactcctggta

SEQ ID NO: 147 - DNA, 83 bp, Homo sapiens
  source 1..83: mol_type = genomic DNA
accgggatggccgagtggttaaggcgttggacttaagatccaatgggctggtgcccgcgtgggttcgaaccccactctcggta

SEQ ID NO: 148 - DNA, 83 bp, Homo sapiens
  source 1..83: mol_type = genomic DNA
accagaatggccgagtggttaaggcgttggacttaagatccaatggattcatatccgcgtgggttcgaaccccacttctggta

SEQ ID NO: 149 - DNA, 83 bp, Homo sapiens
  source 1..83: mol_type = genomic DNA
accgggatggctgagtggttaaggcgttggacttaagatccaatggacaggtgtccgcgtgggttcgagccccactcccggta

SEQ ID NO: 150 - DNA, 82 bp, Homo sapiens
  source 1..82: mol_type = genomic DNA
ggtagcgtggccgagcggtctaaggcgctggatttaggctccagtctcttcggaggcgtgggttcgaatcccaccgctgcca

SEQ ID NO: 151 - DNA, 82 bp, Homo sapiens
  source 1..82: mol_type = genomic DNA
ggtagtgtggccgagcggtctaaggcgctggatttaggctccagtctcttcgggggcgtgggttcgaatcccaccactgcca

SEQ ID NO: 152 - DNA, 82 bp, Homo sapiens
  source 1..82: mol_type = genomic DNA
ggtagcgtggccgagtggtctaaggcgctggatttaggctccagtcatttcgatggcgtgggttcgaatcccaccgctgcca

SEQ ID NO: 153 - DNA, 73 bp, Homo sapiens
  source 1..73: mol_type = genomic DNA
gcccggctagctcagtcggtagagcatgggactcttaatcccagggtcgtgggttcgagccccacgttgggcg

SEQ ID NO: 154 - DNA, 73 bp, Homo sapiens
  source 1..73: mol_type = genomic DNA
gcccagctagctcagtcggtagagcataagactcttaatctcagggttgtggattcgtgccccatgctgggtg

SEQ ID NO: 155 - DNA, 74 bp, Homo sapiens
  source 1..74: mol_type = genomic DNA
gcagctagctcagtcggtagagcatgagactcttaatctcagggtcatgggttcgtgccccatgttgggtgcca

SEQ ID NO: 156 - DNA, 73 bp, Homo sapiens
  source 1..73: mol_type = genomic DNA
gcccggctagctcagtcggtagagcatgagactcttaatctcagggtcgtgggttcgagccccacgttgggcg

SEQ ID NO: 157 - DNA, 73 bp, Homo sapiens
  source 1..73: mol_type = genomic DNA
gcccggctagctcagtcggtagagcatgagacccttaatctcagggtcgtgggttcgagccccacgttgggcg

SEQ ID NO: 158 - DNA, 73 bp, Homo sapiens
  source 1..73: mol_type = genomic DNA
gcccggctagctcagtcggtagagcatgggactcttaatctcagggtcgtgggttcgagccccacgttgggcg

SEQ ID NO: 159 - DNA, 73 bp, Homo sapiens
  source 1..73: mol_type = genomic DNA
gcccggctagctcagtcgatagagcatgagactcttaatctcagggtcgtgggttcgagccgcacgttgggcg

SEQ ID NO: 160 - DNA, 73 bp, Homo sapiens
  source 1..73: mol_type = genomic DNA
gcccagctagctcagtcggtagagcatgagactcttaatctcagggtcatgggtttgagccccacgtttggtg

SEQ ID NO: 161 - DNA, 73 bp, Homo sapiens
  source 1..73: mol_type = genomic DNA
gcctggctagctcagtcggcaaagcatgagactcttaatctcagggtcgtgggctcgagctccatgttgggcg

SEQ ID NO: 162 - DNA, 73 bp, Homo sapiens
  source 1..73: mol_type = genomic DNA
gcccgactacctcagtcggtggagcatgggactcttcatcccagggttgtgggttcgagccccacattgggca

SEQ ID NO: 163 - DNA, 73 bp, Homo sapiens
  source 1..73: mol_type = genomic DNA
gcctggatagctcagttggtagagcatcagacttttaatctgagggtccagggttcaagtccctgttcaggca

SEQ ID NO: 164 - DNA, 73 bp, Homo sapiens
  source 1..73: mol_type = genomic DNA
acccagatagctcagtcagtagagcatcagacttttaatctgagggtccaaggttcatgtccctttttgggtg

SEQ ID NO: 165 - DNA, 73 bp, Homo sapiens
  source 1..73: mol_type = genomic DNA
gcctggatagctcagttggtagagcatcagacttttaatctgagggtccagggttcaagtccctgttcaggcg

SEQ ID NO: 166 - DNA, 73 bp, Homo sapiens
  source 1..73: mol_type = genomic DNA
gcccggatagctcagtcggtagagcatcagacttttaatctgagggtccagggttcaagtccctgttcgggcg

SEQ ID NO: 167 - DNA, 73 bp, Homo sapiens
  source 1..73: mol_type = genomic DNA
gcctggatagctcagtcggtagagcatcagacttttaatctgagggtccagggttcaagtccctgttcaggcg

SEQ ID NO: 168 - DNA, 73 bp, Homo sapiens
  source 1..73: mol_type = genomic DNA
gcccggatagctcagtcggtagagcatcagacttttaatctgagggtccggggttcaagtccctgttcgggcg

SEQ ID NO: 169 - DNA, 73 bp, Homo sapiens
  source 1..73: mol_type = genomic DNA
gcctgggtagctcagtcggtagagcatcagacttttaatctgagggtccagggttcaagtccctgtccaggcg

SEQ ID NO: 170 - DNA, 73 bp, Homo sapiens
  source 1..73: mol_type = genomic DNA
gcctggatagctcagttggtagaacatcagacttttaatctgacggtgcagggttcaagtccctgttcaggcg

SEQ ID NO: 171 - DNA, 73 bp, Homo sapiens
  source 1..73: mol_type = genomic DNA
gcctcgttagcgcagtaggtagcgcgtcagtctcataatctgaaggtcgtgagttcgatcctcacacggggca

SEQ ID NO: 172 - DNA, 73 bp, Homo sapiens
  source 1..73: mol_type = genomic DNA
gccctcttagcgcagtgggcagcgcgtcagtctcataatctgaaggtcctgagttcgagcctcagagagggca

SEQ ID NO: 173 - DNA, 73 bp, Homo sapiens
  source 1..73: mol_type = genomic DNA
gcctccttagcgcagtaggcagcgcgtcagtctcataatctgaaggtcctgagttcgaacctcagagggggca

SEQ ID NO: 174 - DNA, 73 bp, Homo sapiens
  source 1..73: mol_type = genomic DNA
gccctcttagcgcagcgggcagcgcgtcagtctcataatctgaaggtcctgagttcgagcctcagagagggca

SEQ ID NO: 175 - DNA, 73 bp, Homo sapiens
  source 1..73: mol_type = genomic DNA
gccctcttagcgcagctggcagcgcgtcagtctcataatctgaaggtcctgagttcaagcctcagagagggca

SEQ ID NO: 176 - DNA, 73 bp, Homo sapiens
  source 1..73: mol_type = genomic DNA
gcctcgttagcgcagtaggcagcgcgtcagtctcataatctgaaggtcgtgagttcgagcctcacacggggca

SEQ ID NO: 177 - DNA, 73 bp, Homo sapiens
  source 1..73: mol_type = genomic DNA
gccctcttagtgcagctggcagcgcgtcagtttcataatctgaaagtcctgagttcaagcctcagagagggca

SEQ ID NO: 178 - DNA, 73 bp, Homo sapiens
  source 1..73: mol_type = genomic DNA
gccgaaatagctcagttgggagagcgttagactgaagatctaaaggtccctggttcgatcccgggtttcggca

SEQ ID NO: 179 - DNA, 73 bp, Homo sapiens
  source 1..73: mol_type = genomic DNA
gccgaaatagctcagttgggagagcgttagactgaagatctaaaggtccctggttcaatcccgggtttcggca

SEQ ID NO: 180 - DNA, 73 bp, Homo sapiens
  source 1..73: mol_type = genomic DNA
gccgagatagctcagttgggagagcgttagactgaagatctaaaggtccctggttcaatcccgggtttcggca

SEQ ID NO: 181 - DNA, 74 bp, Homo sapiens
  source 1..74: mol_type = genomic DNA
gccgaaatagctcagttgggagagcgttagaccgaagatcttaaaggtccctggttcaatcccgggtttcggca

SEQ ID NO: 182 - DNA, 74 bp, Homo sapiens
  source 1..74: mol_type = genomic DNA
gctgaaatagctcagttgggagagcgttagactgaagatcttaaagttccctggttcaaccctgggtttcagcc

SEQ ID NO: 183 - DNA, 72 bp, Homo sapiens
  source 1..72: mol_type = genomic DNA
ggctcgttggtctaggggtatgattctcgcttaggatgcgagaggtcccgggttcaaatcccggacgagccc

SEQ ID NO: 184 - DNA, 72 bp, Homo sapiens
  source 1..72: mol_type = genomic DNA
ggctcgttggtctaggggtatgattctcgcttagggtgcgagaggtcccgggttcaaatcccggacgagccc

SEQ ID NO: 185 - DNA, 72 bp, Homo sapiens
  source 1..72: mol_type = genomic DNA
ggctcgttggtctaggggtatgattctcgcttcgggtgcgagaggtcccgggttcaaatcccggacgagccc

SEQ ID NO: 186 - DNA, 72 bp, Homo sapiens
  source 1..72: mol_type = genomic DNA
ggctcgttggtctaggggtatgattctcgcttcgggtgtgagaggtcccgggttcaaatcccggacgagccc

SEQ ID NO: 187 - DNA, 72 bp, Homo sapiens
  source 1..72: mol_type = genomic DNA
ggctcgttggtctagtggtatgattctcgctttgggtgcgagaggtcccgggttcaaatcccggacgagccc

SEQ ID NO: 188 - DNA, 72 bp, Homo sapiens
  source 1..72: mol_type = genomic DNA
ggctcgttggtctaggggtatgattctcggtttgggtccgagaggtcccgggttcaaatcccggacgagccc

SEQ ID NO: 189 - DNA, 72 bp, Homo sapiens
  source 1..72: mol_type = genomic DNA
ggctcgttggtctaggggtatgattctcgctttgggtgcgagaggtcccgggttcaaatcccggacgagccc

SEQ ID NO: 190 - DNA, 87 bp, Homo sapiens
  source 1..87: mol_type = genomic DNA
gcccggatgatcctcagtggtctggggtgcaggcttcaaacctgtagctgtctagcgacagagtggttcaattccacctttcgggcg

SEQ ID NO: 191 - DNA, 84 bp, Homo sapiens
  source 1..84: mol_type = genomic DNA
gctcggatgatcctcagtggtctggggtgcaggcttcaaacctgtagctgtctagtgacagagtggttcaattccacctttgta

SEQ ID NO: 192 - DNA, 82 bp, Homo sapiens
  source 1..82: mol_type = genomic DNA
gtagtcgtggccgagtggttaaggcgatggactagaaatccattggggtttccccgcgcaggttcgaatcctgccgactacg

SEQ ID NO: 193 - DNA, 82 bp, Homo sapiens
  source 1..82: mol_type = genomic DNA
gtagtcgtggccgagtggttaaggcgatggactagaaatccattggggtctccccgcgcaggttcgaatcctgccgactacg

SEQ ID NO: 194 - DNA, 82 bp, Homo sapiens
  source 1..82: mol_type = genomic DNA
gtagtcgtggccgagtggttaaggcgatggactagaaatccattggggtttccccacgcaggttcgaatcctgccgactacg

SEQ ID NO: 195 - DNA, 82 bp, Homo sapiens
  source 1..82: mol_type = genomic DNA
gtagtcgtggccgagtggttaaggtgatggactagaaacccattggggtctccccgcgcaggttcgaatcctgccgactacg

SEQ ID NO: 196 - DNA, 82 bp, Homo sapiens
  source 1..82: mol_type = genomic DNA
gctgtgatggccgagtggttaaggcgttggactcgaaatccaatggggtctccccgcgcaggttcgaatcctgctcacagcg

SEQ ID NO: 197 - DNA, 82 bp, Homo sapiens
  source 1..82: mol_type = genomic DNA
gctgtgatggccgagtggttaaggcgttggactcgaaatccaatggggtctccccgcgcaggttcaaatcctgctcacagcg

SEQ ID NO: 198 - DNA, 82 bp, Homo sapiens
  source 1..82: mol_type = genomic DNA
gctgtgatggccgagtggttaaggtgttggactcgaaatccaatgggggttccccgcgcaggttcaaatcctgctcacagcg

SEQ ID NO: 199 - DNA, 82 bp, Homo sapiens
  source 1..82: mol_type = genomic DNA
gtcacggtggccgagtggttaaggcgttggactcgaaatccaatggggtttccccgcacaggttcgaatcctgttcgtgacg

SEQ ID NO: 200 - DNA, 82 bp, Homo sapiens
  source 1..82: mol_type = genomic DNA
gacgaggtggccgagtggttaaggcgatggactgctaatccattgtgctctgcacgcgtgggttcgaatcccaccctcgtcg

SEQ ID NO: 201 - DNA, 82 bp, Homo sapiens
  source 1..82: mol_type = genomic DNA
gacgaggtggccgagtggttaaggcgatggactgctaatccattgtgctctgcacgcgtgggttcgaatcccaccttcgtcg

SEQ ID NO: 202 - DNA, 82 bp, Homo sapiens
  source 1..82: mol_type = genomic DNA
gacgaggtggccgagtggttaaggcgatggactgctaatccattgtgctttgcacgcgtgggttcgaatcccatcctcgtcg

SEQ ID NO: 203 - DNA, 82 bp, Homo sapiens
  source 1..82: mol_type = genomic DNA
gacgaggtggccgagtggttaaggcgatggactgctaatccattgtgctctgcacgcgtgggttcgaatcccatcctcgtcg

SEQ ID NO: 204 - DNA, 82 bp, Homo sapiens
  source 1..82: mol_type = genomic DNA
gacgaggtggccgagtggttaaggcgatggactgctaatccattgtgctctgcacacgtgggttcgaatcccatcctcgtcg

SEQ ID NO: 205 - DNA, 84 bp, Homo sapiens
  source 1..84: mol_type = genomic DNA
ggagaggcctggccgagtggttaaggcgatggactgctaatccattgtgctctgcacgcgtgggttcgaatcccatcctcgtcg

SEQ ID NO: 206 - DNA, 82 bp, Homo sapiens
  source 1..82: mol_type = genomic DNA
gcagcgatggccgagtggttaaggcgttggacttgaaatccaatggggtctccccgcgcaggttcgaaccctgctcgctgcg

SEQ ID NO: 207 - DNA, 82 bp, Homo sapiens
  source 1..82: mol_type = genomic DNA
gtagtcgtggccgagtggttaaggcgatggacttgaaatccattggggtttccccgcgcaggttcgaatcctgccgactacg

SEQ ID NO: 208 - DNA, 82 bp, Homo sapiens
  source 1..82: mol_type = genomic DNA
gtagtcgtggccgagtggttaaggcgatggacttgaaatccattggggtctccccgcgcaggttcgaatcctgccgactacg

SEQ ID NO: 209 - DNA, 82 bp, Homo sapiens
  source 1..82: mol_type = genomic DNA
gtagtcgtggccgagtggttaaggcgatggacttgaaatccattggggtttccccgcgcaggttcgaatcctgtcggctacg

SEQ ID NO: 210 - DNA, 74 bp, Homo sapiens
  source 1..74: mol_type = genomic DNA
ggcgccgtggcttagttggttaaagcgcctgtctagtaaacaggagatcctgggttcgaatcccagcggtgcct

SEQ ID NO: 211 - DNA, 74 bp, Homo sapiens
  source 1..74: mol_type = genomic DNA
ggctccgtggcttagctggttaaagcgcctgtctagtaaacaggagatcctgggttcgaatcccagcggggcct

SEQ ID NO: 212 - DNA, 74 bp, Homo sapiens
  source 1..74: mol_type = genomic DNA
ggctccgtagcttagttggttaaagcgcctgtctagtaaacaggagatcctgggttcgactcccagcggggcct

SEQ ID NO: 213 - DNA, 74 bp, Homo sapiens
  source 1..74: mol_type = genomic DNA
ggcttcgtggcttagctggttaaagcgcctgtctagtaaacaggagatcctgggttcgaatcccagcgaggcct

SEQ ID NO: 214 - DNA, 74 bp, Homo sapiens
  source 1..74: mol_type = genomic DNA
ggcgccgtggcttagctggttaaagcgcctgtctagtaaacaggagatcctgggttcgaatcccagcggtgcct

SEQ ID NO: 215 - DNA, 74 bp, Homo sapiens
  source 1..74: mol_type = genomic DNA
ggccctgtggcttagctggtcaaagcgcctgtctagtaaacaggagatcctgggttcgaatcccagcggggcct

SEQ ID NO: 216 - DNA, 74 bp, Homo sapiens
  source 1..74: mol_type = genomic DNA
ggctctatggcttagttggttaaagcgcctgtctcgtaaacaggagatcctgggttcgactcccagtggggcct

SEQ ID NO: 217 - DNA, 72 bp, Homo sapiens
  source 1..72: mol_type = genomic DNA
ggcgcggtggccaagtggtaaggcgtcggtctcgtaaaccgaagatcacgggttcgaaccccgtccgtgcct

SEQ ID NO: 218 - DNA, 74 bp, Homo sapiens
  source 1..74: mol_type = genomic DNA
ggctctgtggcttagttggctaaagcgcctgtctcgtaaacaggagatcctgggttcgaatcccagcggggcct

SEQ ID NO: 219 - DNA, 72 bp, Homo sapiens
  source 1..72: mol_type = genomic DNA
ggcgcggtggccaagtggtaaggcgtcggtctcgtaaaccgaagatcgcgggttcgaaccccgtccgtgcct

SEQ ID NO: 220 - DNA, 74 bp, Homo sapiens
  source 1..74: mol_type = genomic DNA
ggccctgtagctcagcggttggagcgctggtctcgtaaacctaggggtcgtgagttcaaatctcaccagggcct

SEQ ID NO: 221 - DNA, 74 bp, Homo sapiens
  source 1..74: mol_type = genomic DNA
ggctctatggcttagttggttaaagcgcctgtcttgtaaacaggagatcctgggttcgaatcccagtagagcct

SEQ ID NO: 222 - DNA, 73 bp, Homo sapiens
  source 1..73: mol_type = genomic DNA
ggctccatagctcagtggttagagcactggtcttgtaaaccaggggtcgcgagttcgatcctcgctggggcct

SEQ ID NO: 223 - DNA, 73 bp, Homo sapiens
  source 1..73: mol_type = genomic DNA
ggctccatagctcaggggttagagcgctggtcttgtaaaccaggggtcgcgagttcaattctcgctggggcct

SEQ ID NO: 224 - DNA, 73 bp, Homo sapiens
  source 1..73: mol_type = genomic DNA
ggctccatagctcaggggttagagcactggtcttgtaaaccaggggtcgcgagttcaaatctcgctggggcct

SEQ ID NO: 225 - DNA, 73 bp, Homo sapiens
  source 1..73: mol_type = genomic DNA
ggccctatagctcaggggttagagcactggtcttgtaaaccaggggtcgcgagttcaaatctcgctggggcct

SEQ ID NO: 226 - DNA, 72 bp, Homo sapiens
  source 1..72: mol_type = genomic DNA
ggctccatagctcaggggttagagcactggtcttgtaaaccagggtcgcgagttcaaatctcgctggggcct

SEQ ID NO: 227 - DNA, 72 bp, Homo sapiens
  source 1..72: mol_type = genomic DNA
ggcctcgtggcgcaacggtagcgcgtctgactccagatcagaaggttgcgtgttcaaatcacgtcggggtca

SEQ ID NO: 228 - DNA, 72 bp, Homo sapiens
  source 1..72: mol_type = genomic DNA
gacctcgtggcgcaatggtagcgcgtctgactccagatcagaaggttgcgtgttcaagtcacgtcggggtca

SEQ ID NO: 229 - DNA, 72 bp, Homo sapiens
  source 1..72: mol_type = genomic DNA
gacctcgtggcgcaacggtagcgcgtctgactccagatcagaaggttgcgtgttcaaatcacgtcggggtca

SEQ ID NO: 230 - DNA, 72 bp, Homo sapiens
  source 1..72: mol_type = genomic DNA
gacctcgtggcgcaacggtagcgcgtctgactccagatcagaaggctgcgtgttcgaatcacgtcggggtca

SEQ ID NO: 231 - DNA, 72 bp, Homo sapiens
  source 1..72: mol_type = genomic DNA
gacctcgtggcgcaacggcagcgcgtctgactccagatcagaaggttgcgtgttcaaatcacgtcggggtca

SEQ ID NO: 232 - DNA, 93 bp, Homo sapiens
  source 1..93: mol_type = genomic DNA
ccttcaatagttcagctggtagagcagaggactatagctacttcctcagtaggagacgtccttaggttgctggttcgattccagcttgaagga

SEQ ID NO: 233 - DNA, 91 bp, Homo sapiens
  source 1..91: mol_type = genomic DNA
ccttcgatagctcagttggtagagcggaggactgtagttggctgtgtccttagacatccttaggtcgctggttcgaatccggctcgaagga

SEQ ID NO: 234 - DNA, 89 bp, Homo sapiens
  source 1..89: mol_type = genomic DNA
ccttcgatagctcagttggtagagcggaggactgtagtggatagggcgtggcaatccttaggtcgctggttcgattccggctcgaagga

SEQ ID NO: 235 - DNA, 89 bp, Homo sapiens
  source 1..89: mol_type = genomic DNA
ccttcgatagctcagttggtagagcggaggactgtaggctcattaagcaaggtatccttaggtcgctggttcgaatccggctcggagga

SEQ ID NO: 236 - DNA, 94 bp, Homo sapiens
  source 1..94: mol_type = genomic DNA
ccttcgatagctcagctggtagagcggaggactgtagattgtatagacatttgcggacatccttaggtcgctggttcgattccagctcgaagga

SEQ ID NO: 237 - DNA, 93 bp, Homo sapiens
  source 1..93: mol_type = genomic DNA
ccttcgatagctcagctggtagagcggaggactgtagctacttcctcagcaggagacatccttaggtcgctggttcgattccggctcgaagga

SEQ ID NO: 238 - DNA, 89 bp, Homo sapiens
  source 1..89: mol_type = genomic DNA
ccttcgatagctcagctggtagagcggaggactgtaggcgcgcgcccgtggccatccttaggtcgctggttcgattccggctcgaagga

SEQ ID NO: 239 - DNA, 94 bp, Homo sapiens
  source 1..94: mol_type = genomic DNA
ccttcgatagctcagctggtagagcggaggactgtagcctgtagaaacatttgtggacatccttaggtcgctggttcgattccggctcgaagga

SEQ ID NO: 240 - DNA, 94 bp, Homo sapiens
  source 1..94: mol_type = genomic DNA
ccttcgatagctcagctggtagagcggaggactgtagattgtacagacatttgcggacatccttaggtcgctggttcgattccggctcgaagga

SEQ ID NO: 241 - DNA, 89 bp, Homo sapiens
  source 1..89: mol_type = genomic DNA
ccttcgatagctcagctggtagagcggaggactgtagtacttaatgtgtggtcatccttaggtcgctggttcgattccggctcgaagga

SEQ ID NO: 242 - DNA, 89 bp, Homo sapiens
  source 1..89: mol_type = genomic DNA
ccttcgatagctcagctggtagagcggaggactgtaggggtttgaatgtggtcatccttaggtcgctggttcgaatccggctcggagga

SEQ ID NO: 243 - DNA, 94 bp, Homo sapiens
  source 1..94: mol_type = genomic DNA
ccttcgatagctcagctggtagagcggaggactgtagactgcggaaacgtttgtggacatccttaggtcgctggttcaattccggctcgaagga

SEQ ID NO: 244 - DNA, 90 bp, Homo sapiens
  source 1..90: mol_type = genomic DNA
ctttcgatagctcagttggtagagcggaggactgtaggttcattaaactaaggcatccttaggtcgctggttcgaatccggctcgaagga

SEQ ID NO: 245 - DNA, 88 bp, Homo sapiens
  source 1..88: mol_type = genomic DNA
tcttcaatagctcagctggtagagcggaggactgtaggtgcacgcccgtggccattcttaggtgctggtttgattccgacttggagag

SEQ ID NO: 246 - DNA, 73 bp, Homo sapiens
  source 1..73: mol_type = genomic DNA
gtttccgtagtgtagtggttatcacgttcgcctaacacgcgaaaggtccccggttcgaaaccgggcggaaaca

SEQ ID NO: 247 - DNA, 73 bp, Homo sapiens
  source 1..73: mol_type = genomic DNA
gtttccgtagtgtagtggtcatcacgttcgcctaacacgcgaaaggtccccggttcgaaaccgggcggaaaca

SEQ ID NO: 248 - DNA, 73 bp, Homo sapiens
  source 1..73: mol_type = genomic DNA
gtttccgtagtgtagtggttatcacgttcgcctaacacgcgaaaggtccctggatcaaaaccaggcggaaaca

SEQ ID NO: 249 - DNA, 73 bp, Homo sapiens
  source 1..73: mol_type = genomic DNA
gtttccgtagtgtagtggttatcacgttcgcctaacacgcgaaaggtccgcggttcgaaaccgggcggaaaca

SEQ ID NO: 250 - DNA, 73 bp, Homo sapiens
  source 1..73: mol_type = genomic DNA
gtttccgtagtgtagtggttatcacgtttgcctaacacgcgaaaggtccccggttcgaaaccgggcagaaaca

SEQ ID NO: 251 - DNA, 72 bp, Homo sapiens
  source 1..72: mol_type = genomic DNA
gggggtgtagctcagtggtagagcgtatgcttaacattcatgaggctctgggttcgatccccagcacttcca

SEQ ID NO: 252 - DNA, 73 bp, Homo sapiens
  source 1..73: mol_type = genomic DNA
gtttccgtagtgtagtggttatcacgttcgcctcacacgcgaaaggtccccggttcgaaaccgggcggaaaca

SEQ ID NO: 253 - DNA, 73 bp, Homo sapiens
  source 1..73: mol_type = genomic DNA
gcttctgtagtgtagtggttatcacgttcgcctcacacgcgaaaggtccccggttcgaaaccgggcagaagca

SEQ ID NO: 254 - DNA, 73 bp, Homo sapiens
  source 1..73: mol_type = genomic DNA
gtttccgtagtgtagcggttatcacattcgcctcacacgcgaaaggtccccggttcgatcccgggcggaaaca

SEQ ID NO: 255 - DNA, 73 bp, Homo sapiens
  source 1..73: mol_type = genomic DNA
gtttccgtagtgtagtggttatcacgttcgcctcacacgcgaaaggtccccggttcgaaactgggcggaaaca

SEQ ID NO: 256 - DNA, 74 bp, Homo sapiens
  source 1..74: mol_type = genomic DNA
gtttccgtagtgtagtggttatcacgttcgcctcacacgcgtaaaggtccccggttcgaaaccgggcggaaaca

SEQ ID NO: 257 - DNA, 73 bp, Homo sapiens
  source 1..73: mol_type = genomic DNA
gtttccgtagtggagtggttatcacgttcgcctcacacgcgaaaggtccccggtttgaaaccaggcggaaaca

SEQ ID NO: 258 - DNA, 73 bp, Homo sapiens
  source 1..73: mol_type = genomic DNA
ggttccatagtgtagtggttatcacgtctgctttacacgcagaaggtcctgggttcgagccccagtggaacca

SEQ ID NO: 259 - DNA, 73 bp, Homo sapiens
  source 1..73: mol_type = genomic DNA
ggttccatagtgtagcggttatcacgtctgctttacacgcagaaggtcctgggttcgagccccagtggaacca

SEQ ID NO: 260 - DNA, 73 bp, Homo sapiens
  source 1..73: mol_type = genomic DNA
ggttccatagtgtagtggttatcacatctgctttacacgcagaaggtcctgggttcaagccccagtggaacca

SEQ ID NO: 261 - DNA, 73 bp, Homo sapiens
  source 1..73: mol_type = genomic DNA
gtttccgtggtgtagtggttatcacattcgccttacacgcgaaaggtcctcgggtcgaaaccgagcggaaaca

SEQ ID NO: 262 - DNA, 72 bp, Homo sapiens
  source 1..72: mol_type = genomic DNA
agcagagtggcgcagcggaagcgtgctgggcccataacccagaggtcgatggatcgaaaccatcctctgcta

SEQ ID NO: 263 - DNA, 72 bp, Homo sapiens
  source 1..72: mol_type = genomic DNA
agcagagtggcgcagcggaagcgtgctgggcccataacccagaggtcgatggatctaaaccatcctctgcta

SEQ ID NO: 264 - DNA, 73 bp, Homo sapiens
  source 1..73: mol_type = genomic DNA
tccctggtggtctagtggctaggattcggcgctttcaccgccgcggcccgggttcgattcccggtcagggaat

SEQ ID NO: 265 - DNA, 72 bp, Homo sapiens
  source 1..72: mol_type = genomic DNA
gcgttggtggtttagtggtagaattctcgcctcccatgcgggagacccgggttcaattcccggccactgcac

SEQ ID NO: 266 - DNA, 72 bp, Homo sapiens
  source 1..72: mol_type = genomic DNA
ggccttggtggtgcagtggtagaattctcgcctcccacgtgggagacccgggttcaattcccggccaatgca

SEQ ID NO: 267 - DNA, 73 bp, Homo sapiens
  source 1..73: mol_type = genomic DNA
gtccctggtggtctagtggctaggattcggcgctttcaccgccgcggcccgggttcgattcccggccagggaa

SEQ ID NO: 268 - DNA, 75 bp, Homo sapiens
  source 1..75: mol_type = genomic DNA
tgtctctgtggcgcaatcggttagcgcgttcggctgttaaccgaaagattggtggttcgagcccacccagggacg

SEQ ID NO: 269 - DNA, 86 bp, Homo sapiens
  source 1..86: mol_type = genomic DNA
tggctccgtggcgcaatggatagcgcattggacttctagaggctgaaggcattcaaaggttccgggttcgagtcccggcggagtcg

SEQ ID NO: 270 - DNA, 74 bp, Homo sapiens
  source 1..74: mol_type = genomic DNA
gcccggctagctcagtcggtagagcatgagactcttaatctcagggtcgtgggttcgagccccacgttgggcgc

SEQ ID NO: 271 - DNA, 73 bp, Homo sapiens
  source 1..73: mol_type = genomic DNA
gccgtgatcgtatagtggttagtactctgcgttgtggccgcagcaacctcggttcgaatccgagtcacggcag

SEQ ID NO: 272 - DNA, 73 bp, Homo sapiens
  source 1..73: mol_type = genomic DNA
gcgttggtggtatagtggtgagcatagctgccttccaagcagttgacccgggttcgattcccggccaacgcag

SEQ ID NO: 273 - DNA, 73 bp, Homo sapiens
  source 1..73: mol_type = genomic DNA
tccctggtggtctagtggttaggattcggcgctctcaccgccgcggcccgggttcgattcccggtcagggaaa

SEQ ID NO: 274 - DNA, 73 bp, Homo sapiens
  source 1..73: mol_type = genomic DNA
aggttccatggtgtaatggtgagcactctggactctgaatccagcgatccgagttcgagtctcggtggaacct

SEQ ID NO: 275 - DNA, 75 bp, Homo sapiens
  source 1..75: mol_type = genomic DNA
tgtctctgtggcgtagtcggttagcgcgttcggctgttaaccgaaaagttggtggttcgagcccacccaggaacg

SEQ ID NO: 276 - DNA, 75 bp, Homo sapiens
  source 1..75: mol_type = genomic DNA
tgtctctgtggcgcaatcggttagcgcgttcggctgttaaccgaaaggttggtggttcgagcccacccagggacg

SEQ ID NO: 277 - DNA, 75 bp, Homo sapiens
  source 1..75: mol_type = genomic DNA
gtctctgtggcgcaatcggttagcgcattcggctgttaaccgaaaggttggtggttcgagcccacccagggacgc

SEQ ID NO: 278 - DNA, 75 bp, Homo sapiens
  source 1..75: mol_type = genomic DNA
gtctctgtggcgcaatgggttagcgcgttcggctgttaaccgaaaggttggtggttcgagcccatccagggacgc

SEQ ID NO: 279 - DNA, 72 bp, Homo sapiens
  source 1..72: mol_type = genomic DNA
gcactggtggttcagtggtagaattctcgcctcacacgcgggacacccgggttcaattcccggtcaaggcaa

SEQ ID NO: 280 - DNA, 74 bp, Homo sapiens
  source 1..74: mol_type = genomic DNA
gtttccgtagtgtagtggttatcacgttcgcctcacacgcgaaaggtccccggttcgaaactgggcggaaacag

SEQ ID NO: 281 - DNA, 72 bp, Homo sapiens
  source 1..72: mol_type = genomic DNA
gcactggtggttcagtggtagaattctcgcctcccacgcgggagacccgggtttaattcccggtcaagataa

SEQ ID NO: 282 - DNA, 75 bp, Homo sapiens
  source 1..75: mol_type = genomic DNA
gtttccgtagtgtagtggttatcacgttcgcctcacacgcgtaaaggtccccggttcgaaaccgggcggaaacat

SEQ ID NO: 283 - DNA, 73 bp, Homo sapiens
  source 1..73: mol_type = genomic DNA
tagcagagtggcgcagcggaagcgtgctgggcccataacccagaggtcgatggatcgaaaccatcctctgcta

SEQ ID NO: 284 - DNA, 74 bp, Homo sapiens
  source 1..74: mol_type = genomic DNA
gtttccgtagtgtagtggttatcacgttcgcctcacacgcgaaaggtccccggttcgaaaccgggcggaaacaa

SEQ ID NO: 285 - DNA, 73 bp, Homo sapiens
  source 1..73: mol_type = genomic DNA
tcctcgttagtatagtggtgagtatccccgcctgtcacgcgggagaccggggttcgattccccgacggggagg

SEQ ID NO: 286 - DNA, 72 bp, Homo sapiens
  source 1..72: mol_type = genomic DNA
tgcatgggtggttcagtggtagaattctcgcctgccacgcgggaggcccgggttcgattcccggcccatgca

SEQ ID NO: 287 - DNA, 73 bp, Homo sapiens
  source 1..73: mol_type = genomic DNA
tccctggtggtctagtggttaggattcggcgctctcaccgccgcggcccgggttcgattcccggtcagggaag

SEQ ID NO: 288 - DNA, 73 bp, Homo sapiens
  source 1..73: mol_type = genomic DNA
atccttgttactatagtggtgagtatctctgcctgtcatgcgtgagagagggggtcgattccccgacggggag

SEQ ID NO: 289 - DNA, 72 bp, Homo sapiens
  source 1..72: mol_type = genomic DNA
gcattggtggttcagtggtagaattctcgcctgccacgcgggaggcccgggttcgattcccggccaatgcac

SEQ ID NO: 290 - DNA, 84 bp, Homo sapiens
  source 1..84: mol_type = genomic DNA
gtcaggatggccgagcggtctaaggcgctgcgttcaggtcgcagtctcccctggaggcgtgggttcgaatcccactcctgacaa

SEQ ID NO: 291 - DNA, 73 bp, Homo sapiens
  source 1..73: mol_type = genomic DNA
cgcgttggtggtatagtggtgagcatagctgccttccaagcagttgacccgggttcgattcccggccaacgca

SEQ ID NO: 292 - DNA, 75 bp, Homo sapiens
  source 1..75: mol_type = genomic DNA
cgtctctgtggcgcaatcggttagcgcgttcggctgttaaccgaaaggttggtggttcgatcccacccagggacg

SEQ ID NO: 293 - DNA, 73 bp, Homo sapiens
  source 1..73: mol_type = genomic DNA
cgcgttggtggtgtagtggtgagcacagctgcctttcaagcagttaacgcgggttcgattcccgggtaacgaa

SEQ ID NO: 294 - DNA, 73 bp, Homo sapiens
  source 1..73: mol_type = genomic DNA
cggctcgttggtctaggggtatgattctcgcttcgggtgcgagaggtcccgggttcaaatcccggacgagccc

SEQ ID NO: 295 - DNA, 73 bp, Homo sapiens
  source 1..73: mol_type = genomic DNA
ggctcgttggtctaggggtatgattctcgcttagggtgcgagaggtcccgggttcaaatcccggacgagccct

SEQ ID NO: 296 - DNA, 74 bp, Homo sapiens
  source 1..74: mol_type = genomic DNA
cgcccggatagctcagtcggtagagcatcagacttttaatctgagggtccagggttcaagtccctgttcgggcg

SEQ ID NO: 297 - DNA, 74 bp, Homo sapiens
  source 1..74: mol_type = genomic DNA
gcccggatagctcagtcggtagagcatcagacttttaatctgagggtccagggttcaagtccctgttcgggcgt

SEQ ID NO: 298 - DNA, 107 bp, Homo sapiens
  source 1..107: mol_type = genomic DNA
tgtcaggatggccgagtggtctaaggcgccagactcaaggtaagcaccttgcctgcgggctttctggtctccggatggaggcgtgggttcgaatcccacttctgaca

SEQ ID NO: 299 - DNA, 73 bp, Homo sapiens
  source 1..73: mol_type = genomic DNA
ttccctggtggtctagtggttaggattcggcgctctcaccgccgcggcccgggttcgattcccggtcaggaaa

SEQ ID NO: 300 - DNA, 90 bp, Homo sapiens
  source 1..90: mol_type = genomic DNA
gccttcgatagctcagttggtagagcggaggactgtagtggatagggcgtggcaatccttaggtcgctggttcgattccggctcgaagga

SEQ ID NO: 301 - DNA, 74 bp, Homo sapiens
  source 1..74: mol_type = genomic DNA
cgggggattagctcaaatggtagagcgctcgcttagcatgcgagaggtagcgggatcgatgcccgcatcctcca

SEQ ID NO: 302 - DNA, 94 bp, Homo sapiens
  source 1..94: mol_type = genomic DNA
agctccagtggcgcaatcggttagcgcgcggtacttatacagcagtacatgcagagcaatgccgaggttgtgagttcgagcctcacctggagca

SEQ ID NO: 303 - DNA, 72 bp, Homo sapiens
  source 1..72: mol_type = genomic DNA
gcgccgctggtgtagtggtatcatgcaagattcccattcttgcgacccgggttcgattcccgggcggcgcat

SEQ ID NO: 304 - DNA, 73 bp, Homo sapiens
  source 1..73: mol_type = genomic DNA
tcccatatggtctagcggttaggattcctggttttcacccaggtggcccgggttcgactcccggtatgggaac

SEQ ID NO: 305 - DNA, 73 bp, Homo sapiens
  source 1..73: mol_type = genomic DNA
gggggatgtagctcagtggtagagcgcgcgcttcgcatgtgtgaggtcccgggttcaatccccggcatctcca

SEQ ID NO: 306 - DNA, 72 bp, Homo sapiens
  source 1..72: mol_type = genomic DNA
gcattggtggttcagtggtagaattctcgcctgccacgcgggaggcccgggttcgattcccggccaatgcaa

SEQ ID NO: 307 - DNA, 74 bp, Homo sapiens
  source 1..74: mol_type = genomic DNA
gggccagtggcgcaatggataacgcgtctgactacggatcagaagattctaggttcgactcctggctggctcgc

SEQ ID NO: 308 - DNA, 74 bp, Homo sapiens
  source 1..74: mol_type = genomic DNA
ggtttccgtagtgtagtggttatcacgttcgcctaacacgcgaaaggtccccggttcgaaaccgggcggaaaca

SEQ ID NO: 309 - DNA, 74 bp, Homo sapiens
  source 1..74: mol_type = genomic DNA
agtttccgtagtgtagtggttatcacgttcgcctaacacgcgaaaggtccccggttcgaaaccgggcggaaaca

SEQ ID NO: 310 - DNA, 83 bp, Homo sapiens
  source 1..83: mol_type = genomic DNA
aggtagcgtggccgagcggtctaaggcgctggattaaggctccagtctcttcgggggcgtgggttcgaatcccaccgctgcca

SEQ ID NO: 311 - DNA, 74 bp, Homo sapiens
  source 1..74: mol_type = genomic DNA
gtttccgtagtgtagtggtcatcacgttcgcctaacacgcgaaaggtccccggttcgaaaccgggcggaaacat

SEQ ID NO: 312 - DNA, 73 bp, Homo sapiens
  source 1..73: mol_type = genomic DNA
ggctcgttggtctaggggtatgattctcgctttgggtgcgagaggtcccgggttcaaatcccggacgagccca

SEQ ID NO: 313 - DNA, 73 bp, Homo sapiens
  source 1..73: mol_type = genomic DNA
ggctccatagctcaggggttagagcactggtcttgtaaaccagggtcgcgagttcaaatctcgctggggcctg

SEQ ID NO: 314 - DNA, 73 bp, Homo sapiens
  source 1..73: mol_type = genomic DNA
tggggatgtagctcagtggtagagcgcatgctttgcatgtatgaggccccgggttcgatccccggcatctcca

SEQ ID NO: 315 - DNA, 74 bp, Homo sapiens
  source 1..74: mol_type = genomic DNA
cgcccggctagctcagtcggtagagcatgagactcttaatctcagggtcgtgggttcgagccccacgttgggcg

SEQ ID NO: 316 - DNA, 74 bp, Homo sapiens
  source 1..74: mol_type = genomic DNA
gtttccgtagtgtagtggttatcacgttcgcctaacacgcgaaaggtccccggttcgaaaccgggcggaaacaa

SEQ ID NO: 317 - DNA, 74 bp, Homo sapiens
  source 1..74: mol_type = genomic DNA
gcccggctagctcagtcggtagagcatgagactcttaatctcagggtcgtgggttcgagccccacgttgggcgt

SEQ ID NO: 318 - DNA, 74 bp, Homo sapiens
  source 1..74: mol_type = genomic DNA
gtttccgtagtgtagtggttatcacgttcgcctcacacgcgaaaggtccccggttcgaaaccgggcggaaacac

SEQ ID NO: 319 - DNA, 73 bp, Homo sapiens
  source 1..73: mol_type = genomic DNA
cagcagagtggcgcagcggaagcgtgctgggcccataacccagaggtcgatggatcgaaaccatcctctgcta

SEQ ID NO: 320 - DNA, 85 bp, Homo sapiens
  source 1..85: mol_type = genomic DNA
ggagaggcctggccgagtggttaaggcgatggactgctaatccattgtgctctgcacgcgtgggttcgaatcccatcctcgtcgc

SEQ ID NO: 321 - DNA, 73 bp, Homo sapiens
  source 1..73: mol_type = genomic DNA
ggccccatggtgtaatggttagcactctggactttgaatccagcgatccgagttcaaatctcggtgggacctg

SEQ ID NO: 322 - DNA, 73 bp, Homo sapiens
  source 1..73: mol_type = genomic DNA
ggccccatggtgtaatggttagcactctggactttgaatccagcgatccgagttcaaatctcggtgggaccta

SEQ ID NO: 323 - DNA, 83 bp, Homo sapiens
  source 1..83: mol_type = genomic DNA
gtagtcgtggccgagtggttaaggcgatggacttgaaatccattggggtctccccgcgcaggttcgaatcctgccgactacgg

SEQ ID NO: 324 - DNA, 73 bp, Homo sapiens
  source 1..73: mol_type = genomic DNA
agcagagtggcgcagcggaagcgtgctgggcccataacccagaggtcgatggatcgaaaccatcctctgctat

SEQ ID NO: 325 - DNA, 74 bp, Homo sapiens
  source 1..74: mol_type = genomic DNA
ggaccacgtggcctaatggataaggcgtctgacttcggatcagaagattgagggttcgaatccctccgtggtta

SEQ ID NO: 326 - DNA, 83 bp, Homo sapiens
  source 1..83: mol_type = genomic DNA
tgtagtcgtggccgagtggttaaggcgatggactagaaatccattggggtctccccgcgcaggttcgaatcctgccgactacg

SEQ ID NO: 327 - DNA, 73 bp, Homo sapiens
  source 1..73: mol_type = genomic DNA
agcagagtggcgcagcggaagcgtgctgggcccataacccagaggtcgatggatcgaaaccatcctctgctag

SEQ ID NO: 328 - DNA, 84 bp, Homo sapiens
  source 1..84: mol_type = genomic DNA
cgtcaggatggccgagcggtctaaggcgctgcgttcaggtcgcagtctcccctggaggcgtgggttcgaatcccactcctgaca

SEQ ID NO: 329 - DNA, 75 bp, Homo sapiens
  source 1..75: mol_type = genomic DNA
ggctccgtggcttagctggttaaagcgcctgtctagtaaacaggagatcctgggttcgaatcccagcggggcctg

SEQ ID NO: 330 - DNA, 74 bp, Homo sapiens
  source 1..74: mol_type = genomic DNA
agggccagtggcgcaatggataacgcgtctgactacggatcagaagattccaggttcgactcctggctggctcg

SEQ ID NO: 331 - DNA, 74 bp, Homo sapiens
  source 1..74: mol_type = genomic DNA
ggtttccgtagtgtagtggttatcacgttcgcctcacacgcgaaaggtccccggttcgaaaccgggcggaaaca

SEQ ID NO: 332 - DNA, 73 bp, Homo sapiens
  source 1..73: mol_type = genomic DNA
aggggatgtagctcagtggtagagcgcatgcttcgcatgtatgaggtcccgggttcgatccccggcatctcca

SEQ ID NO: 333 - DNA, 75 bp, Homo sapiens
  source 1..75: mol_type = genomic DNA
tggccggttagctcagttggttagagcgtggtgctaataacgccaaggtcgcgggttcgatccccgtacgggcca

SEQ ID NO: 334 - DNA, 73 bp, Homo sapiens
  source 1..73: mol_type = genomic DNA
cggctcgttggtctaggggtatgattctcgcttagggtgcgagaggtcccgggttcaaatcccggacgagccc

SEQ ID NO: 335 - DNA, 74 bp, Homo sapiens
  source 1..74: mol_type = genomic DNA
agcccggctagctcagtcggtagagcatgagactcttaatctcagggtcgtgggttcgagccccacgttgggcg

SEQ ID NO: 336 - DNA, 92 bp, Homo sapiens
  source 1..92: mol_type = genomic DNA
tccttcgatagctcagttggtagagcggaggactgtagttggctgtgtccttagacatccttaggtcgctggttcgaatccggctcgaagga

SEQ ID NO: 337 - DNA, 74 bp, Homo sapiens
  source 1..74: mol_type = genomic DNA
ggggaattagctcaaatggtagagcgctcgcttagcatgcgagaggtagcgggatcgatgcccgcattctccag

SEQ ID NO: 338 - DNA, 74 bp, Homo sapiens
  source 1..74: mol_type = genomic DNA
cgccctcttagcgcagcgggcagcgcgtcagtctcataatctgaaggtcctgagttcgagcctcagagagggca

SEQ ID NO: 339 - DNA, 95 bp, Homo sapiens
  source 1..95: mol_type = genomic DNA
tgctccagtggcgcaatcggttagcgcgcggtacttatatggcagtatgtgtgcgagtgatgccgaggttgtgagttcgagcctcacctggagca

SEQ ID NO: 340 - DNA, 73 bp, Homo sapiens
  source 1..73: mol_type = genomic DNA
tgccgtgatcgtatagtggttagtactctgcgttgtggccgcagcaacctcggttcgaatccgagtcacggca

SEQ ID NO: 341 - DNA, 75 bp, Homo sapiens
  source 1..75: mol_type = genomic DNA
ggccggttagctcagttggttagagcgtggtgctaataacgccaaggtcgcgggttcgatccccgtacgggccac

SEQ ID NO: 342 - DNA, 74 bp, Homo sapiens
  source 1..74: mol_type = genomic DNA
agtttccgtagtgtagtggttatcacgtttgcctaacacgcgaaaggtccccggttcgaaaccgggcagaaaca

SEQ ID NO: 343 - DNA, 74 bp, Homo sapiens
  source 1..74: mol_type = genomic DNA
gcttctgtagtgtagtggttatcacgttcgcctcacacgcgaaaggtccccggttcgaaaccgggcagaagcaa

SEQ ID NO: 344 - DNA, 73 bp, Homo sapiens
  source 1..73: mol_type = genomic DNA
ttcctcgttagtatagtggtgagtatccccgcctgtcacgcgggagaccggggttcgattccccgacggggag

SEQ ID NO: 345 - DNA, 83 bp, Homo sapiens
  source 1..83: mol_type = genomic DNA
gtagtcgtggccgagtggttaaggcgatggacttgaaatccattggggtttccccgcgcaggttcgaatcctgtcggctacgg

SEQ ID NO: 346 - DNA, 73 bp, Homo sapiens
  source 1..73: mol_type = genomic DNA
aggttccatggtgtaatggttagcactctggactctgaatccagcgatccgagttcaaatctcggtggaacct

SEQ ID NO: 347 - DNA, 73 bp, Homo sapiens
  source 1..73: mol_type = genomic DNA
tcctcgttagtatagtggtgagtgtccccgtctgtcacgcgggagaccggggttcgattccccgacggggaga

SEQ ID NO: 348 - DNA, 74 bp, Homo sapiens
  source 1..74: mol_type = genomic DNA
gtttccgtagtgtagtggttatcacgttcgcctaacacgcgaaaggtccctggatcaaaaccaggcggaaacaa

SEQ ID NO: 349 - DNA, 75 bp, Homo sapiens
  source 1..75: mol_type = genomic DNA
cggccggttagctcagttggttagagcgtggtgctaataacgccaaggtcgcgggttcgatccccgtactggcca

SEQ ID NO: 350 - DNA, 73 bp, Homo sapiens
  source 1..73: mol_type = genomic DNA
ggccccatggtgtaatggtcagcactctggactctgaatccagcgatccgagttcaaatctcggtgggaccca

SEQ ID NO: 351 - DNA, 73 bp, Homo sapiens
  source 1..73: mol_type = genomic DNA
ggccccatggtgtaatggttagcactctggactttgaatccagcgatccgagttcaaatctcggtgggacctt

SEQ ID NO: 352 - DNA, 73 bp, Homo sapiens
  source 1..73: mol_type = genomic DNA
tgggggtgtagctcagtggtagagcgcgtgcttagcatgtacgaggtcccgggttcaatccccggcacctcca

SEQ ID NO: 353 - DNA, 73 bp, Homo sapiens
  source 1..73: mol_type = genomic DNA
ggggatgtagctcagtggtagagcgcatgcttagcatgcatgaggtcccgggttcgatccccagcatctccag

SEQ ID NO: 354 - DNA, 73 bp, Homo sapiens
  source 1..73: mol_type = genomic DNA
agggggtgtagctcagtggtagagcgcgtgcttcgcatgtacgaggccccgggttcgacccccggctcctcca

SEQ ID NO: 355 - DNA, 73 bp, Homo sapiens
  source 1..73: mol_type = genomic DNA
gggggtgtagctcagtggtagagcgcgtgcttagcatgcacgaggccccgggttcaatccccggcacctccat

SEQ ID NO: 356 - DNA, 73 bp, Homo sapiens
  source 1..73: mol_type = genomic DNA
gggggtgtagctcagtggtagagcgcgtgcttagcatgcacgaggccccgggttcaatccccggcacctccag

SEQ ID NO: 357 - DNA, 107 bp, Homo sapiens
  source 1..107: mol_type = genomic DNA
gtcaggatggccgagtggtctaaggcgccagactcaagctaagcttcctccgcggtggggattctggtctccaatggaggcgtgggttcgaatcccacttctgacac

SEQ ID NO: 358 - DNA, 106 bp, Homo sapiens
  source 1..106: mol_type = genomic DNA
tgtcaggatggccgagtggtctaaggcgccagactcaagcttggcttcctcgtgttgaggattctggtctccaatggaggcgtgggttcgaatcccacttctgaca

SEQ ID NO: 359 - DNA, 73 bp, Homo sapiens
  source 1..73: mol_type = genomic DNA
ggttccatggtgtaatggttagcactctggactctgaatccagcgatccgagttcaaatctcggtggaacctt

SEQ ID NO: 360 - DNA, 83 bp, Homo sapiens
  source 1..83: mol_type = genomic DNA
ggtagcgtggccgagcggtctaaggcgctggattaaggctccagtctcttcgggggcgtgggttcgaatcccaccgctgccag

SEQ ID NO: 361 - DNA, 74 bp, Homo sapiens
  source 1..74: mol_type = genomic DNA
tgcctccttagcgcagtaggcagcgcgtcagtctcataatctgaaggtcctgagttcgaacctcagagggggca

SEQ ID NO: 362 - DNA, 74 bp, Homo sapiens
  source 1..74: mol_type = genomic DNA
agcccggatagctcagtcggtagagcatcagacttttaatctgagggtccagggttcaagtccctgttcgggcg

SEQ ID NO: 363 - DNA, 74 bp, Homo sapiens
  source 1..74: mol_type = genomic DNA
gcctccttagcgcagtaggcagcgcgtcagtctcataatctgaaggtcctgagttcgaacctcagagggggcag

SEQ ID NO: 364 - DNA, 73 bp, Homo sapiens
  source 1..73: mol_type = genomic DNA
ttccctggtggtctagtggttaggattcggcgctctcaccgccgcggcccgggttcgattcccggtcagggaa

SEQ ID NO: 365 - DNA, 84 bp, Homo sapiens
  source 1..84: mol_type = genomic DNA
caccaggatggccgagtggttaaggcgttggacttaagatccaatggacatatgtccgcgtgggttcgaaccccactcctggta

SEQ ID NO: 366 - DNA, 73 bp, Homo sapiens
  source 1..73: mol_type = genomic DNA
tggctcgttggtctaggggtatgattctcgcttagggtgcgagaggtcccgggttcaaatcccggacgagccc

SEQ ID NO: 367 - DNA, 74 bp, Homo sapiens
  source 1..74: mol_type = genomic DNA
agccccagtggcctaatggataaggcattggcctcctaagccagggattgtgggttcgagtcccatctggggtg

SEQ ID NO: 368 - DNA, 73 bp, Homo sapiens
  source 1..73: mol_type = genomic DNA
ggggatatagctcaggggtagagcatttgactgcagatcaagaggtccccggttcaaatccgggtgccccccc

SEQ ID NO: 369 - DNA, 94 bp, Homo sapiens
  source 1..94: mol_type = genomic DNA
cccttcgatagctcagctggtagagcggaggactgtagctacttcctcagcaggagacatccttaggtcgctggttcgattccggctcgaagga

SEQ ID NO: 370 - DNA, 90 bp, Homo sapiens
  source 1..90: mol_type = genomic DNA
cccttcgatagctcagctggtagagcggaggactgtaggcgcgcgcccgtggccatccttaggtcgctggttcgattccggctcgaagga

SEQ ID NO: 371 - DNA, 74 bp, Homo sapiens
  source 1..74: mol_type = genomic DNA
tgggggattagctcaaatggtagagcgctcgcttagcatgcgagaggtagcgggatcgatgcccgcatcctcca

SEQ ID NO: 372 - DNA, 83 bp, Homo sapiens
  source 1..83: mol_type = genomic DNA
gtagtcgtggccgagtggttaaggcgatggactagaaatccattggggtctccccgcgcaggttcgaatcctgccgactacgg

SEQ ID NO: 373 - DNA, 74 bp, Homo sapiens
  source 1..74: mol_type = genomic DNA
gcctcgttagcgcagtaggtagcgcgtcagtctcataatctgaaggtcgtgagttcgatcctcacacggggcac

SEQ ID NO: 374 - DNA, 92 bp, Homo sapiens
  source 1..92: mol_type = genomic DNA
ggctctgtggcgcaatggatagcgcattggacttctagctgagcctagtgtggtcattcaaaggttgtgggttcgagtcccaccagagtcga

SEQ ID NO: 375 - DNA, 75 bp, Homo sapiens
  source 1..75: mol_type = genomic DNA
gtctctgtggcgcaatcggttagcgcgttcggctgttaaccgaaaggttggtggttcgagcccacccagggacgc

SEQ ID NO: 376 - DNA, 83 bp, Homo sapiens
  source 1..83: mol_type = genomic DNA
ggcagcgatggccgagtggttaaggcgttggacttgaaatccaatggggtctccccgcgcaggttcgaaccctgctcgctgcg

SEQ ID NO: 377 - DNA, 74 bp, Homo sapiens
  source 1..74: mol_type = genomic DNA
ggttccatagtgtagtggttatcacgtctgctttacacgcagaaggtcctgggttcgagccccagtggaaccat

SEQ ID NO: 378 - DNA, 74 bp, Homo sapiens
  source 1..74: mol_type = genomic DNA
ggttccatagtgtagcggttatcacgtctgctttacacgcagaaggtcctgggttcgagccccagtggaaccac

SEQ ID NO: 379 - DNA, 87 bp, Homo sapiens
  source 1..87: mol_type = genomic DNA
tggctctgtggcgcaatggatagcgcattggacttctagatagttagagaaattcaaaggttgtgggttcgagtcccaccagagtcg

SEQ ID NO: 380 - DNA, 84 bp, Homo sapiens
  source 1..84: mol_type = genomic DNA
taccagaatggccgagtggttaaggcgttggacttaagatccaatggattcatatccgcgtgggttcgaaccccacttctggta

SEQ ID NO: 381 - DNA, 74 bp, Homo sapiens
  source 1..74: mol_type = genomic DNA
ggcccggatagctcagtcggtagagcatcagacttttaatctgagggtccggggttcaagtccctgttcgggcg

SEQ ID NO: 382 - DNA, 74 bp, Homo sapiens
  source 1..74: mol_type = genomic DNA
gccgaaatagctcagttgggagagcgttagactgaagatctaaaggtccctggttcgatcccgggtttcggcag

SEQ ID NO: 383 - DNA, 74 bp, Homo sapiens
  source 1..74: mol_type = genomic DNA
gcccggatagctcagtcggtagagcatcagacttttaatctgagggtccagggttcaagtccctgttcgggcgg

SEQ ID NO: 384 - DNA, 74 bp, Homo sapiens
  source 1..74: mol_type = genomic DNA
gccgaaatagctcagttgggagagcgttagactgaagatctaaaggtccctggttcaatcccgggtttcggcag

SEQ ID NO: 385 - DNA, 83 bp, Homo sapiens
  source 1..83: mol_type = genomic DNA
ggacgaggtggccgagtggttaaggcgatggactgctaatccattgtgctttgcacgcgtgggttcgaatcccatcctcgtcg

SEQ ID NO: 386 - DNA, 73 bp, Homo sapiens
  source 1..73: mol_type = genomic DNA
ggctcgttggtctaggggtatgattctcggtttgggtccgagaggtcccgggttcaaatcccggacgagcccc

SEQ ID NO: 387 - DNA, 83 bp, Homo sapiens
  source 1..83: mol_type = genomic DNA
agtcacggtggccgagtggttaaggcgttggactcgaaatccaatggggtttccccgcacaggttcgaatcctgttcgtgacg

SEQ ID NO: 388 - DNA, 73 bp, Homo sapiens
  source 1..73: mol_type = genomic DNA
ctcctcgttagtatagtggttagtatccccgcctgtcacgcgggagaccggggttcaattccccgacggggag

SEQ ID NO: 389 - DNA, 73 bp, Homo sapiens
  source 1..73: mol_type = genomic DNA
ggacctcgtggcgcaacggtagcgcgtctgactccagatcagaaggctgcgtgttcgaatcacgtcggggtca

SEQ ID NO: 390 - DNA, 73 bp, Homo sapiens
  source 1..73: mol_type = genomic DNA
ggggatgtagctcagtggtagagcgcatgctttgcatgtatgaggccccgggttcgatccccggcatctccat

SEQ ID NO: 391 - DNA, 74 bp, Homo sapiens
  source 1..74: mol_type = genomic DNA
gccgaaatagctcagttgggagagcgttagactgaagatctaaaggtccctggttcgatcccgggtttcggcac

SEQ ID NO: 392 - DNA, 73 bp, Homo sapiens
  source 1..73: mol_type = genomic DNA
aggggatgtagctcagtggtagagcgcatgctttgcacgtatgaggccccgggttcaatccccggcatctcca

SEQ ID NO: 393 - DNA, 75 bp, Homo sapiens
  source 1..75: mol_type = genomic DNA
gtctctgtggcgcaatcggttagcgcgttcggctgttaaccgaaaggttggtggttcgagcccacccagggacgg

SEQ ID NO: 394 - DNA, 73 bp, Homo sapiens
  source 1..73: mol_type = genomic DNA
tcccacatggtctagcggttaggattcctggttttcacccaggcggcccgggttcgactcccggtgtgggaac

SEQ ID NO: 395 - DNA, 74 bp, Homo sapiens
  source 1..74: mol_type = genomic DNA
ggctccatagctcaggggttagagcgctggtcttgtaaaccaggggtcgcgagttcaattctcgctggggcctg

SEQ ID NO: 396 - DNA, 83 bp, Homo sapiens
  source 1..83: mol_type = genomic DNA
tggtagtgtggccgagcggtctaaggcgctggatttaggctccagtctcttcgggggcgtgggttcgaatcccaccactgcca

SEQ ID NO: 397 - DNA, 74 bp, Homo sapiens
  source 1..74: mol_type = genomic DNA
ggctccatagctcaggggttagagcactggtcttgtaaaccaggggtcgcgagttcaaatctcgctggggcctc

SEQ ID NO: 398 - DNA, 73 bp, Homo sapiens
  source 1..73: mol_type = genomic DNA
tggctcgttggtctagtggtatgattctcgctttgggtgcgagaggtcccgggttcaaatcccggacgagccc

SEQ ID NO: 399 - DNA, 95 bp, Homo sapiens
  source 1..95: mol_type = genomic DNA
ccttcgatagctcagctggtagagcggaggactgtagattgtacagacatttgcggacatccttaggtcgctggttcgattccggctcgaaggaa

SEQ ID NO: 400 - DNA, 74 bp, Homo sapiens
  source 1..74: mol_type = genomic DNA
aggccctatagctcaggggttagagcactggtcttgtaaaccaggggtcgcgagttcaaatctcgctggggcct

SEQ ID NO: 401 - DNA, 90 bp, Homo sapiens
  source 1..90: mol_type = genomic DNA
tccttcgatagctcagctggtagagcggaggactgtagtacttaatgtgtggtcatccttaggtcgctggttcgattccggctcgaagga

SEQ ID NO: 402 - DNA, 73 bp, Homo sapiens
  source 1..73: mol_type = genomic DNA
tggctcgttggtctaggggtatgattctcgctttgggtgcgagaggtcccgggttcaaatcccggacgagccc

SEQ ID NO: 403 - DNA, 74 bp, Homo sapiens
  source 1..74: mol_type = genomic DNA
gcccggctagctcagtcggtagagcatgggactcttaatcccagggtcgtgggttcgagccccacgttgggcgc

SEQ ID NO: 404 - DNA, 75 bp, Homo sapiens
  source 1..75: mol_type = genomic DNA
cggccggttagctcagttggttagagcgtggtgctaataacgccaaggtcgcgggttcgatccccgtacgggcca

SEQ ID NO: 405 - DNA, 73 bp, Homo sapiens
  source 1..73: mol_type = genomic DNA
tcccacatggtctagcggttaggattcctggttttcacccaggcggcccgggttcgactcccggtgtgggaat

SEQ ID NO: 406 - DNA, 83 bp, Homo sapiens
  source 1..83: mol_type = genomic DNA
gacgaggtggccgagtggttaaggcgatggactgctaatccattgtgctctgcacgcgtgggttcgaatcccatcctcgtcga

SEQ ID NO: 407 - DNA, 73 bp, Homo sapiens
  source 1..73: mol_type = genomic DNA
gccgtgatcgtatagtggttagtactctgcgttgtggccgcagcaacctcggttcgaatccgagtcacggcat

SEQ ID NO: 408 - DNA, 73 bp, Homo sapiens
  source 1..73: mol_type = genomic DNA
cgccgtgatcgtatagtggttagtactctgcgttgtggccgcagcaacctcggttcgaatccgagtcacggca

SEQ ID NO: 409 - DNA, 73 bp, Homo sapiens
  source 1..73: mol_type = genomic DNA
ggttccatggtgtaatggttagcactctggactctgaatccagcgatccgagttcaaatctcggtggaacctg

SEQ ID NO: 410 - DNA, 74 bp, Homo sapiens
  source 1..74: mol_type = genomic DNA
tgcccggctagctcagtcggtagagcatgggactcttaatcccagggtcgtgggttcgagccccacgttgggcg

SEQ ID NO: 411 - DNA, 74 bp, Homo sapiens
  source 1..74: mol_type = genomic DNA
gggccgcgtggcctaatggataaggcgtctgacttcggatcagaagattgcaggttcgagtcctgccgcggtcg

SEQ ID NO: 412 - DNA, 72 bp, Homo sapiens
  source 1..72: mol_type = genomic DNA
gcgccgctggtgtagtggtatcatgcaagattcccattcttgcgacccgggttcgattcccgggcggcgcac

SEQ ID NO: 413 - DNA, 74 bp, Homo sapiens
  source 1..74: mol_type = genomic DNA
gggccgcgtggcctaatggataaggcgtctgattccggatcagaagattgagggttcgagtcccttcgtggtcg

SEQ ID NO: 414 - DNA, 74 bp, Homo sapiens
  source 1..74: mol_type = genomic DNA
cgccccggtggcctaatggataaggcattggcctcctaagccagggattgtgggttcgagtcccacccggggta

SEQ ID NO: 415 - DNA, 74 bp, Homo sapiens
  source 1..74: mol_type = genomic DNA
gcccggctagctcagtcggtagagcatgagacccttaatctcagggtcgtgggttcgagccccacgttgggcgt

SEQ ID NO: 416 - DNA, 73 bp, Homo sapiens
  source 1..73: mol_type = genomic DNA
aggcgcggtggccaagtggtaaggcgtcggtctcgtaaaccgaagatcacgggttcgaaccccgtccgtgcct

SEQ ID NO: 417 - DNA, 83 bp, Homo sapiens
  source 1..83: mol_type = genomic DNA
ggtagcgtggccgagtggtctaaggcgctggatttaggctccagtcatttcgatggcgtgggttcgaatcccaccgctgccac

SEQ ID NO: 418 - DNA, 83 bp, Homo sapiens
  source 1..83: mol_type = genomic DNA
gggtagcgtggccgagcggtctaaggcgctggattaaggctccagtctcttcgggggcgtgggttcgaatcccaccgctgcca

SEQ ID NO: 419 - DNA, 84 bp, Homo sapiens
  source 1..84: mol_type = genomic DNA
agtcaggatggccgagcggtctaaggcgctgcgttcaggtcgcagtctcccctggaggcgtgggttcgaatcccacttctgaca

SEQ ID NO: 420 - DNA, 84 bp, Homo sapiens
  source 1..84: mol_type = genomic DNA
gtcaggatggccgagcggtctaaggcgctgcgttcaggtcgcagtctcccctggaggcgtgggttcgaatcccacttctgacag

SEQ ID NO: 421 - DNA, 74 bp, Homo sapiens
  source 1..74: mol_type = genomic DNA
gcctcgttagcgcagtaggcagcgcgtcagtctcataatctgaaggtcgtgagttcgagcctcacacggggcag

SEQ ID NO: 422 - DNA, 83 bp, Homo sapiens
  source 1..83: mol_type = genomic DNA
ggtagcgtggccgagcggtctaaggcgctggatttaggctccagtctcttcggaggcgtgggttcgaatcccaccgctgccag

SEQ ID NO: 423 - DNA, 89 bp, Homo sapiens
  source 1..89: mol_type = genomic DNA
tggctctgtggcgcaatggatagcgcattggacttctagtgacgaatagagcaattcaaaggttgtgggttcgaatcccaccagagtcg

SEQ ID NO: 424 - DNA, 72 bp, Homo sapiens
  source 1..72: mol_type = genomic DNA
cgcattggtggttcagtggtagaattctcgcctgccacgcgggaggcccgggttcgattcccggccaatgca

SEQ ID NO: 425 - DNA, 83 bp, Homo sapiens
  source 1..83: mol_type = genomic DNA
gctgtgatggccgagtggttaaggcgttggactcgaaatccaatggggtctccccgcgcaggttcgaatcctgctcacagcgt

SEQ ID NO: 426 - DNA, 75 bp, Homo sapiens
  source 1..75: mol_type = genomic DNA
ggcgccgtggcttagctggttaaagcgcctgtctagtaaacaggagatcctgggttcgaatcccagcggtgcctg

SEQ ID NO: 427 - DNA, 73 bp, Homo sapiens
  source 1..73: mol_type = genomic DNA
cgacctcgtggcgcaacggtagcgcgtctgactccagatcagaaggttgcgtgttcaaatcacgtcggggtca

SEQ ID NO: 428 - DNA, 83 bp, Homo sapiens
  source 1..83: mol_type = genomic DNA
agacgaggtggccgagtggttaaggcgatggactgctaatccattgtgctctgcacgcgtgggttcgaatcccatcctcgtcg

SEQ ID NO: 429 - DNA, 75 bp, Homo sapiens
  source 1..75: mol_type = genomic DNA
cggcgccgtggcttagttggttaaagcgcctgtctagtaaacaggagatcctgggttcgaatcccagcggtgcct

SEQ ID NO: 430 - DNA, 73 bp, Homo sapiens
  source 1..73: mol_type = genomic DNA
ggcctcgtggcgcaacggtagcgcgtctgactccagatcagaaggttgcgtgttcaaatcacgtcggggtcaa

SEQ ID NO: 431 - DNA, 73 bp, Homo sapiens
  source 1..73: mol_type = genomic DNA
agcgttggtggtatagtggtaagcatagctgccttccaagcagttgacccgggttcgattcccggccaacgca

SEQ ID NO: 432 - DNA, 73 bp, Homo sapiens
  source 1..73: mol_type = genomic DNA
tcctcgttagtatagtggtgagtatccccgcctgtcacgcgggagaccggggttcgattccccgacggggaga

SEQ ID NO: 433 - DNA, 73 bp, Homo sapiens
  source 1..73: mol_type = genomic DNA
ggctcgttggtctaggggtatgattctcgcttcgggtgcgagaggtcccgggttcaaatcccggacgagccct

SEQ ID NO: 434 - DNA, 75 bp, Homo sapiens
  source 1..75: mol_type = genomic DNA
ggcgccgtggcttagttggttaaagcgcctgtctagtaaacaggagatcctgggttcgaatcccagcggtgcctt

SEQ ID NO: 435 - DNA, 83 bp, Homo sapiens
  source 1..83: mol_type = genomic DNA
gtagtcgtggccgagtggttaaggcgatggactagaaatccattggggtctccccgcgcaggttcgaatcctgccgactacgt

SEQ ID NO: 436 - DNA, 73 bp, Homo sapiens
  source 1..73: mol_type = genomic DNA
tgacctcgtggcgcaatggtagcgcgtctgactccagatcagaaggttgcgtgttcaagtcacgtcggggtca

SEQ ID NO: 437 - DNA, 73 bp, Homo sapiens
  source 1..73: mol_type = genomic DNA
aggcgcggtggccaagtggtaaggcgtcggtctcgtaaaccgaagatcgcgggttcgaaccccgtccgtgcct

SEQ ID NO: 438 - DNA, 73 bp, Homo sapiens
  source 1..73: mol_type = genomic DNA
agggggtatagctcagtggtagagcatttgactgcagatcaagaggtccccggttcaaatccgggtgccccct

SEQ ID NO: 439 - DNA, 73 bp, Homo sapiens
  source 1..73: mol_type = genomic DNA
gggggtatagctcagtggtagagcatttgactgcagatcaagaggtccctggttcaaatccgggtgccccctc

SEQ ID NO: 440 - DNA, 73 bp, Homo sapiens
  source 1..73: mol_type = genomic DNA
gggggtatagctcagtggtagagcatttgactgcagatcaagaggtccccggttcaaatccgggtgccccctc

SEQ ID NO: 441 - DNA, 73 bp, Homo sapiens
  source 1..73: mol_type = genomic DNA
aggtcccatggtgtaatggttagcactctggactttgaatccagcgatccgagttcaaatctcggtgggacct

SEQ ID NO: 442 - DNA, 74 bp, Homo sapiens
  source 1..74: mol_type = genomic DNA
gacccagtggcctaatggataaggcatcagcctccggagctggggattgtgggttcgagtcccatctgggtcgc

SEQ ID NO: 443 - DNA, 74 bp, Homo sapiens
  source 1..74: mol_type = genomic DNA
agccccagtggcctaatggataaggcactggcctcctaagccagggattgtgggttcgagtcccacctggggta

SEQ ID NO: 444 - DNA, 74 bp, Homo sapiens
  source 1..74: mol_type = genomic DNA
gccccagtggcctaatggataaggcactggcctcctaagccagggattgtgggttcgagtcccacctggggtgt

SEQ ID NO: 445 - DNA, 74 bp, Homo sapiens
  source 1..74: mol_type = genomic DNA
agaccgcgtggcctaatggataaggcgtctgacttcggatcagaagattgagggttcgagtcccttcgtggtcg

SEQ ID NO: 446 - DNA, 75 bp, Homo sapiens
  source 1..75: mol_type = genomic DNA
cgtctctgtggcgcaatcggttagcgcgttcggctgttaaccgaaaggttggtggttcgagcccacccagggacg

SEQ ID NO: 447 - DNA, 73 bp, Homo sapiens
  source 1..73: mol_type = genomic DNA
ggcgttggtggtatagtggttagcatagctgccttccaagcagttgacccgggttcgattcccggccaacgca

SEQ ID NO: 448 - DNA, 74 bp, Homo sapiens
  source 1..74: mol_type = genomic DNA
gtttccgtagtgtagcggttatcacattcgcctcacacgcgaaaggtccccggttcgatcccgggcggaaacag

SEQ ID NO: 449 - DNA, 75 bp, Homo sapiens
  source 1..75: mol_type = genomic DNA
tggcgccgtggcttagttggttaaagcgcctgtctagtaaacaggagatcctgggttcgaatcccagcggtgcct

SEQ ID NO: 450 - DNA, 94 bp, Homo sapiens
  source 1..94: mol_type = genomic DNA
gctccagtggcgcaatcggttagcgcgcggtacttatatgacagtgcgagcggagcaatgccgaggttgtgagttcgatcctcacctggagcac

SEQ ID NO: 451 - DNA, 72 bp, Homo sapiens
  source 1..72: mol_type = genomic DNA
gcatgggtggttcagtggtagaattctcgcctgccacgcgggaggcccgggttcgattcccggcccatgcag

SEQ ID NO: 452 - DNA, 18 bp, synthetic construct
  source 1..18: mol_type = other DNA
aaaatataaatatatttc

SEQ ID NO: 453-454 - skipped (2 entries)

SEQ ID NO: 455 - DNA, 15 bp, synthetic construct
  source 1..15: mol_type = other DNA
aattcttcggaatgt

SEQ ID NO: 456-460 - skipped (5 entries)

SEQ ID NO: 461 - DNA, 20 bp, synthetic construct
  source 1..20: mol_type = other DNA
caggcgggttctgcccgcgc

SEQ ID NO: 462 - DNA, 18 bp, synthetic construct
  source 1..18: mol_type = other DNA
catacctgcaagggtatc

SEQ ID NO: 463 - DNA, 15 bp, synthetic construct
  source 1..15: mol_type = other DNA
cgaccgcaaggttgt

SEQ ID NO: 464 - DNA, 15 bp, synthetic construct
  source 1..15: mol_type = other DNA
cgaccttgcggtcat

SEQ ID NO: 465 - DNA, 18 bp, synthetic construct
  source 1..18: mol_type = other DNA
cgatgctaatcacatcgt

SEQ ID NO: 466 - DNA, 15 bp, synthetic construct
  source 1..15: mol_type = other DNA
cgatggtgacatcat

SEQ ID NO: 467 - DNA, 16 bp, synthetic construct
  source 1..16: mol_type = other DNA
cgatggtttacatcgt

SEQ ID NO: 468 - DNA, 13 bp, synthetic construct
  source 1..13: mol_type = other DNA
cgccgtaaggtgt

SEQ ID NO: 469 - DNA, 12 bp, synthetic construct
  source 1..12: mol_type = other DNA
cgccttaggtgt

SEQ ID NO: 470 - DNA, 15 bp, synthetic construct
  source 1..15: mol_type = other DNA
cgcctttcgacgcgt

SEQ ID NO: 471 - DNA, 13 bp, synthetic construct
  source 1..13: mol_type = other DNA
cgcttcacggcgt

SEQ ID NO: 472 - DNA, 15 bp, synthetic construct
  source 1..15: mol_type = other DNA
cggcagcaatgctgt

SEQ ID NO: 473 - DNA, 13 bp, synthetic construct
  source 1..13: mol_type = other DNA
cggctccgccttc

SEQ ID NO: 474 - DNA, 16 bp, synthetic construct
  source 1..16: mol_type = other DNA
cgggtatcacagggtc

SEQ ID NO: 475 - DNA, 17 bp, synthetic construct
  source 1..17: mol_type = other DNA
cggtgcgcaagcgctgt

SEQ ID NO: 476 - DNA, 18 bp, synthetic construct
  source 1..18: mol_type = other DNA
cgtacgggtgaccgtacc

SEQ ID NO: 477 - DNA, 13 bp, synthetic construct
  source 1..13: mol_type = other DNA
cgtcaaagacttc

SEQ ID NO: 478 - DNA, 13 bp, synthetic construct
  source 1..13: mol_type = other DNA
cgtcgtaagactt

SEQ ID NO: 479 - DNA, 14 bp, synthetic construct
  source 1..14: mol_type = other DNA
cgttgaataaacgt

SEQ ID NO: 480-485 - skipped (6 entries)

SEQ ID NO: 486 - DNA, 19 bp, synthetic construct
  source 1..19: mol_type = other DNA
taactagatactttcagat

SEQ ID NO: 487 - DNA, 15 bp, synthetic construct
  source 1..15: mol_type = other DNA
tactcgtatgggtgc

SEQ ID NO: 488 - DNA, 13 bp, synthetic construct
  source 1..13: mol_type = other DNA
tactttgcggtgt

SEQ ID NO: 489 - DNA, 19 bp, synthetic construct
  source 1..19: mol_type = other DNA
taggcgagtaacatcgtgc

SEQ ID NO: 490 - DNA, 19 bp, synthetic construct
  source 1..19: mol_type = other DNA
taggcgtgaatagcgcctc

SEQ ID NO: 491 - DNA, 19 bp, synthetic construct
  source 1..19: mol_type = other DNA
taggtcgcgagagcggcgc

SEQ ID NO: 492 - DNA, 19 bp, synthetic construct
  source 1..19: mol_type = other DNA
taggtcgcgtaagcggcgc

SEQ ID NO: 493 - DNA, 17 bp, synthetic construct
  source 1..17: mol_type = other DNA
taggtggttatccacgc

SEQ ID NO: 494-495 - skipped (2 entries)

SEQ ID NO: 496 - DNA, 18 bp, synthetic construct
  source 1..18: mol_type = other DNA
tatacgtgaaagcgtatc

SEQ ID NO: 497 - DNA, 21 bp, synthetic construct
  source 1..21: mol_type = other DNA
tatagggtcaaaaactctatc

SEQ ID NO: 498 - DNA, 20 bp, synthetic construct
  source 1..20: mol_type = other DNA
tatgcagaaatacctgcatc

SEQ ID NO: 499 - DNA, 15 bp, synthetic construct
  source 1..15: mol_type = other DNA
tccccatacgggggc

SEQ ID NO: 500 - DNA, 14 bp, synthetic construct
  source 1..14: mol_type = other DNA
tcccgaaggggttc

SEQ ID NO: 501 - DNA, 15 bp, synthetic construct
  source 1..15: mol_type = other DNA
tctacgtatgtgggc

SEQ ID NO: 502 - DNA, 14 bp, synthetic construct
  source 1..14: mol_type = other DNA
tctcataggagttc

SEQ ID NO: 503 - DNA, 14 bp, synthetic construct
  source 1..14: mol_type = other DNA
tctcctctggaggc

SEQ ID NO: 504 - DNA, 15 bp, synthetic construct
  source 1..15: mol_type = other DNA
tcttagcaataaggt

SEQ ID NO: 505 - DNA, 14 bp, synthetic construct
  source 1..14: mol_type = other DNA
tcttgtaggagttc

SEQ ID NO: 506 - DNA, 15 bp, synthetic construct
  source 1..15: mol_type = other DNA
tgaacgtaagttcgc

SEQ ID NO: 507 - DNA, 16 bp, synthetic construct
  source 1..16: mol_type = other DNA
tgaactgcgaggttcc

SEQ ID NO: 508 - skipped

SEQ ID NO: 509 - DNA, 15 bp, synthetic construct
  source 1..15: mol_type = other DNA
tgaccgaaaggtcgt

SEQ ID NO: 510 - DNA, 15 bp, synthetic construct
  source 1..15: mol_type = other DNA
tgaccgcaaggtcgt

SEQ ID NO: 511 - DNA, 14 bp, synthetic construct
  source 1..14: mol_type = other DNA
tgagctctgctctc

SEQ ID NO: 512 - DNA, 18 bp, synthetic construct
  source 1..18: mol_type = other DNA
tgaggcctcacggcctac

SEQ ID NO: 513 - DNA, 15 bp, synthetic construct
  source 1..15: mol_type = other DNA
tgagggcaacttcgt

SEQ ID NO: 514 - DNA, 16 bp, synthetic construct
  source 1..16: mol_type = other DNA
tgagggtcatacctcc

SEQ ID NO: 515 - DNA, 18 bp, synthetic construct
  source 1..18: mol_type = other DNA
tgagggtgcaaatcctcc

SEQ ID NO: 516 - DNA, 13 bp, synthetic construct
  source 1..13: mol_type = other DNA
tgccgaaaggcgt

SEQ ID NO: 517 - DNA, 13 bp, synthetic construct
  source 1..13: mol_type = other DNA
tgccgtaaggcgt

SEQ ID NO: 518 - DNA, 14 bp, synthetic construct
  source 1..14: mol_type = other DNA
tgcggtctccgcgc

SEQ ID NO: 519 - DNA, 11 bp, synthetic construct
  source 1..11: mol_type = other DNA
tgctagagcat

SEQ ID NO: 520 - DNA, 16 bp, synthetic construct
  source 1..16: mol_type = other DNA
tgctcgtatagagctc

SEQ ID NO: 521 - DNA, 15 bp, synthetic construct
  source 1..15: mol_type = other DNA
tggacaattgtctgc

SEQ ID NO: 522 - DNA, 15 bp, synthetic construct
  source 1..15: mol_type = other DNA
tggacagatgtccgt

SEQ ID NO: 523 - DNA, 15 bp, synthetic construct
  source 1..15: mol_type = other DNA
tggacaggtgtccgc

SEQ ID NO: 524 - DNA, 15 bp, synthetic construct
  source 1..15: mol_type = other DNA
tggacggttgtccgc

SEQ ID NO: 525 - DNA, 13 bp, synthetic construct
  source 1..13: mol_type = other DNA
tggacttgtggtc

SEQ ID NO: 526 - DNA, 16 bp, synthetic construct
  source 1..16: mol_type = other DNA
tggagattctctccgc

SEQ ID NO: 527 - DNA, 14 bp, synthetic construct
  source 1..14: mol_type = other DNA
tggcataggcctgc

SEQ ID NO: 528 - DNA, 14 bp, synthetic construct
  source 1..14: mol_type = other DNA
tggcttatgtctac

SEQ ID NO: 529 - DNA, 16 bp, synthetic construct
  source 1..16: mol_type = other DNA
tgggagttaatcccgt

SEQ ID NO: 530 - DNA, 14 bp, synthetic construct
  source 1..14: mol_type = other DNA
tgggatcttcccgc

SEQ ID NO: 531 - DNA, 16 bp, synthetic construct
  source 1..16: mol_type = other DNA
tgggcagaaatgtctc

SEQ ID NO: 532 - DNA, 15 bp, synthetic construct
  source 1..15: mol_type = other DNA
tgggcgttcgcccgc

SEQ ID NO: 533 - DNA, 14 bp, synthetic construct
  source 1..14: mol_type = other DNA
tgggcttcgcccgc

SEQ ID NO: 534 - DNA, 16 bp, synthetic construct
  source 1..16: mol_type = other DNA
tgggggataaccccgt

SEQ ID NO: 535 - DNA, 15 bp, synthetic construct
  source 1..15: mol_type = other DNA
tgggggtttccccgt

SEQ ID NO: 536 - skipped

SEQ ID NO: 537 - DNA, 15 bp, synthetic construct
  source 1..15: mol_type = other DNA
tggtggcaacaccgt

SEQ ID NO: 538 - DNA, 14 bp, synthetic construct
  source 1..14: mol_type = other DNA
tggtttatagccgt

SEQ ID NO: 539 - DNA, 19 bp, synthetic construct
  source 1..19: mol_type = other DNA
tgtacggtaataccgtacc

SEQ ID NO: 540 - DNA, 15 bp, synthetic construct
  source 1..15: mol_type = other DNA
tgtccgcaaggacgt

SEQ ID NO: 541 - DNA, 15 bp, synthetic construct
  source 1..15: mol_type = other DNA
tgtcctaacggacgt

SEQ ID NO: 542 - DNA, 18 bp, synthetic construct
  source 1..18: mol_type = other DNA
tgtcctattaacggacgt

SEQ ID NO: 543 - DNA, 16 bp, synthetic construct
  source 1..16: mol_type = other DNA
tgtccttcacgggcgt

SEQ ID NO: 544 - DNA, 13 bp, synthetic construct
  source 1..13: mol_type = other DNA
tgtcttaggacgt

SEQ ID NO: 545 - DNA, 18 bp, synthetic construct
  source 1..18: mol_type = other DNA
tgtgcgttaacgcgtacc

SEQ ID NO: 546 - DNA, 16 bp, synthetic construct
  source 1..16: mol_type = other DNA
tgtgtcgcaaggcacc

SEQ ID NO: 547 - DNA, 15 bp, synthetic construct
  source 1..15: mol_type = other DNA
tgttcgtaaggactt

SEQ ID NO: 548 - DNA, 16 bp, synthetic construct
  source 1..16: mol_type = other DNA
ttcacagaaatgtgtc

SEQ ID NO: 549 - DNA, 14 bp, synthetic construct
  source 1..14: mol_type = other DNA
ttccctcgtggagt

SEQ ID NO: 550 - DNA, 14 bp, synthetic construct
  source 1..14: mol_type = other DNA
ttccctctgggagc

SEQ ID NO: 551 - DNA, 14 bp, synthetic construct
  source 1..14: mol_type = other DNA
ttcccttgtggatc

SEQ ID NO: 552 - DNA, 13 bp, synthetic construct
  source 1..13: mol_type = other DNA
ttccttcgggagc

SEQ ID NO: 553 - DNA, 15 bp, synthetic construct
  source 1..15: mol_type = other DNA
ttctagcaatagagt

SEQ ID NO: 554 - DNA, 16 bp, synthetic construct
  source 1..16: mol_type = other DNA
ttctccactggggagc

SEQ ID NO: 555 - DNA, 15 bp, synthetic construct
  source 1..15: mol_type = other DNA
ttctcgagagggagc

SEQ ID NO: 556 - DNA, 15 bp, synthetic construct
  source 1..15: mol_type = other DNA
ttctcgtatgagagc

SEQ ID NO: 557 - DNA, 19 bp, synthetic construct
  source 1..19: mol_type = other DNA
tttaaggttttcccttaac

SEQ ID NO: 558 - DNA, 14 bp, synthetic construct
  source 1..14: mol_type = other DNA
tttcattgtggagt

SEQ ID NO: 559 - DNA, 14 bp, synthetic construct
  source 1..14: mol_type = other DNA
tttcgaaggaatcc

SEQ ID NO: 560 - DNA, 13 bp, synthetic construct
  source 1..13: mol_type = other DNA
tttcttcggaagc

SEQ ID NO: 561 - DNA, 16 bp, synthetic construct
  source 1..16: mol_type = other DNA
tttggggcaactcaac

SEQ ID NO: 562 - RNA, 342 nt, synthetic construct
  source 1..342: mol_type = other RNA
  misc_difference 1: note = May be absent
  misc_difference 2: note = May be absent
  misc_difference 3: note = May be absent
  misc_difference 4: note = May be absent
  misc_difference 5: note = a, c, g, u, unknown, other, or absent
  misc_difference 6: note = a, c, g, u, unknown, other, or absent
  misc_difference 7: note = May be absent
  misc_difference 8: note = May be absent
  misc_difference 9: note = May be absent
  misc_difference 10: note = May be absent
  misc_difference 11: note = May be absent
  misc_difference 12: note = May be absent
  misc_difference 13: note = May be absent
  misc_difference 14: note = May be absent
  misc_difference 15: note = a, c, g, u, unknown, other, or absent
  misc_difference 16: note = a, c, g, u, unknown, other, or absent
  misc_difference 17: note = May be absent
  misc_difference 18: note = May be absent
  misc_difference 19: note = May be absent
  misc_difference 20: note = May be absent
  misc_difference 21: note = a, c, g, u, unknown, other, or absent
  misc_difference 22: note = May be absent
  misc_difference 23: note = May be absent
  misc_difference 24: note = May be absent
  misc_difference 25: note = May be absent
  misc_difference 26: note = May be absent
  misc_difference 27: note = May be absent
  misc_difference 28: note = May be absent
  misc_difference 29: note = May be absent
  misc_difference 30: note = a, c, g, u, unknown, other, or absent
  misc_difference 31: note = a, c, g, u, unknown, other, or absent
  misc_difference 32: note = a, c, g, u, unknown, other, or absent
  misc_difference 33: note = May be absent
  misc_difference 34: note = a, c, g, u, unknown, other, or absent
  misc_difference 35: note = May be absent
  misc_difference 36: note = May be absent
  misc_difference 37: note = a, c, g, u, unknown, other, or absent
  misc_difference 38: note = May be absent
  misc_difference 39: note = May be absent
  misc_difference 40: note = May be absent
  misc_difference 41: note = a, c, g, u, unknown, other, or absent
  misc_difference 42: note = a, c, g, u, unknown, other, or absent
  misc_difference 43: note = a, c, g, u, unknown, other, or absent
  misc_difference 44: note = a, c, g, u, unknown, other, or absent
  misc_difference 45: note = a, c, g, u, unknown, other, or absent
  misc_difference 46: note = May be absent
  misc_difference 47: note = a, c, g, u, unknown, other, or absent
  misc_difference 48: note = a, c, g, u, unknown, other, or absent
  misc_difference 49: note = a, c, g, u, unknown, other, or absent
  misc_difference 50: note = a, c, g, u, unknown, other, or absent
  misc_difference 51: note = a, c, g, u, unknown, other, or absent
  misc_difference 52: note = a, c, g, u, unknown, other, or absent
  misc_difference 53: note = a, c, g, u, unknown, other, or absent
  misc_difference 54: note = a, c, g, u, unknown, other, or absent
  misc_difference 55: note = a, c, g, u, unknown, other, or absent
  misc_difference 56: note = a, c, g, u, unknown, other, or absent
  misc_difference 57: note = a, c, g, u, unknown, other, or absent
  misc_difference 58: note = a, c, g, u, unknown, other, or absent
  misc_difference 59: note = a, c, g, u, unknown, other, or absent
  misc_difference 60: note = a, c, g, u, unknown, other, or absent
  misc_difference 61: note = a, c, g, u, unknown, other, or absent
  misc_difference 62: note = a, c, g, u, unknown, other, or absent
  misc_difference 63: note = a, c, g, u, unknown, other, or absent
  misc_difference 64: note = a, c, g, u, unknown, other, or absent
  misc_difference 65: note = a, c, g, u, unknown, other, or absent
  misc_difference 66: note = a, c, g, u, unknown, other, or absent
  misc_difference 67: note = a, c, g, u, unknown, other, or absent
  misc_difference 68: note = a, c, g, u, unknown, other, or absent
  misc_difference 69: note = a, c, g, u, unknown, other, or absent
  misc_difference 70: note = a, c, g, u, unknown, other, or absent
  misc_difference 71: note = a, c, g, u, unknown, other, or absent
  misc_difference 72: note = a, c, g, u, unknown, other, or absent
  misc_difference 73: note = a, c, g, u, unknown, other, or absent
  misc_difference 74: note = a, c, g, u, unknown, other, or absent
  misc_difference 75: note = a, c, g, u, unknown, other, or absent
  misc_difference 76: note = a, c, g, u, unknown, other, or absent
  misc_difference 77: note = a, c, g, u, unknown, other, or absent
  misc_difference 78: note = a, c, g, u, unknown, other, or absent
  misc_difference 79: note = a, c, g, u, unknown, other, or absent
  misc_difference 80: note = a, c, g, u, unknown, other, or absent
  misc_difference 81: note = a, c, g, u, unknown, other, or absent
  misc_difference 82: note = a, c, g, u, unknown, other, or absent
  misc_difference 83: note = a, c, g, u, unknown, other, or absent
  misc_difference 84: note = a, c, g, u, unknown, other, or absent
  misc_difference 85: note = a, c, g, u, unknown, other, or absent
  misc_difference 86: note = a, c, g, u, unknown, other, or absent
  misc_difference 87: note = a, c, g, u, unknown, other, or absent
  misc_difference 88: note = a, c, g, u, unknown, other, or absent
  misc_difference 89: note = a, c, g, u, unknown, other, or absent
  misc_difference 90: note = a, c, g, u, unknown, other, or absent
  misc_difference 91: note = a, c, g, u, unknown, other, or absent
  misc_difference 92: note = a, c, g, u, unknown, other, or absent
  misc_difference 93: note = a, c, g, u, unknown, other, or absent
  misc_difference 94: note = a, c, g, u, unknown, other, or absent
  misc_difference 95: note = a, c, g, u, unknown, other, or absent
  misc_difference 96: note = a, c, g, u, unknown, other, or absent
  misc_difference 97: note = a, c, g, u, unknown, other, or absent
  misc_difference 98: note = a, c, g, u, unknown, other, or absent
  misc_difference 99: note = a, c, g, u, unknown, other, or absent
  misc_difference 100: note = a, c, g, u, unknown, other, or absent
  misc_difference 101: note = a, c, g, u, unknown, other, or absent
  misc_difference 102: note = a, c, g, u, unknown, other, or absent
  misc_difference 103: note = a, c, g, u, unknown, other, or absent
  misc_difference 104: note = a, c, g, u, unknown, other, or absent
  misc_difference 105: note = a, c, g, u, unknown, other, or absent
  misc_difference 106: note = a, c, g, u, unknown, other, or absent
  misc_difference 107: note = a, c, g, u, unknown, other, or absent
  misc_difference 108: note = a, c, g, u, unknown, other, or absent
  misc_difference 109: note = a, c, g, u, unknown, other, or absent
  misc_difference 110: note = a, c, g, u, unknown, other, or absent
  misc_difference 111: note = a, c, g, u, unknown, other, or absent
  misc_difference 112: note = a, c, g, u, unknown, other, or absent
  misc_difference 113: note = a, c, g, u, unknown, other, or absent
  misc_difference 114: note = a, c, g, u, unknown, other, or absent
  misc_difference 115: note = a, c, g, u, unknown, other, or absent
  misc_difference 116: note = a, c, g, u, unknown, other, or absent
  misc_difference 117: note = a, c, g, u, unknown, other, or absent
  misc_difference 118: note = a, c, g, u, unknown, other, or absent
  misc_difference 119: note = a, c, g, u, unknown, other, or absent
  misc_difference 120: note = a, c, g, u, unknown, other, or absent
  misc_difference 121: note = a, c, g, u, unknown, other, or absent
  misc_difference 122: note = a, c, g, u, unknown, other, or absent
  misc_difference 123: note = a, c, g, u, unknown, other, or absent
  misc_difference 124: note = a, c, g, u, unknown, other, or absent
  misc_difference 125: note = a, c, g, u, unknown, other, or absent
  misc_difference 126: note = a, c, g, u, unknown, other, or absent
  misc_difference 127: note = a, c, g, u, unknown, other, or absent
  misc_difference 128: note = a, c, g, u, unknown, other, or absent
  misc_difference 129: note = a, c, g, u, unknown, other, or absent
  misc_difference 130: note = a, c, g, u, unknown, other, or absent
  misc_difference 131: note = a, c, g, u, unknown, other, or absent
  misc_difference 132: note = a, c, g, u, unknown, other, or absent
  misc_difference 133: note = a, c, g, u, unknown, other, or absent
  misc_difference 134: note = a, c, g, u, unknown, other, or absent
  misc_difference 135: note = a, c, g, u, unknown, other, or absent
  misc_difference 136: note = a, c, g, u, unknown, other, or absent
  misc_difference 137: note = a, c, g, u, unknown, other, or absent
  misc_difference 138: note = a, c, g, u, unknown, other, or absent
  misc_difference 139: note = a, c, g, u, unknown, other, or absent
  misc_difference 140: note = a, c, g, u, unknown, other, or absent
  misc_difference 141: note = a, c, g, u, unknown, other, or absent
  misc_difference 142: note = a, c, g, u, unknown, other, or absent
  misc_difference 143: note = a, c, g, u, unknown, other, or absent
  misc_difference 144: note = a, c, g, u, unknown, other, or absent
  misc_difference 145: note = a, c, g, u, unknown, other, or absent
  misc_difference 146: note = a, c, g, u, unknown, other, or absent
  misc_difference 147: note = a, c, g, u, unknown, other, or absent
  misc_difference 148: note = a, c, g, u, unknown, other, or absent
  misc_difference 149: note = a, c, g, u, unknown, other, or absent
  misc_difference 150: note = a, c, g, u, unknown, other, or absent
  misc_difference 151: note = a, c, g, u, unknown, other, or absent
  misc_difference 152: note = a, c, g, u, unknown, other, or absent
  misc_difference 153: note = a, c, g, u, unknown, other, or absent
  misc_difference 154: note = a, c, g, u, unknown, other, or absent
  misc_difference 155: note = a, c, g, u, unknown, other, or absent
  misc_difference 156: note = a, c, g, u, unknown, other, or absent
  misc_difference 157: note = a, c, g, u, unknown, other, or absent
  misc_difference 158: note = a, c, g, u, unknown, other, or absent
  misc_difference 159: note = a, c, g, u, unknown, other, or absent
  misc_difference 160: note = a, c, g, u, unknown, other, or absent
  misc_difference 161: note = a, c, g, u, unknown, other, or absent
  misc_difference 162: note = a, c, g, u, unknown, other, or absent
  misc_difference 163: note = a, c, g, u, unknown, other, or absent
  misc_difference 164: note = a, c, g, u, unknown, other, or absent
  misc_difference 165: note = a, c, g, u, unknown, other, or absent
  misc_difference 166: note = a, c, g, u, unknown, other, or absent
  misc_difference 167: note = a, c, g, u, unknown, other, or absent
  misc_difference 168: note = a, c, g, u, unknown, other, or absent
  misc_difference 169: note = a, c, g, u, unknown, other, or absent
  misc_difference 170: note = a, c, g, u, unknown, other, or absent
  misc_difference 171: note = a, c, g, u, unknown, other, or absent
  misc_difference 172: note = a, c, g, u, unknown, other, or absent
  misc_difference 173: note = a, c, g, u, unknown, other, or absent
  misc_difference 174: note = a, c, g, u, unknown, other, or absent
  misc_difference 175: note = a, c, g, u, unknown, other, or absent
  misc_difference 176: note = a, c, g, u, unknown, other, or absent
  misc_difference 177: note = a, c, g, u, unknown, other, or absent
  misc_difference 178: note = a, c, g, u, unknown, other, or absent
  misc_difference 179: note = a, c, g, u, unknown, other, or absent
  misc_difference 180: note = a, c, g, u, unknown, other, or absent
  misc_difference 181: note = a, c, g, u, unknown, other, or absent
  misc_difference 182: note = a, c, g, u, unknown, other, or absent
  misc_difference 183: note = a, c, g, u, unknown, other, or absent
  misc_difference 184: note = a, c, g, u, unknown, other, or absent
  misc_difference 185: note = a, c, g, u, unknown, other, or absent
  misc_difference 186: note = a, c, g, u, unknown, other, or absent
  misc_difference 187: note = a, c, g, u, unknown, other, or absent
  misc_difference 188: note = a, c, g, u, unknown, other, or absent
  misc_difference 189: note = a, c, g, u, unknown, other, or absent
  misc_difference 190: note = a, c, g, u, unknown, other, or absent
  misc_difference 191: note = a, c, g, u, unknown, other, or absent
  misc_difference 192: note = a, c, g, u, unknown, other, or absent
  misc_difference 193: note = a, c, g, u, unknown, other, or absent
  misc_difference 194: note = a, c, g, u, unknown, other, or absent
  misc_difference 195: note = a, c, g, u, unknown, other, or absent
  misc_difference 196: note = a, c, g, u, unknown, other, or absent
  misc_difference 197: note = a, c, g, u, unknown, other, or absent
  misc_difference 198: note = a, c, g, u, unknown, other, or absent
  misc_difference 199: note = a, c, g, u, unknown, other, or absent
  misc_difference 200: note = a, c, g, u, unknown, other, or absent
  misc_difference 201: note = a, c, g, u, unknown, other, or absent
  misc_difference 202: note = a, c, g, u, unknown, other, or absent
  misc_difference 203: note = a, c, g, u, unknown, other, or absent
  misc_difference 204: note = a, c, g, u, unknown, other, or absent
  misc_difference 205: note = a, c, g, u, unknown, other, or absent
  misc_difference 206: note = a, c, g, u, unknown, other, or absent
  misc_difference 207: note = a, c, g, u, unknown, other, or absent
  misc_difference 208: note = a, c, g, u, unknown, other, or absent
  misc_difference 209: note = a, c, g, u, unknown, other, or absent
  misc_difference 210: note = a, c, g, u, unknown, other, or absent
  misc_difference 211: note = a, c, g, u, unknown, other, or absent
  misc_difference 212: note = a, c, g, u, unknown, other, or absent
  misc_difference 213: note = a, c, g, u, unknown, other, or absent
  misc_difference 214: note = a, c, g, u, unknown, other, or absent
  misc_difference 215: note = a, c, g, u, unknown, other, or absent
  misc_difference 216: note = a, c, g, u, unknown, other, or absent
  misc_difference 217: note = a, c, g, u, unknown, other, or absent
  misc_difference 218: note = a, c, g, u, unknown, other, or absent
  misc_difference 219: note = a, c, g, u, unknown, other, or absent
  misc_difference 220: note = a, c, g, u, unknown, other, or absent
  misc_difference 221: note = a, c, g, u, unknown, other, or absent
  misc_difference 222: note = a, c, g, u, unknown, other, or absent
  misc_difference 223: note = a, c, g, u, unknown, other, or absent
  misc_difference 224: note = a, c, g, u, unknown, other, or absent
  misc_difference 225: note = a, c, g, u, unknown, other, or absent
  misc_difference 226: note = a, c, g, u, unknown, other, or absent
  misc_difference 227: note = a, c, g, u, unknown, other, or absent
  misc_difference 228: note = a, c, g, u, unknown, other, or absent
  misc_difference 229: note = a, c, g, u, unknown, other, or absent
  misc_difference 230: note = a, c, g, u, unknown, other, or absent
  misc_difference 231: note = a, c, g, u, unknown, other, or absent
  misc_difference 232: note = a, c, g, u, unknown, other, or absent
  misc_difference 233: note = a, c, g, u, unknown, other, or absent
  misc_difference 234: note = a, c, g, u, unknown, other, or absent
  misc_difference 235: note = a, c, g, u, unknown, other, or absent
  misc_difference 236: note = a, c, g, u, unknown, other, or absent
  misc_difference 237: note = a, c, g, u, unknown, other, or absent
  misc_difference 238: note = a, c, g, u, unknown, other, or absent
  misc_difference 239: note = a, c, g, u, unknown, other, or absent
  misc_difference 240: note = a, c, g, u, unknown, other, or absent
  misc_difference 241: note = a, c, g, u, unknown, other, or absent
  misc_difference 242: note = a, c, g, u, unknown, other, or absent
  misc_difference 243: note = a, c, g, u, unknown, other, or absent
  misc_difference 244: note = a, c, g, u, unknown, other, or absent
  misc_difference 245: note = a, c, g, u, unknown, other, or absent
  misc_difference 246: note = a, c, g, u, unknown, other, or absent
  misc_difference 247: note = a, c, g, u, unknown, other, or absent
  misc_difference 248: note = a, c, g, u, unknown, other, or absent
  misc_difference 249: note = a, c, g, u, unknown, other, or absent
  misc_difference 250: note = a, c, g, u, unknown, other, or absent
  misc_difference 251: note = a, c, g, u, unknown, other, or absent
  misc_difference 252: note = a, c, g, u, unknown, other, or absent
  misc_difference 253: note = a, c, g, u, unknown, other, or absent
  misc_difference 254: note = a, c, g, u, unknown, other, or absent
  misc_difference 255: note = a, c, g, u, unknown, other, or absent
  misc_difference 256: note = a, c, g, u, unknown, other, or absent
  misc_difference 257: note = a, c, g, u, unknown, other, or absent
  misc_difference 258: note = a, c, g, u, unknown, other, or absent
  misc_difference 259: note = a, c, g, u, unknown, other, or absent
  misc_difference 260: note = a, c, g, u, unknown, other, or absent
  misc_difference 261: note = a, c, g, u, unknown, other, or absent
  misc_difference 262: note = a, c, g, u, unknown, other, or absent
  misc_difference 263: note = a, c, g, u, unknown, other, or absent
  misc_difference 264: note = a, c, g, u, unknown, other, or absent
  misc_difference 265: note = a, c, g, u, unknown, other, or absent
  misc_difference 266: note = a, c, g, u, unknown, other, or absent
  misc_difference 267: note = a, c, g, u, unknown, other, or absent
  misc_difference 268: note = a, c, g, u, unknown, other, or absent
  misc_difference 269: note = a, c, g, u, unknown, other, or absent
  misc_difference 270: note = a, c, g, u, unknown, other, or absent
  misc_difference 271: note = a, c, g, u, unknown, other, or absent
  misc_difference 272: note = a, c, g, u, unknown, other, or absent
  misc_difference 273: note = a, c, g, u, unknown, other, or absent
  misc_difference 274: note = a, c, g, u, unknown, other, or absent
  misc_difference 275: note = a, c, g, u, unknown, other, or absent
  misc_difference 276: note = a, c, g, u, unknown, other, or absent
  misc_difference 277: note = a, c, g, u, unknown, other, or absent
  misc_difference 278: note = a, c, g, u, unknown, other, or absent
  misc_difference 279: note = a, c, g, u, unknown, other, or absent
  misc_difference 280: note = a, c, g, u, unknown, other, or absent
  misc_difference 281: note = a, c, g, u, unknown, other, or absent
  misc_difference 282: note = a, c, g, u, unknown, other, or absent
  misc_difference 283: note = a, c, g, u, unknown, other, or absent
  misc_difference 284: note = a, c, g, u, unknown, other, or absent
  misc_difference 285: note = a, c, g, u, unknown, other, or absent
  misc_difference 286: note = a, c, g, u, unknown, other, or absent
  misc_difference 287: note = a, c, g, u, unknown, other, or absent
  misc_difference 288: note = a, c, g, u, unknown, other, or absent
  misc_difference 289: note = a, c, g, u, unknown, other, or absent
  misc_difference 290: note = a, c, g, u, unknown, other, or absent
  misc_difference 291: note = a, c, g, u, unknown, other, or absent
  misc_difference 292: note = a, c, g, u, unknown, other, or absent
  misc_difference 293: note = a, c, g, u, unknown, other, or absent
  misc_difference 294: note = a, c, g, u, unknown, other, or absent
  misc_difference 295: note = a, c, g, u, unknown, other, or absent
  misc_difference 296: note = a, c, g, u, unknown, other, or absent
  misc_difference 297: note = a, c, g, u, unknown, other, or absent
  misc_difference 298: note = a, c, g, u, unknown, other, or absent
  misc_difference 299: note = a, c, g, u, unknown, other, or absent
  misc_difference 300: note = a, c, g, u, unknown, other, or absent
  misc_difference 301: note = a, c, g, u, unknown, other, or absent
  misc_difference 302: note = a, c, g, u, unknown, other, or absent
  misc_difference 303: note = a, c, g, u, unknown, other, or absent
  misc_difference 304: note = a, c, g, u, unknown, other, or absent
  misc_difference 305: note = a, c, g, u, unknown, other, or absent
  misc_difference 306: note = a, c, g, u, unknown, other, or absent
  misc_difference 307: note = a, c, g, u, unknown, other, or absent
  misc_difference 308: note = a, c, g, u, unknown, other, or absent
  misc_difference 309: note = a, c, g, u, unknown, other, or absent
  misc_difference 310: note = a, c, g, u, unknown, other, or absent
  misc_difference 311: note = a, c, g, u, unknown, other, or absent
  misc_difference 312: note = a, c, g, u, unknown, other, or absent
  misc_difference 313: note = a, c, g, u, unknown, other, or absent
  misc_difference 314: note = a, c, g, u, unknown, other, or absent
  misc_difference 315: note = a, c, g, u, unknown, other, or absent
  misc_difference 316: note = a, c, g, u, unknown, other, or absent
  misc_difference 317: note = a, c, g, u, unknown, other, or absent
  misc_difference 318: note = a, c, g, u, unknown, other, or absent
  misc_difference 319: note = a, c, g, u, unknown, other, or absent
  misc_difference 320: note = a, c, g, u, unknown, other, or absent
  misc_difference 321: note = May be absent
  misc_difference 322: note = May be absent
  misc_difference 323: note = May be absent
  misc_difference 324: note = May be absent
  misc_difference 325: note = May be absent
  misc_difference 326: note = May be absent
  misc_difference 327: note = May be absent
  misc_difference 328: note = a, c, g, u, unknown, other, or absent
  misc_difference 329: note = a, c, g, u, unknown, other, or absent
  misc_difference 330: note = May be absent
  misc_difference 331: note = May be absent
  misc_difference 332: note = May be absent
  misc_difference 333: note = a, c, g, u, unknown, other, or absent
  misc_difference 334: note = a, c, g, u, unknown, other, or absent
  misc_difference 335: note = May be absent
  misc_difference 336: note = a, c, g, u, unknown, other, or absent
  misc_difference 337: note = a, c, g, u, unknown, other, or absent
  misc_difference 338: note = May be absent
  misc_difference 339: note = May be absent
  misc_difference 340: note = May be absent
  misc_difference 341: note = May be absent
  misc_difference 342: note = May be absent
  misc_difference 47..318: note = This region may encompass 1-271 nucleotides
rkssnndtrghbyannytgrndgwdvdydnnnbnhbnryrnnnnndnnnnnnnnnnnnnnnnnnnnnnnnnnnnnnnnnnnnnnnnnnnnnnnnnnnnnnnnnnnnnnnnnnnnnnnnnnnnnnnnnnnnnnnnnnnnnnnnnnnnnnnnnnnnnnnnnnnnnnnnnnnnnnnnnnnnnnnnnnnnnnnnnnnnnnnnnnnnnnnnnnnnnnnnnnnnnnnnnnnnnnnnnnnnnnnnnnnnnnnnnnnnnnnnnnnnnnnnnnnnnnnnnnnnnnnnnnnnnnnnnnnnnnnnnnnnnnnnnnnnnnnnnnnnnnnnnnrrdtyrannyybnnhnnbwccd

SEQ ID NO: 563 - RNA, 341 nt, synthetic construct
  source 1..341: mol_type = other RNA
  misc_difference 1: note = May be absent
  misc_difference 2: note = May be absent
  misc_difference 3: note = May be absent
  misc_difference 4: note = May be absent
  misc_difference 5: note = May be absent
  misc_difference 6: note = May be absent
  misc_difference 7: note = May be absent
  misc_difference 8: note = May be absent
  misc_difference 9: note = May be absent
  misc_difference 10: note = May be absent
  misc_difference 11: note = May be absent
  misc_difference 12: note = May be absent
  misc_difference 13: note = May be absent
  misc_difference 14: note = May be absent
  misc_difference 15: note = May be absent
  misc_difference 16: note = a, c, g, u, unknown, other, or absent
  misc_difference 17: note = May be absent
  misc_difference 18: note = May be absent
  misc_difference 19: note = May be absent
  misc_difference 20: note = May be absent
  misc_difference 21: note = May be absent
  misc_difference 22: note = May be absent
  misc_difference 23: note = May be absent
  misc_difference 24: note = May be absent
  misc_difference 25: note = May be absent
  misc_difference 26: note = May be absent
  misc_difference 27: note = May be absent
  misc_difference 28: note = May be absent
  misc_difference 29: note = May be absent
  misc_difference 30: note = a, c, g, u, unknown, other, or absent
  misc_difference 31: note = May be absent
  misc_difference 32: note = May be absent
  misc_difference 33: note = May be absent
  misc_difference 34: note = May be absent
  misc_difference 35: note = May be absent
  misc_difference 36: note = May be absent
  misc_difference 37: note = May be absent
  misc_difference 38: note = May be absent
  misc_difference 39: note = May be absent
  misc_difference 40: note = May be absent
  misc_difference 41: note = May be absent
  misc_difference 42: note = May be absent
  misc_difference 43: note = May be absent
  misc_difference 44: note = May be absent
  misc_difference 45: note = May be absent
  misc_difference 46: note = a, c, g, u, unknown, other, or absent
  misc_difference 47: note = a, c, g, u, unknown, other, or absent
  misc_difference 48: note = a, c, g, u, unknown, other, or absent
  misc_difference 49: note = a, c, g, u, unknown, other, or absent
  misc_difference 50: note = a, c, g, u, unknown, other, or absent
  misc_difference 51: note = a, c, g, u, unknown, other, or absent
  misc_difference 52: note = a, c, g, u, unknown, other, or absent
  misc_difference 53: note = a, c, g, u, unknown, other, or absent
  misc_difference 54: note = a, c, g, u, unknown, other, or absent
  misc_difference 55: note = a, c, g, u, unknown, other, or absent
  misc_difference 56: note = a, c, g, u, unknown, other, or absent
  misc_difference 57: note = a, c, g, u, unknown, other, or absent
  misc_difference 58: note = a, c, g, u, unknown, other, or absent
  misc_difference 59: note = a, c, g, u, unknown, other, or absent
  misc_difference 60: note = a, c, g, u, unknown, other, or absent
  misc_difference 61: note = a, c, g, u, unknown, other, or absent
  misc_difference 62: note = a, c, g, u, unknown, other, or absent
  misc_difference 63: note = a, c, g, u, unknown, other, or absent
  misc_difference 64: note = a, c, g, u, unknown, other, or absent
  misc_difference 65: note = a, c, g, u, unknown, other, or absent
  misc_difference 66: note = a, c, g, u, unknown, other, or absent
  misc_difference 67: note = a, c, g, u, unknown, other, or absent
  misc_difference 68: note = a, c, g, u, unknown, other, or absent
  misc_difference 69: note = a, c, g, u, unknown, other, or absent
  misc_difference 70: note = a, c, g, u, unknown, other, or absent
  misc_difference 71: note = a, c, g, u, unknown, other, or absent
  misc_difference 72: note = a, c, g, u, unknown, other, or absent
  misc_difference 73: note = a, c, g, u, unknown, other, or absent
  misc_difference 74: note = a, c, g, u, unknown, other, or absent
  misc_difference 75: note = a, c, g, u, unknown, other, or absent
  misc_difference 76: note = a, c, g, u, unknown, other, or absent
  misc_difference 77: note = a, c, g, u, unknown, other, or absent
  misc_difference 78: note = a, c, g, u, unknown, other, or absent
  misc_difference 79: note = a, c, g, u, unknown, other, or absent
  misc_difference 80: note = a, c, g, u, unknown, other, or absent
  misc_difference 81: note = a, c, g, u, unknown, other, or absent
  misc_difference 82: note = a, c, g, u, unknown, other, or absent
  misc_difference 83: note = a, c, g, u, unknown, other, or absent
  misc_difference 84: note = a, c, g, u, unknown, other, or absent
  misc_difference 85: note = a, c, g, u, unknown, other, or absent
  misc_difference 86: note = a, c, g, u, unknown, other, or absent
  misc_difference 87: note = a, c, g, u, unknown, other, or absent
  misc_difference 88: note = a, c, g, u, unknown, other, or absent
  misc_difference 89: note = a, c, g, u, unknown, other, or absent
  misc_difference 90: note = a, c, g, u, unknown, other, or absent
  misc_difference 91: note = a, c, g, u, unknown, other, or absent
  misc_difference 92: note = a, c, g, u, unknown, other, or absent
  misc_difference 93: note = a, c, g, u, unknown, other, or absent
  misc_difference 94: note = a, c, g, u, unknown, other, or absent
  misc_difference 95: note = a, c, g, u, unknown, other, or absent
  misc_difference 96: note = a, c, g, u, unknown, other, or absent
  misc_difference 97: note = a, c, g, u, unknown, other, or absent
  misc_difference 98: note = a, c, g, u, unknown, other, or absent
  misc_difference 99: note = a, c, g, u, unknown, other, or absent
  misc_difference 100: note = a, c, g, u, unknown, other, or absent
  misc_difference 101: note = a, c, g, u, unknown, other, or absent
  misc_difference 102: note = a, c, g, u, unknown, other, or absent
  misc_difference 103: note = a, c, g, u, unknown, other, or absent
  misc_difference 104: note = a, c, g, u, unknown, other, or absent
  misc_difference 105: note = a, c, g, u, unknown, other, or absent
  misc_difference 106: note = a, c, g, u, unknown, other, or absent
  misc_difference 107: note = a, c, g, u, unknown, other, or absent
  misc_difference 108: note = a, c, g, u, unknown, other, or absent
  misc_difference 109: note = a, c, g, u, unknown, other, or absent
  misc_difference 110: note = a, c, g, u, unknown, other, or absent
  misc_difference 111: note = a, c, g, u, unknown, other, or absent
  misc_difference 112: note = a, c, g, u, unknown, other, or absent
  misc_difference 113: note = a, c, g, u, unknown, other, or absent
  misc_difference 114: note = a, c, g, u, unknown, other, or absent
  misc_difference 115: note = a, c, g, u, unknown, other, or absent
  misc_difference 116: note = a, c, g, u, unknown, other, or absent
  misc_difference 117: note = a, c, g, u, unknown, other, or absent
  misc_difference 118: note = a, c, g, u, unknown, other, or absent
  misc_difference 119: note = a, c, g, u, unknown, other, or absent
  misc_difference 120: note = a, c, g, u, unknown, other, or absent
  misc_difference 121: note = a, c, g, u, unknown, other, or absent
  misc_difference 122: note = a, c, g, u, unknown, other, or absent
  misc_difference 123: note = a, c, g, u, unknown, other, or absent
  misc_difference 124: note = a, c, g, u, unknown, other, or absent
  misc_difference 125: note = a, c, g, u, unknown, other, or absent
  misc_difference 126: note = a, c, g, u, unknown, other, or absent
  misc_difference 127: note = a, c, g, u, unknown, other, or absent
  misc_difference 128: note = a, c, g, u, unknown, other, or absent
  misc_difference 129: note = a, c, g, u, unknown, other, or absent
  misc_difference 130: note = a, c, g, u, unknown, other, or absent
  misc_difference 131: note = a, c, g, u, unknown, other, or absent
  misc_difference 132: note = a, c, g, u, unknown, other, or absent
  misc_difference 133: note = a, c, g, u, unknown, other, or absent
  misc_difference 134: note = a, c, g, u, unknown, other, or absent
  misc_difference 135: note = a, c, g, u, unknown, other, or absent
  misc_difference 136: note = a, c, g, u, unknown, other, or absent
  misc_difference 137: note = a, c, g, u, unknown, other, or absent
  misc_difference 138: note = a, c, g, u, unknown, other, or absent
  misc_difference 139: note = a, c, g, u, unknown, other, or absent
  misc_difference 140: note = a, c, g, u, unknown, other, or absent
  misc_difference 141: note = a, c, g, u, unknown, other, or absent
  misc_difference 142: note = a, c, g, u, unknown, other, or absent
  misc_difference 143: note = a, c, g, u, unknown, other, or absent
  misc_difference 144: note = a, c, g, u, unknown, other, or absent
  misc_difference 145: note = a, c, g, u, unknown, other, or absent
  misc_difference 146: note = a, c, g, u, unknown, other, or absent
  misc_difference 147: note = a, c, g, u, unknown, other, or absent
  misc_difference 148: note = a, c, g, u, unknown, other, or absent
  misc_difference 149: note = a, c, g, u, unknown, other, or absent
  misc_difference 150: note = a, c, g, u, unknown, other, or absent
  misc_difference 151: note = a, c, g, u, unknown, other, or absent
  misc_difference 152: note = a, c, g, u, unknown, other, or absent
  misc_difference 153: note = a, c, g, u, unknown, other, or absent
  misc_difference 154: note = a, c, g, u, unknown, other, or absent
  misc_difference 155: note = a, c, g, u, unknown, other, or absent
  misc_difference 156: note = a, c, g, u, unknown, other, or absent
  misc_difference 157: note = a, c, g, u, unknown, other, or absent
  misc_difference 158: note = a, c, g, u, unknown, other, or absent
  misc_difference 159: note = a, c, g, u, unknown, other, or absent
  misc_difference 160: note = a, c, g, u, unknown, other, or absent
  misc_difference 161: note = a, c, g, u, unknown, other, or absent
  misc_difference 162: note = a, c, g, u, unknown, other, or absent
  misc_difference 163: note = a, c, g, u, unknown, other, or absent
  misc_difference 164: note = a, c, g, u, unknown, other, or absent
  misc_difference 165: note = a, c, g, u, unknown, other, or absent
  misc_difference 166: note = a, c, g, u, unknown, other, or absent
  misc_difference 167: note = a, c, g, u, unknown, other, or absent
  misc_difference 168: note = a, c, g, u, unknown, other, or absent
  misc_difference 169: note = a, c, g, u, unknown, other, or absent
  misc_difference 170: note = a, c, g, u, unknown, other, or absent
  misc_difference 171: note = a, c, g, u, unknown, other, or absent
  misc_difference 172: note = a, c, g, u, unknown, other, or absent
  misc_difference 173: note = a, c, g, u, unknown, other, or absent
  misc_difference 174: note = a, c, g, u, unknown, other, or absent
  misc_difference 175: note = a, c, g, u, unknown, other, or absent
  misc_difference 176: note = a, c, g, u, unknown, other, or absent
  misc_difference 177: note = a, c, g, u, unknown, other, or absent
  misc_difference 178: note = a, c, g, u, unknown, other, or absent
  misc_difference 179: note = a, c, g, u, unknown, other, or absent
  misc_difference 180: note = a, c, g, u, unknown, other, or absent
  misc_difference 181: note = a, c, g, u, unknown, other, or absent
  misc_difference 182: note = a, c, g, u, unknown, other, or absent
  misc_difference 183: note = a, c, g, u, unknown, other, or absent
  misc_difference 184: note = a, c, g, u, unknown, other, or absent
  misc_difference 185: note = a, c, g, u, unknown, other, or absent
  misc_difference 186: note = a, c, g, u, unknown, other, or absent
  misc_difference 187: note = a, c, g, u, unknown, other, or absent
  misc_difference 188: note = a, c, g, u, unknown, other, or absent
  misc_difference 189: note = a, c, g, u, unknown, other, or absent
  misc_difference 190: note = a, c, g, u, unknown, other, or absent
  misc_difference 191: note = a, c, g, u, unknown, other, or absent
  misc_difference 192: note = a, c, g, u, unknown, other, or absent
  misc_difference 193: note = a, c, g, u, unknown, other, or absent
  misc_difference 194: note = a, c, g, u, unknown, other, or absent
  misc_difference 195: note = a, c, g, u, unknown, other, or absent
  misc_difference 196: note = a, c, g, u, unknown, other, or absent
  misc_difference 197: note = a, c, g, u, unknown, other, or absent
  misc_difference 198: note = a, c, g, u, unknown, other, or absent
  misc_difference 199: note = a, c, g, u, unknown, other, or absent
  misc_difference 200: note = a, c, g, u, unknown, other, or absent
  misc_difference 201: note = a, c, g, u, unknown, other, or absent
  misc_difference 202: note = a, c, g, u, unknown, other, or absent
  misc_difference 203: note = a, c, g, u, unknown, other, or absent
  misc_difference 204: note = a, c, g, u, unknown, other, or absent
  misc_difference 205: note = a, c, g, u, unknown, other, or absent
  misc_difference 206: note = a, c, g, u, unknown, other, or absent
  misc_difference 207: note = a, c, g, u, unknown, other, or absent
  misc_difference 208: note = a, c, g, u, unknown, other, or absent
  misc_difference 209: note = a, c, g, u, unknown, other, or absent
  misc_difference 210: note = a, c, g, u, unknown, other, or absent
  misc_difference 211: note = a, c, g, u, unknown, other, or absent
  misc_difference 212: note = a, c, g, u, unknown, other, or absent
  misc_difference 213: note = a, c, g, u, unknown, other, or absent
  misc_difference 214: note = a, c, g, u, unknown, other, or absent
  misc_difference 215: note = a, c, g, u, unknown, other, or absent
  misc_difference 216: note = a, c, g, u, unknown, other, or absent
  misc_difference 217: note = a, c, g, u, unknown, other, or absent
  misc_difference 218: note = a, c, g, u, unknown, other, or absent
  misc_difference 219: note = a, c, g, u, unknown, other, or absent
  misc_difference 220: note = a, c, g, u, unknown, other, or absent
  misc_difference 221: note = a, c, g, u, unknown, other, or absent
  misc_difference 222: note = a, c, g, u, unknown, other, or absent
  misc_difference 223: note = a, c, g, u, unknown, other, or absent
  misc_difference 224: note = a, c, g, u, unknown, other, or absent
  misc_difference 225: note = a, c, g, u, unknown, other, or absent
  misc_difference 226: note = a, c, g, u, unknown, other, or absent
  misc_difference 227: note = a, c, g, u, unknown, other, or absent
  misc_difference 228: note = a, c, g, u, unknown, other, or absent
  misc_difference 229: note = a, c, g, u, unknown, other, or absent
  misc_difference 230: note = a, c, g, u, unknown, other, or absent
  misc_difference 231: note = a, c, g, u, unknown, other, or absent
  misc_difference 232: note = a, c, g, u, unknown, other, or absent
  misc_difference 233: note = a, c, g, u, unknown, other, or absent
  misc_difference 234: note = a, c, g, u, unknown, other, or absent
  misc_difference 235: note = a, c, g, u, unknown, other, or absent
  misc_difference 236: note = a, c, g, u, unknown, other, or absent
  misc_difference 237: note = a, c, g, u, unknown, other, or absent
  misc_difference 238: note = a, c, g, u, unknown, other, or absent
  misc_difference 239: note = a, c, g, u, unknown, other, or absent
  misc_difference 240: note = a, c, g, u, unknown, other, or absent
  misc_difference 241: note = a, c, g, u, unknown, other, or absent
  misc_difference 242: note = a, c, g, u, unknown, other, or absent
  misc_difference 243: note = a, c, g, u, unknown, other, or absent
  misc_difference 244: note = a, c, g, u, unknown, other, or absent
  misc_difference 245: note = a, c, g, u, unknown, other, or absent
  misc_difference 246: note = a, c, g, u, unknown, other, or absent
  misc_difference 247: note = a, c, g, u, unknown, other, or absent
  misc_difference 248: note = a, c, g, u, unknown, other, or absent
  misc_difference 249: note = a, c, g, u, unknown, other, or absent
  misc_difference 250: note = a, c, g, u, unknown, other, or absent
  misc_difference 251: note = a, c, g, u, unknown, other, or absent
  misc_difference 252: note = a, c, g, u, unknown, other, or absent
  misc_difference 253: note = a, c, g, u, unknown, other, or absent
  misc_difference 254: note = a, c, g, u, unknown, other, or absent
  misc_difference 255: note = a, c, g, u, unknown, other, or absent
  misc_difference 256: note = a, c, g, u, unknown, other, or absent
  misc_difference 257: note = a, c, g, u, unknown, other, or absent
  misc_difference 258: note = a, c, g, u, unknown, other, or absent
  misc_difference 259: note = a, c, g, u, unknown, other, or absent
  misc_difference 260: note = a, c, g, u, unknown, other, or absent
  misc_difference 261: note = a, c, g, u, unknown, other, or absent
  misc_difference 262: note = a, c, g, u, unknown, other, or absent
  misc_difference 263: note = a, c, g, u, unknown, other, or absent
  misc_difference 264: note = a, c, g, u, unknown, other, or absent
  misc_difference 265: note = a, c, g, u, unknown, other, or absent
  misc_difference 266: note = a, c, g, u, unknown, other, or absent
  misc_difference 267: note = a, c, g, u, unknown, other, or absent
  misc_difference 268: note = a, c, g, u, unknown, other, or absent
  misc_difference 269: note = a, c, g, u, unknown, other, or absent
  misc_difference 270: note = a, c, g, u, unknown, other, or absent
  misc_difference 271: note = a, c, g, u, unknown, other, or absent
  misc_difference 272: note = a, c, g, u, unknown, other, or absent
  misc_difference 273: note = a, c, g, u, unknown, other, or absent
  misc_difference 274: note = a, c, g, u, unknown, other, or absent
  misc_difference 275: note = a, c, g, u, unknown, other, or absent
  misc_difference 276: note = a, c, g, u, unknown, other, or absent
  misc_difference 277: note = a, c, g, u, unknown, other, or absent
  misc_difference 278: note = a, c, g, u, unknown, other, or absent
  misc_difference 279: note = a, c, g, u, unknown, other, or absent
  misc_difference 280: note = a, c, g, u, unknown, other, or absent
  misc_difference 281: note = a, c, g, u, unknown, other, or absent
  misc_difference 282: note = a, c, g, u, unknown, other, or absent
  misc_difference 283: note = a, c, g, u, unknown, other, or absent
  misc_difference 284: note = a, c, g, u, unknown, other, or absent
  misc_difference 285: note = a, c, g, u, unknown, other, or absent
  misc_difference 286: note = a, c, g, u, unknown, other, or absent
  misc_difference 287: note = a, c, g, u, unknown, other, or absent
  misc_difference 288: note = a, c, g, u, unknown, other, or absent
  misc_difference 289: note = a, c, g, u, unknown, other, or absent
  misc_difference 290: note = a, c, g, u, unknown, other, or absent
  misc_difference 291: note = a, c, g, u, unknown, other, or absent
  misc_difference 292: note = a, c, g, u, unknown, other, or absent
  misc_difference 293: note = a, c, g, u, unknown, other, or absent
  misc_difference 294: note = a, c, g, u, unknown, other, or absent
  misc_difference 295: note = a, c, g, u, unknown, other, or absent
  misc_difference 296: note = a, c, g, u, unknown, other, or absent
  misc_difference 297: note = a, c, g, u, unknown, other, or absent
  misc_difference 298: note = a, c, g, u, unknown, other, or absent
  misc_difference 299: note = a, c, g, u, unknown, other, or absent
  misc_difference 300: note = a, c, g, u, unknown, other, or absent
  misc_difference 301: note = a, c, g, u, unknown, other, or absent
  misc_difference 302: note = a, c, g, u, unknown, other, or absent
  misc_difference 303: note = a, c, g, u, unknown, other, or absent
  misc_difference 304: note = a, c, g, u, unknown, other, or absent
  misc_difference 305: note = a, c, g, u, unknown, other, or absent
  misc_difference 306: note = a, c, g, u, unknown, other, or absent
  misc_difference 307: note = a, c, g, u, unknown, other, or absent
  misc_difference 308: note = a, c, g, u, unknown, other, or absent
  misc_difference 309: note = a, c, g, u, unknown, other, or absent
  misc_difference 310: note = a, c, g, u, unknown, other, or absent
  misc_difference 311: note = a, c, g, u, unknown, other, or absent
  misc_difference 312: note = a, c, g, u, unknown, other, or absent
  misc_difference 313: note = a, c, g, u, unknown, other, or absent
  misc_difference 314: note = a, c, g, u, unknown, other, or absent
  misc_difference 315: note = a, c, g, u, unknown, other, or absent
  misc_difference 316: note = a, c, g, u, unknown, other, or absent
  misc_difference 317: note = May be absent
  misc_difference 318: note = May be absent
  misc_difference 319: note = a, c, g, u, unknown, other, or absent
  misc_difference 320: note = May be absent
  misc_difference 321: note = May be absent
  misc_difference 322: note = May be absent
  misc_difference 323: note = May be absent
  misc_difference 324: note = May be absent
  misc_difference 325: note = May be absent
  misc_difference 326: note = May be absent
  misc_difference 327: note = May be absent
  misc_difference 328: note = a, c, g, u, unknown, other, or absent
  misc_difference 329: note = May be absent
  misc_difference 330: note = May be absent
  misc_difference 331: note = May be absent
  misc_difference 332: note = May be absent
  misc_difference 333: note = May be absent
  misc_difference 334: note = May be absent
  misc_difference 335: note = May be absent
  misc_difference 336: note = May be absent
  misc_difference 337: note = May be absent
  misc_difference 338: note = May be absent
  misc_difference 339: note = May be absent
  misc_difference 340: note = May be absent
  misc_difference 341: note = May be absent
  misc_difference 46..317: note = This region may encompass 1-271 nucleotides
rksgrwdkrghbyavnyggtdgarvrydynhkywbhryrhdhdhrnnnnnnnnnnnnnnnnnnnnnnnnnnnnnnnnnnnnnnnnnnnnnnnnnnnnnnnnnnnnnnnnnnnnnnnnnnnnnnnnnnnnnnnnnnnnnnnnnnnnnnnnnnnnnnnnnnnnnnnnnnnnnnnnnnnnnnnnnnnnnnnnnnnnnnnnnnnnnnnnnnnnnnnnnnnnnnnnnnnnnnnnnnnnnnnnnnnnnnnnnnnnnnnnnnnnnnnnnnnnnnnnnnnnnnnnnnnnnnnnnnnnnnnnnnnnnnnnnnnnnnnnnnnnnnnbhnrgdtcrayncyydvhhyywccd

SEQ ID NO: 564 - RNA, 341 nt, synthetic construct
  source 1..341: mol_type = other RNA
  misc_difference 1: note = May be absent
  misc_difference 2: note = May be absent
  misc_difference 3: note = May be absent
  misc_difference 4: note = May be absent
  misc_difference 5: note = May be absent
  misc_difference 6: note = May be absent
  misc_difference 7: note = May be absent
  misc_difference 8: note = May be absent
  misc_difference 9: note = May be absent
  misc_difference 10: note = May be absent
  misc_difference 11: note = May be absent
  misc_difference 12: note = May be absent
  misc_difference 13: note = May be absent
  misc_difference 14: note = May be absent
  misc_difference 15: note = May be absent
  misc_difference 16: note = a, c, g, u, unknown, other, or absent
  misc_difference 17: note = May be absent
  misc_difference 18: note = May be absent
  misc_difference 19: note = May be absent
  misc_difference 20: note = May be absent
  misc_difference 21: note = May be absent
  misc_difference 22: note = May be absent
  misc_difference 23: note = May be absent
  misc_difference 24: note = May be absent
  misc_difference 25: note = May be absent
  misc_difference 26: note = May be absent
  misc_difference 27: note = May be absent
  misc_difference 28: note = May be absent
  misc_difference 29: note = May be absent
  misc_difference 30: note = a, c, g, u, unknown, other, or absent
  misc_difference 31: note = May be absent
  misc_difference 32: note = May be absent
  misc_difference 33: note = May be absent
  misc_difference 34: note = May be absent
  misc_difference 35: note = May be absent
  misc_difference 36: note = May be absent
  misc_difference 37: note = May be absent
  misc_difference 38: note = May be absent
  misc_difference 39: note = May be absent
  misc_difference 40: note = May be absent
  misc_difference 41: note = May be absent
  misc_difference 42: note = May be absent
  misc_difference 43: note = May be absent
  misc_difference 44: note = May be absent
  misc_difference 45: note = May be absent
  misc_difference 46: note = a, c, g, u, unknown, other, or absent
  misc_difference 47: note = a, c, g, u, unknown, other, or absent
  misc_difference 48: note = a, c, g, u, unknown, other, or absent
  misc_difference 49: note = a, c, g, u, unknown, other, or absent
  misc_difference 50: note = a, c, g, u, unknown, other, or absent
  misc_difference 51: note = a, c, g, u, unknown, other, or absent
  misc_difference 52: note = a, c, g, u, unknown, other, or absent
  misc_difference 53: note = a, c, g, u, unknown, other, or absent
  misc_difference 54: note = a, c, g, u, unknown, other, or absent
  misc_difference 55: note = a, c, g, u, unknown, other, or absent
  misc_difference 56: note = a, c, g, u, unknown, other, or absent
  misc_difference 57: note = a, c, g, u, unknown, other, or absent
  misc_difference 58: note = a, c, g, u, unknown, other, or absent
  misc_difference 59: note = a, c, g, u, unknown, other, or absent
  misc_difference 60: note = a, c, g, u, unknown, other, or absent
  misc_difference 61: note = a, c, g, u, unknown, other, or absent
  misc_difference 62: note = a, c, g, u, unknown, other, or absent
  misc_difference 63: note = a, c, g, u, unknown, other, or absent
  misc_difference 64: note = a, c, g, u, unknown, other, or absent
  misc_difference 65: note = a, c, g, u, unknown, other, or absent
  misc_difference 66: note = a, c, g, u, unknown, other, or absent
  misc_difference 67: note = a, c, g, u, unknown, other, or absent
  misc_difference 68: note = a, c, g, u, unknown, other, or absent
  misc_difference 69: note = a, c, g, u, unknown, other, or absent
  misc_difference 70: note = a, c, g, u, unknown, other, or absent
  misc_difference 71: note = a, c, g, u, unknown, other, or absent
  misc_difference 72: note = a, c, g, u, unknown, other, or absent
  misc_difference 73: note = a, c, g, u, unknown, other, or absent
  misc_difference 74: note = a, c, g, u, unknown, other, or absent
  misc_difference 75: note = a, c, g, u, unknown, other, or absent
  misc_difference 76: note = a, c, g, u, unknown, other, or absent
  misc_difference 77: note = a, c, g, u, unknown, other, or absent
  misc_difference 78: note = a, c, g, u, unknown, other, or absent
  misc_difference 79: note = a, c, g, u, unknown, other, or absent
  misc_difference 80: note = a, c, g, u, unknown, other, or absent
  misc_difference 81: note = a, c, g, u, unknown, other, or absent
  misc_difference 82: note = a, c, g, u, unknown, other, or absent
  misc_difference 83: note = a, c, g, u, unknown, other, or absent
  misc_difference 84: note = a, c, g, u, unknown, other, or absent
  misc_difference 85: note = a, c, g, u, unknown, other, or absent
  misc_difference 86: note = a, c, g, u, unknown, other, or absent
  misc_difference 87: note = a, c, g, u, unknown, other, or absent
  misc_difference 88: note = a, c, g, u, unknown, other, or absent
  misc_difference 89: note = a, c, g, u, unknown, other, or absent
  misc_difference 90: note = a, c, g, u, unknown, other, or absent
  misc_difference 91: note = a, c, g, u, unknown, other, or absent
  misc_difference 92: note = a, c, g, u, unknown, other, or absent
  misc_difference 93: note = a, c, g, u, unknown, other, or absent
  misc_difference 94: note = a, c, g, u, unknown, other, or absent
  misc_difference 95: note = a, c, g, u, unknown, other, or absent
  misc_difference 96: note = a, c, g, u, unknown, other, or absent
  misc_difference 97: note = a, c, g, u, unknown, other, or absent
  misc_difference 98: note = a, c, g, u, unknown, other, or absent
  misc_difference 99: note = a, c, g, u, unknown, other, or absent
  misc_difference 100: note = a, c, g, u, unknown, other, or absent
  misc_difference 101: note = a, c, g, u, unknown, other, or absent
  misc_difference 102: note = a, c, g, u, unknown, other, or absent
  misc_difference 103: note = a, c, g, u, unknown, other, or absent
  misc_difference 104: note = a, c, g, u, unknown, other, or absent
  misc_difference 105: note = a, c, g, u, unknown, other, or absent
  misc_difference 106: note = a, c, g, u, unknown, other, or absent
  misc_difference 107: note = a, c, g, u, unknown, other, or absent
  misc_difference 108: note = a, c, g, u, unknown, other, or absent
  misc_difference 109: note = a, c, g, u, unknown, other, or absent
  misc_difference 110: note = a, c, g, u, unknown, other, or absent
  misc_difference 111: note = a, c, g, u, unknown, other, or absent
  misc_difference 112: note = a, c, g, u, unknown, other, or absent
  misc_difference 113: note = a, c, g, u, unknown, other, or absent
  misc_difference 114: note = a, c, g, u, unknown, other, or absent
  misc_difference 115: note = a, c, g, u, unknown, other, or absent
  misc_difference 116: note = a, c, g, u, unknown, other, or absent
  misc_difference 117: note = a, c, g, u, unknown, other, or absent
  misc_difference 118: note = a, c, g, u, unknown, other, or absent
  misc_difference 119: note = a, c, g, u, unknown, other, or absent
  misc_difference 120: note = a, c, g, u, unknown, other, or absent
  misc_difference 121: note = a, c, g, u, unknown, other, or absent
  misc_difference 122: note = a, c, g, u, unknown, other, or absent
  misc_difference 123: note = a, c, g, u, unknown, other, or absent
  misc_difference 124: note = a, c, g, u, unknown, other, or absent
  misc_difference 125: note = a, c, g, u, unknown, other, or absent
  misc_difference 126: note = a, c, g, u, unknown, other, or absent
  misc_difference 127: note = a, c, g, u, unknown, other, or absent
  misc_difference 128: note = a, c, g, u, unknown, other, or absent
  misc_difference 129: note = a, c, g, u, unknown, other, or absent
  misc_difference 130: note = a, c, g, u, unknown, other, or absent
  misc_difference 131: note = a, c, g, u, unknown, other, or absent
  misc_difference 132: note = a, c, g, u, unknown, other, or absent
  misc_difference 133: note = a, c, g, u, unknown, other, or absent
  misc_difference 134: note = a, c, g, u, unknown, other, or absent
  misc_difference 135: note = a, c, g, u, unknown, other, or absent
  misc_difference 136: note = a, c, g, u, unknown, other, or absent
  misc_difference 137: note = a, c, g, u, unknown, other, or absent
  misc_difference 138: note = a, c, g, u, unknown, other, or absent
  misc_difference 139: note = a, c, g, u, unknown, other, or absent
  misc_difference 140: note = a, c, g, u, unknown, other, or absent
  misc_difference 141: note = a, c, g, u, unknown, other, or absent
  misc_difference 142: note = a, c, g, u, unknown, other, or absent
  misc_difference 143: note = a, c, g, u, unknown, other, or absent
  misc_difference 144: note = a, c, g, u, unknown, other, or absent
  misc_difference 145: note = a, c, g, u, unknown, other, or absent
  misc_difference 146: note = a, c, g, u, unknown, other, or absent
  misc_difference 147: note = a, c, g, u, unknown, other, or absent
  misc_difference 148: note = a, c, g, u, unknown, other, or absent
  misc_difference 149: note = a, c, g, u, unknown, other, or absent
  misc_difference 150: note = a, c, g, u, unknown, other, or absent
  misc_difference 151: note = a, c, g, u, unknown, other, or absent
  misc_difference 152: note = a, c, g, u, unknown, other, or absent
  misc_difference 153: note = a, c, g, u, unknown, other, or absent
  misc_difference 154: note = a, c, g, u, unknown, other, or absent
  misc_difference 155: note = a, c, g, u, unknown, other, or absent
  misc_difference 156: note = a, c, g, u, unknown, other, or absent
  misc_difference 157: note = a, c, g, u, unknown, other, or absent
  misc_difference 158: note = a, c, g, u, unknown, other, or absent
  misc_difference 159: note = a, c, g, u, unknown, other, or absent
  misc_difference 160: note = a, c, g, u, unknown, other, or absent
  misc_difference 161: note = a, c, g, u, unknown, other, or absent
  misc_difference 162: note = a, c, g, u, unknown, other, or absent
  misc_difference 163: note = a, c, g, u, unknown, other, or absent
  misc_difference 164: note = a, c, g, u, unknown, other, or absent
  misc_difference 165: note = a, c, g, u, unknown, other, or absent
  misc_difference 166: note = a, c, g, u, unknown, other, or absent
  misc_difference 167: note = a, c, g, u, unknown, other, or absent
  misc_difference 168: note = a, c, g, u, unknown, other, or absent
  misc_difference 169: note = a, c, g, u, unknown, other, or absent
  misc_difference 170: note = a, c, g, u, unknown, other, or absent
  misc_difference 171: note = a, c, g, u, unknown, other, or absent
  misc_difference 172: note = a, c, g, u, unknown, other, or absent
  misc_difference 173: note = a, c, g, u, unknown, other, or absent
  misc_difference 174: note = a, c, g, u, unknown, other, or absent
  misc_difference 175: note = a, c, g, u, unknown, other, or absent
  misc_difference 176: note = a, c, g, u, unknown, other, or absent
  misc_difference 177: note = a, c, g, u, unknown, other, or absent
  misc_difference 178: note = a, c, g, u, unknown, other, or absent
  misc_difference 179: note = a, c, g, u, unknown, other, or absent
  misc_difference 180: note = a, c, g, u, unknown, other, or absent
  misc_difference 181: note = a, c, g, u, unknown, other, or absent
  misc_difference 182: note = a, c, g, u, unknown, other, or absent
  misc_difference 183: note = a, c, g, u, unknown, other, or absent
  misc_difference 184: note = a, c, g, u, unknown, other, or absent
  misc_difference 185: note = a, c, g, u, unknown, other, or absent
  misc_difference 186: note = a, c, g, u, unknown, other, or absent
  misc_difference 187: note = a, c, g, u, unknown, other, or absent
  misc_difference 188: note = a, c, g, u, unknown, other, or absent
  misc_difference 189: note = a, c, g, u, unknown, other, or absent
  misc_difference 190: note = a, c, g, u, unknown, other, or absent
  misc_difference 191: note = a, c, g, u, unknown, other, or absent
  misc_difference 192: note = a, c, g, u, unknown, other, or absent
  misc_difference 193: note = a, c, g, u, unknown, other, or absent
  misc_difference 194: note = a, c, g, u, unknown, other, or absent
  misc_difference 195: note = a, c, g, u, unknown, other, or absent
  misc_difference 196: note = a, c, g, u, unknown, other, or absent
  misc_difference 197: note = a, c, g, u, unknown, other, or absent
  misc_difference 198: note = a, c, g, u, unknown, other, or absent
  misc_difference 199: note = a, c, g, u, unknown, other, or absent
  misc_difference 200: note = a, c, g, u, unknown, other, or absent
  misc_difference 201: note = a, c, g, u, unknown, other, or absent
  misc_difference 202: note = a, c, g, u, unknown, other, or absent
  misc_difference 203: note = a, c, g, u, unknown, other, or absent
  misc_difference 204: note = a, c, g, u, unknown, other, or absent
  misc_difference 205: note = a, c, g, u, unknown, other, or absent
  misc_difference 206: note = a, c, g, u, unknown, other, or absent
  misc_difference 207: note = a, c, g, u, unknown, other, or absent
  misc_difference 208: note = a, c, g, u, unknown, other, or absent
  misc_difference 209: note = a, c, g, u, unknown, other, or absent
  misc_difference 210: note = a, c, g, u, unknown, other, or absent
  misc_difference 211: note = a, c, g, u, unknown, other, or absent
  misc_difference 212: note = a, c, g, u, unknown, other, or absent
  misc_difference 213: note = a, c, g, u, unknown, other, or absent
  misc_difference 214: note = a, c, g, u, unknown, other, or absent
  misc_difference 215: note = a, c, g, u, unknown, other, or absent
  misc_difference 216: note = a, c, g, u, unknown, other, or absent
  misc_difference 217: note = a, c, g, u, unknown, other, or absent
  misc_difference 218: note = a, c, g, u, unknown, other, or absent
  misc_difference 219: note = a, c, g, u, unknown, other, or absent
  misc_difference 220: note = a, c, g, u, unknown, other, or absent
  misc_difference 221: note = a, c, g, u, unknown, other, or absent
  misc_difference 222: note = a, c, g, u, unknown, other, or absent
  misc_difference 223: note = a, c, g, u, unknown, other, or absent
  misc_difference 224: note = a, c, g, u, unknown, other, or absent
  misc_difference 225: note = a, c, g, u, unknown, other, or absent
  misc_difference 226: note = a, c, g, u, unknown, other, or absent
  misc_difference 227: note = a, c, g, u, unknown, other, or absent
  misc_difference 228: note = a, c, g, u, unknown, other, or absent
  misc_difference 229: note = a, c, g, u, unknown, other, or absent
  misc_difference 230: note = a, c, g, u, unknown, other, or absent
  misc_difference 231: note = a, c, g, u, unknown, other, or absent
  misc_difference 232: note = a, c, g, u, unknown, other, or absent
  misc_difference 233: note = a, c, g, u, unknown, other, or absent
  misc_difference 234: note = a, c, g, u, unknown, other, or absent
  misc_difference 235: note = a, c, g, u, unknown, other, or absent
  misc_difference 236: note = a, c, g, u, unknown, other, or absent
  misc_difference 237: note = a, c, g, u, unknown, other, or absent
  misc_difference 238: note = a, c, g, u, unknown, other, or absent
  misc_difference 239: note = a, c, g, u, unknown, other, or absent
  misc_difference 240: note = a, c, g, u, unknown, other, or absent
  misc_difference 241: note = a, c, g, u, unknown, other, or absent
  misc_difference 242: note = a, c, g, u, unknown, other, or absent
  misc_difference 243: note = a, c, g, u, unknown, other, or absent
  misc_difference 244: note = a, c, g, u, unknown, other, or absent
  misc_difference 245: note = a, c, g, u, unknown, other, or absent
  misc_difference 246: note = a, c, g, u, unknown, other, or absent
  misc_difference 247: note = a, c, g, u, unknown, other, or absent
  misc_difference 248: note = a, c, g, u, unknown, other, or absent
  misc_difference 249: note = a, c, g, u, unknown, other, or absent
  misc_difference 250: note = a, c, g, u, unknown, other, or absent
  misc_difference 251: note = a, c, g, u, unknown, other, or absent
  misc_difference 252: note = a, c, g, u, unknown, other, or absent
  misc_difference 253: note = a, c, g, u, unknown, other, or absent
  misc_difference 254: note = a, c, g, u, unknown, other, or absent
  misc_difference 255: note = a, c, g, u, unknown, other, or absent
  misc_difference 256: note = a, c, g, u, unknown, other, or absent
  misc_difference 257: note = a, c, g, u, unknown, other, or absent
  misc_difference 258: note = a, c, g, u, unknown, other, or absent
  misc_difference 259: note = a, c, g, u, unknown, other, or absent
  misc_difference 260: note = a, c, g, u, unknown, other, or absent
  misc_difference 261: note = a, c, g, u, unknown, other, or absent
  misc_difference 262: note = a, c, g, u, unknown, other, or absent
  misc_difference 263: note = a, c, g, u, unknown, other, or absent
  misc_difference 264: note = a, c, g, u, unknown, other, or absent
  misc_difference 265: note = a, c, g, u, unknown, other, or absent
  misc_difference 266: note = a, c, g, u, unknown, other, or absent
  misc_difference 267: note = a, c, g, u, unknown, other, or absent
  misc_difference 268: note = a, c, g, u, unknown, other, or absent
  misc_difference 269: note = a, c, g, u, unknown, other, or absent
  misc_difference 270: note = a, c, g, u, unknown, other, or absent
  misc_difference 271: note = a, c, g, u, unknown, other, or absent
  misc_difference 272: note = a, c, g, u, unknown, other, or absent
  misc_difference 273: note = a, c, g, u, unknown, other, or absent
  misc_difference 274: note = a, c, g, u, unknown, other, or absent
  misc_difference 275: note = a, c, g, u, unknown, other, or absent
  misc_difference 276: note = a, c, g, u, unknown, other, or absent
  misc_difference 277: note = a, c, g, u, unknown, other, or absent
  misc_difference 278: note = a, c, g, u, unknown, other, or absent
  misc_difference 279: note = a, c, g, u, unknown, other, or absent
  misc_difference 280: note = a, c, g, u, unknown, other, or absent
  misc_difference 281: note = a, c, g, u, unknown, other, or absent
  misc_difference 282: note = a, c, g, u, unknown, other, or absent
  misc_difference 283: note = a, c, g, u, unknown, other, or absent
  misc_difference 284: note = a, c, g, u, unknown, other, or absent
  misc_difference 285: note = a, c, g, u, unknown, other, or absent
  misc_difference 286: note = a, c, g, u, unknown, other, or absent
  misc_difference 287: note = a, c, g, u, unknown, other, or absent
  misc_difference 288: note = a, c, g, u, unknown, other, or absent
  misc_difference 289: note = a, c, g, u, unknown, other, or absent
  misc_difference 290: note = a, c, g, u, unknown, other, or absent
  misc_difference 291: note = a, c, g, u, unknown, other, or absent
  misc_difference 292: note = a, c, g, u, unknown, other, or absent
  misc_difference 293: note = a, c, g, u, unknown, other, or absent
  misc_difference 294: note = a, c, g, u, unknown, other, or absent
  misc_difference 295: note = a, c, g, u, unknown, other, or absent
  misc_difference 296: note = a, c, g, u, unknown, other, or absent
  misc_difference 297: note = a, c, g, u, unknown, other, or absent
  misc_difference 298: note = a, c, g, u, unknown, other, or absent
  misc_difference 299: note = a, c, g, u, unknown, other, or absent
  misc_difference 300: note = a, c, g, u, unknown, other, or absent
  misc_difference 301: note = a, c, g, u, unknown, other, or absent
  misc_difference 302: note = a, c, g, u, unknown, other, or absent
  misc_difference 303: note = a, c, g, u, unknown, other, or absent
  misc_difference 304: note = a, c, g, u, unknown, other, or absent
  misc_difference 305: note = a, c, g, u, unknown, other, or absent
  misc_difference 306: note = a, c, g, u, unknown, other, or absent
  misc_difference 307: note = a, c, g, u, unknown, other, or absent
  misc_difference 308: note = a, c, g, u, unknown, other, or absent
  misc_difference 309: note = a, c, g, u, unknown, other, or absent
  misc_difference 310: note = a, c, g, u, unknown, other, or absent
  misc_difference 311: note = a, c, g, u, unknown, other, or absent
  misc_difference 312: note = a, c, g, u, unknown, other, or absent
  misc_difference 313: note = a, c, g, u, unknown, other, or absent
  misc_difference 314: note = a, c, g, u, unknown, other, or absent
  misc_difference 315: note = a, c, g, u, unknown, other, or absent
  misc_difference 316: note = a, c, g, u, unknown, other, or absent
  misc_difference 317: note = May be absent
  misc_difference 318: note = May be absent
  misc_difference 319: note = a, c, g, u, unknown, other, or absent
  misc_difference 320: note = May be absent
  misc_difference 321: note = May be absent
  misc_difference 322: note = May be absent
  misc_difference 323: note = May be absent
  misc_difference 324: note = May be absent
  misc_difference 325: note = May be absent
  misc_difference 326: note = May be absent
  misc_difference 327: note = May be absent
  misc_difference 328: note = May be absent
  misc_difference 329: note = May be absent
  misc_difference 330: note = May be absent
  misc_difference 331: note = May be absent
  misc_difference 332: note = May be absent
  misc_difference 333: note = May be absent
  misc_difference 334: note = May be absent
  misc_difference 335: note = May be absent
  misc_difference 336: note = May be absent
  misc_difference 337: note = May be absent
  misc_difference 338: note = May be absent
  misc_difference 339: note = May be absent
  misc_difference 340: note = May be absent
  misc_difference 341: note = May be absent
  misc_difference 46..317: note = This region may encompass 1-271 nucleotides
ggggrwdtrghbyavnyggtdgarvrydynhkywkhryrhdhdhrnnnnnnnnnnnnnnnnnnnnnnnnnnnnnnnnnnnnnnnnnnnnnnnnnnnnnnnnnnnnnnnnnnnnnnnnnnnnnnnnnnnnnnnnnnnnnnnnnnnnnnnnnnnnnnnnnnnnnnnnnnnnnnnnnnnnnnnnnnnnnnnnnnnnnnnnnnnnnnnnnnnnnnnnnnnnnnnnnnnnnnnnnnnnnnnnnnnnnnnnnnnnnnnnnnnnnnnnnnnnnnnnnnnnnnnnnnnnnnnnnnnnnnnnnnnnnnnnnnnnnnnnnnnnnnnbhnrgdtcraybccydvhhyytcca

SEQ ID NO: 565 - RNA, 343 nt, synthetic construct
  source 1..343: mol_type = other RNA
  misc_difference 1: note = May be absent
  misc_difference 2: note = a, c, g, u, unknown, other, or absent
  misc_difference 3: note = a, c, g, u, unknown, other, or absent
  misc_difference 4: note = a, c, g, u, unknown, other, or absent
  misc_difference 5: note = a, c, g, u, unknown, other, or absent
  misc_difference 6: note = a, c, g, u, unknown, other, or absent
  misc_difference 7: note = a, c, g, u, unknown, other, or absent
  misc_difference 8: note = a, c, g, u, unknown, other, or absent
  misc_difference 9: note = May be absent
  misc_difference 10: note = May be absent
  misc_difference 11: note = May be absent
  misc_difference 12: note = a, c, g, u, unknown, other, or absent
  misc_difference 13: note = a, c, g, u, unknown, other, or absent
  misc_difference 14: note = May be absent
  misc_difference 15: note = May be absent
  misc_difference 16: note = May be absent
  misc_difference 17: note = a, c, g, u, unknown, other, or absent
  misc_difference 18: note = May be absent
  misc_difference 19: note = May be absent
  misc_difference 20: note = May be absent
  misc_difference 21: note = May be absent
  misc_difference 22: note = a, c, g, u, unknown, other, or absent
  misc_difference 23: note = a, c, g, u, unknown, other, or absent
  misc_difference 24: note = a, c, g, u, unknown, other, or absent
  misc_difference 25: note = May be absent
  misc_difference 26: note = a, c, g, u, unknown, other, or absent
  misc_difference 27: note = a, c, g, u, unknown, other, or absent
  misc_difference 28: note = May be absent
  misc_difference 29: note = May be absent
  misc_difference 30: note = a, c, g, u, unknown, other, or absent
  misc_difference 31: note = a, c, g, u, unknown, other, or absent
  misc_difference 32: note = a, c, g, u, unknown, other, or absent
  misc_difference 33: note = a, c, g, u, unknown, other, or absent
  misc_difference 34: note = a, c, g, u, unknown, other, or absent
  misc_difference 35: note = a, c, g, u, unknown, other, or absent
  misc_difference 36: note = May be absent
  misc_difference 37: note = May be absent
  misc_difference 38: note = a, c, g, u, unknown, other, or absent
  misc_difference 39: note = May be absent
  misc_difference 40: note = May be absent
  misc_difference 41: note = May be absent
  misc_difference 42: note = May be absent
  misc_difference 43: note = a, c, g, u, unknown, other, or absent
  misc_difference 44: note = May be absent
  misc_difference 45: note = a, c, g, u, unknown, other, or absent
  misc_difference 46: note = a, c, g, u, unknown, other, or absent
  misc_difference 47: note = a, c, g, u, unknown, other, or absent
  misc_difference 48: note = a, c, g, u, unknown, other, or absent
  misc_difference 49: note = a, c, g, u, unknown, other, or absent
  misc_difference 50: note = a, c, g, u, unknown, other, or absent
  misc_difference 51: note = a, c, g, u, unknown, other, or absent
  misc_difference 52: note = a, c, g, u, unknown, other, or absent
  misc_difference 53: note = a, c, g, u, unknown, other, or absent
  misc_difference 54: note = a, c, g, u, unknown, other, or absent
  misc_difference 55: note = a, c, g, u, unknown, other, or absent
  misc_difference 56: note = a, c, g, u, unknown, other, or absent
  misc_difference 57: note = a, c, g, u, unknown, other, or absent
  misc_difference 58: note = a, c, g, u, unknown, other, or absent
  misc_difference 59: note = a, c, g, u, unknown, other, or absent
  misc_difference 60: note = a, c, g, u, unknown, other, or absent
  misc_difference 61: note = a, c, g, u, unknown, other, or absent
  misc_difference 62: note = a, c, g, u, unknown, other, or absent
  misc_difference 63: note = a, c, g, u, unknown, other, or absent
  misc_difference 64: note = a, c, g, u, unknown, other, or absent
  misc_difference 65: note = a, c, g, u, unknown, other, or absent
  misc_difference 66: note = a, c, g, u, unknown, other, or absent
  misc_difference 67: note = a, c, g, u, unknown, other, or absent
  misc_difference 68: note = a, c, g, u, unknown, other, or absent
  misc_difference 69: note = a, c, g, u, unknown, other, or absent
  misc_difference 70: note = a, c, g, u, unknown, other, or absent
  misc_difference 71: note = a, c, g, u, unknown, other, or absent
  misc_difference 72: note = a, c, g, u, unknown, other, or absent
  misc_difference 73: note = a, c, g, u, unknown, other, or absent
  misc_difference 74: note = a, c, g, u, unknown, other, or absent
  misc_difference 75: note = a, c, g, u, unknown, other, or absent
  misc_difference 76: note = a, c, g, u, unknown, other, or absent
  misc_difference 77: note = a, c, g, u, unknown, other, or absent
  misc_difference 78: note = a, c, g, u, unknown, other, or absent
  misc_difference 79: note = a, c, g, u, unknown, other, or absent
  misc_difference 80: note = a, c, g, u, unknown, other, or absent
  misc_difference 81: note = a, c, g, u, unknown, other, or absent
  misc_difference 82: note = a, c, g, u, unknown, other, or absent
  misc_difference 83: note = a, c, g, u, unknown, other, or absent
  misc_difference 84: note = a, c, g, u, unknown, other, or absent
  misc_difference 85: note = a, c, g, u, unknown, other, or absent
  misc_difference 86: note = a, c, g, u, unknown, other, or absent
  misc_difference 87: note = a, c, g, u, unknown, other, or absent
  misc_difference 88: note = a, c, g, u, unknown, other, or absent
  misc_difference 89: note = a, c, g, u, unknown, other, or absent
  misc_difference 90: note = a, c, g, u, unknown, other, or absent
  misc_difference 91: note = a, c, g, u, unknown, other, or absent
  misc_difference 92: note = a, c, g, u, unknown, other, or absent
  misc_difference 93: note = a, c, g, u, unknown, other, or absent
  misc_difference 94: note = a, c, g, u, unknown, other, or absent
  misc_difference 95: note = a, c, g, u, unknown, other, or absent
  misc_difference 96: note = a, c, g, u, unknown, other, or absent
  misc_difference 97: note = a, c, g, u, unknown, other, or absent
  misc_difference 98: note = a, c, g, u, unknown, other, or absent
  misc_difference 99: note = a, c, g, u, unknown, other, or absent
  misc_difference 100: note = a, c, g, u, unknown, other, or absent
  misc_difference 101: note = a, c, g, u, unknown, other, or absent
  misc_difference 102: note = a, c, g, u, unknown, other, or absent
  misc_difference 103: note = a, c, g, u, unknown, other, or absent
  misc_difference 104: note = a, c, g, u, unknown, other, or absent
  misc_difference 105: note = a, c, g, u, unknown, other, or absent
  misc_difference 106: note = a, c, g, u, unknown, other, or absent
  misc_difference 107: note = a, c, g, u, unknown, other, or absent
  misc_difference 108: note = a, c, g, u, unknown, other, or absent
  misc_difference 109: note = a, c, g, u, unknown, other, or absent
  misc_difference 110: note = a, c, g, u, unknown, other, or absent
  misc_difference 111: note = a, c, g, u, unknown, other, or absent
  misc_difference 112: note = a, c, g, u, unknown, other, or absent
  misc_difference 113: note = a, c, g, u, unknown, other, or absent
  misc_difference 114: note = a, c, g, u, unknown, other, or absent
  misc_difference 115: note = a, c, g, u, unknown, other, or absent
  misc_difference 116: note = a, c, g, u, unknown, other, or absent
  misc_difference 117: note = a, c, g, u, unknown, other, or absent
  misc_difference 118: note = a, c, g, u, unknown, other, or absent
  misc_difference 119: note = a, c, g, u, unknown, other, or absent
  misc_difference 120: note = a, c, g, u, unknown, other, or absent
  misc_difference 121: note = a, c, g, u, unknown, other, or absent
  misc_difference 122: note = a, c, g, u, unknown, other, or absent
  misc_difference 123: note = a, c, g, u, unknown, other, or absent
  misc_difference 124: note = a, c, g, u, unknown, other, or absent
  misc_difference 125: note = a, c, g, u, unknown, other, or absent
  misc_difference 126: note = a, c, g, u, unknown, other, or absent
  misc_difference 127: note = a, c, g, u, unknown, other, or absent
  misc_difference 128: note = a, c, g, u, unknown, other, or absent
  misc_difference 129: note = a, c, g, u, unknown, other, or absent
  misc_difference 130: note = a, c, g, u, unknown, other, or absent
  misc_difference 131: note = a, c, g, u, unknown, other, or absent
  misc_difference 132: note = a, c, g, u, unknown, other, or absent
  misc_difference 133: note = a, c, g, u, unknown, other, or absent
  misc_difference 134: note = a, c, g, u, unknown, other, or absent
  misc_difference 135: note = a, c, g, u, unknown, other, or absent
  misc_difference 136: note = a, c, g, u, unknown, other, or absent
  misc_difference 137: note = a, c, g, u, unknown, other, or absent
  misc_difference 138: note = a, c, g, u, unknown, other, or absent
  misc_difference 139: note = a, c, g, u, unknown, other, or absent
  misc_difference 140: note = a, c, g, u, unknown, other, or absent
  misc_difference 141: note = a, c, g, u, unknown, other, or absent
  misc_difference 142: note = a, c, g, u, unknown, other, or absent
  misc_difference 143: note = a, c, g, u, unknown, other, or absent
  misc_difference 144: note = a, c, g, u, unknown, other, or absent
  misc_difference 145: note = a, c, g, u, unknown, other, or absent
  misc_difference 146: note = a, c, g, u, unknown, other, or absent
  misc_difference 147: note = a, c, g, u, unknown, other, or absent
  misc_difference 148: note = a, c, g, u, unknown, other, or absent
  misc_difference 149: note = a, c, g, u, unknown, other, or absent
  misc_difference 150: note = a, c, g, u, unknown, other, or absent
  misc_difference 151: note = a, c, g, u, unknown, other, or absent
  misc_difference 152: note = a, c, g, u, unknown, other, or absent
  misc_difference 153: note = a, c, g, u, unknown, other, or absent
  misc_difference 154: note = a, c, g, u, unknown, other, or absent
  misc_difference 155: note = a, c, g, u, unknown, other, or absent
  misc_difference 156: note = a, c, g, u, unknown, other, or absent
  misc_difference 157: note = a, c, g, u, unknown, other, or absent
  misc_difference 158: note = a, c, g, u, unknown, other, or absent
  misc_difference 159: note = a, c, g, u, unknown, other, or absent
  misc_difference 160: note = a, c, g, u, unknown, other, or absent
  misc_difference 161: note = a, c, g, u, unknown, other, or absent
  misc_difference 162: note = a, c, g, u, unknown, other, or absent
  misc_difference 163: note = a, c, g, u, unknown, other, or absent
  misc_difference 164: note = a, c, g, u, unknown, other, or absent
  misc_difference 165: note = a, c, g, u, unknown, other, or absent
  misc_difference 166: note = a, c, g, u, unknown, other, or absent
  misc_difference 167: note = a, c, g, u, unknown, other, or absent
  misc_difference 168: note = a, c, g, u, unknown, other, or absent
  misc_difference 169: note = a, c, g, u, unknown, other, or absent
  misc_difference 170: note = a, c, g, u, unknown, other, or absent
  misc_difference 171: note = a, c, g, u, unknown, other, or absent
  misc_difference 172: note = a, c, g, u, unknown, other, or absent
  misc_difference 173: note = a, c, g, u, unknown, other, or absent
  misc_difference 174: note = a, c, g, u, unknown, other, or absent
  misc_difference 175: note = a, c, g, u, unknown, other, or absent
  misc_difference 176: note = a, c, g, u, unknown, other, or absent
  misc_difference 177: note = a, c, g, u, unknown, other, or absent
  misc_difference 178: note = a, c, g, u, unknown, other, or absent
  misc_difference 179: note = a, c, g, u, unknown, other, or absent
  misc_difference 180: note = a, c, g, u, unknown, other, or absent
  misc_difference 181: note = a, c, g, u, unknown, other, or absent
  misc_difference 182: note = a, c, g, u, unknown, other, or absent
  misc_difference 183: note = a, c, g, u, unknown, other, or absent
  misc_difference 184: note = a, c, g, u, unknown, other, or absent
  misc_difference 185: note = a, c, g, u, unknown, other, or absent
  misc_difference 186: note = a, c, g, u, unknown, other, or absent
  misc_difference 187: note = a, c, g, u, unknown, other, or absent
  misc_difference 188: note = a, c, g, u, unknown, other, or absent
  misc_difference 189: note = a, c, g, u, unknown, other, or absent
  misc_difference 190: note = a, c, g, u, unknown, other, or absent
  misc_difference 191: note = a, c, g, u, unknown, other, or absent
  misc_difference 192: note = a, c, g, u, unknown, other, or absent
  misc_difference 193: note = a, c, g, u, unknown, other, or absent
  misc_difference 194: note = a, c, g, u, unknown, other, or absent
  misc_difference 195: note = a, c, g, u, unknown, other, or absent
  misc_difference 196: note = a, c, g, u, unknown, other, or absent
  misc_difference 197: note = a, c, g, u, unknown, other, or absent
  misc_difference 198: note = a, c, g, u, unknown, other, or absent
  misc_difference 199: note = a, c, g, u, unknown, other, or absent
  misc_difference 200: note = a, c, g, u, unknown, other, or absent
  misc_difference 201: note = a, c, g, u, unknown, other, or absent
  misc_difference 202: note = a, c, g, u, unknown, other, or absent
  misc_difference 203: note = a, c, g, u, unknown, other, or absent
  misc_difference 204: note = a, c, g, u, unknown, other, or absent
  misc_difference 205: note = a, c, g, u, unknown, other, or absent
  misc_difference 206: note = a, c, g, u, unknown, other, or absent
  misc_difference 207: note = a, c, g, u, unknown, other, or absent
  misc_difference 208: note = a, c, g, u, unknown, other, or absent
  misc_difference 209: note = a, c, g, u, unknown, other, or absent
  misc_difference 210: note = a, c, g, u, unknown, other, or absent
  misc_difference 211: note = a, c, g, u, unknown, other, or absent
  misc_difference 212: note = a, c, g, u, unknown, other, or absent
  misc_difference 213: note = a, c, g, u, unknown, other, or absent
  misc_difference 214: note = a, c, g, u, unknown, other, or absent
  misc_difference 215: note = a, c, g, u, unknown, other, or absent
  misc_difference 216: note = a, c, g, u, unknown, other, or absent
  misc_difference 217: note = a, c, g, u, unknown, other, or absent
  misc_difference 218: note = a, c, g, u, unknown, other, or absent
  misc_difference 219: note = a, c, g, u, unknown, other, or absent
  misc_difference 220: note = a, c, g, u, unknown, other, or absent
  misc_difference 221: note = a, c, g, u, unknown, other, or absent
  misc_difference 222: note = a, c, g, u, unknown, other, or absent
  misc_difference 223: note = a, c, g, u, unknown, other, or absent
  misc_difference 224: note = a, c, g, u, unknown, other, or absent
  misc_difference 225: note = a, c, g, u, unknown, other, or absent
  misc_difference 226: note = a, c, g, u, unknown, other, or absent
  misc_difference 227: note = a, c, g, u, unknown, other, or absent
  misc_difference 228: note = a, c, g, u, unknown, other, or absent
  misc_difference 229: note = a, c, g, u, unknown, other, or absent
  misc_difference 230: note = a, c, g, u, unknown, other, or absent
  misc_difference 231: note = a, c, g, u, unknown, other, or absent
  misc_difference 232: note = a, c, g, u, unknown, other, or absent
  misc_difference 233: note = a, c, g, u, unknown, other, or absent
  misc_difference 234: note = a, c, g, u, unknown, other, or absent
  misc_difference 235: note = a, c, g, u, unknown, other, or absent
  misc_difference 236: note = a, c, g, u, unknown, other, or absent
  misc_difference 237: note = a, c, g, u, unknown, other, or absent
  misc_difference 238: note = a, c, g, u, unknown, other, or absent
  misc_difference 239: note = a, c, g, u, unknown, other, or absent
  misc_difference 240: note = a, c, g, u, unknown, other, or absent
  misc_difference 241: note = a, c, g, u, unknown, other, or absent
  misc_difference 242: note = a, c, g, u, unknown, other, or absent
  misc_difference 243: note = a, c, g, u, unknown, other, or absent
  misc_difference 244: note = a, c, g, u, unknown, other, or absent
  misc_difference 245: note = a, c, g, u, unknown, other, or absent
  misc_difference 246: note = a, c, g, u, unknown, other, or absent
  misc_difference 247: note = a, c, g, u, unknown, other, or absent
  misc_difference 248: note = a, c, g, u, unknown, other, or absent
  misc_difference 249: note = a, c, g, u, unknown, other, or absent
  misc_difference 250: note = a, c, g, u, unknown, other, or absent
  misc_difference 251: note = a, c, g, u, unknown, other, or absent
  misc_difference 252: note = a, c, g, u, unknown, other, or absent
  misc_difference 253: note = a, c, g, u, unknown, other, or absent
  misc_difference 254: note = a, c, g, u, unknown, other, or absent
  misc_difference 255: note = a, c, g, u, unknown, other, or absent
  misc_difference 256: note = a, c, g, u, unknown, other, or absent
  misc_difference 257: note = a, c, g, u, unknown, other, or absent
  misc_difference 258: note = a, c, g, u, unknown, other, or absent
  misc_difference 259: note = a, c, g, u, unknown, other, or absent
  misc_difference 260: note = a, c, g, u, unknown, other, or absent
  misc_difference 261: note = a, c, g, u, unknown, other, or absent
  misc_difference 262: note = a, c, g, u, unknown, other, or absent
  misc_difference 263: note = a, c, g, u, unknown, other, or absent
  misc_difference 264: note = a, c, g, u, unknown, other, or absent
  misc_difference 265: note = a, c, g, u, unknown, other, or absent
  misc_difference 266: note = a, c, g, u, unknown, other, or absent
  misc_difference 267: note = a, c, g, u, unknown, other, or absent
  misc_difference 268: note = a, c, g, u, unknown, other, or absent
  misc_difference 269: note = a, c, g, u, unknown, other, or absent
  misc_difference 270: note = a, c, g, u, unknown, other, or absent
  misc_difference 271: note = a, c, g, u, unknown, other, or absent
  misc_difference 272: note = a, c, g, u, unknown, other, or absent
  misc_difference 273: note = a, c, g, u, unknown, other, or absent
  misc_difference 274: note = a, c, g, u, unknown, other, or absent
  misc_difference 275: note = a, c, g, u, unknown, other, or absent
  misc_difference 276: note = a, c, g, u, unknown, other, or absent
  misc_difference 277: note = a, c, g, u, unknown, other, or absent
  misc_difference 278: note = a, c, g, u, unknown, other, or absent
  misc_difference 279: note = a, c, g, u, unknown, other, or absent
  misc_difference 280: note = a, c, g, u, unknown, other, or absent
  misc_difference 281: note = a, c, g, u, unknown, other, or absent
  misc_difference 282: note = a, c, g, u, unknown, other, or absent
  misc_difference 283: note = a, c, g, u, unknown, other, or absent
  misc_difference 284: note = a, c, g, u, unknown, other, or absent
  misc_difference 285: note = a, c, g, u, unknown, other, or absent
  misc_difference 286: note = a, c, g, u, unknown, other, or absent
  misc_difference 287: note = a, c, g, u, unknown, other, or absent
  misc_difference 288: note = a, c, g, u, unknown, other, or absent
  misc_difference 289: note = a, c, g, u, unknown, other, or absent
  misc_difference 290: note = a, c, g, u, unknown, other, or absent
  misc_difference 291: note = a, c, g, u, unknown, other, or absent
  misc_difference 292: note = a, c, g, u, unknown, other, or absent
  misc_difference 293: note = a, c, g, u, unknown, other, or absent
  misc_difference 294: note = a, c, g, u, unknown, other, or absent
  misc_difference 295: note = a, c, g, u, unknown, other, or absent
  misc_difference 296: note = a, c, g, u, unknown, other, or absent
  misc_difference 297: note = a, c, g, u, unknown, other, or absent
  misc_difference 298: note = a, c, g, u, unknown, other, or absent
  misc_difference 299: note = a, c, g, u, unknown, other, or absent
  misc_difference 300: note = a, c, g, u, unknown, other, or absent
  misc_difference 301: note = a, c, g, u, unknown, other, or absent
  misc_difference 302: note = a, c, g, u, unknown, other, or absent
  misc_difference 303: note = a, c, g, u, unknown, other, or absent
  misc_difference 304: note = a, c, g, u, unknown, other, or absent
  misc_difference 305: note = a, c, g, u, unknown, other, or absent
  misc_difference 306: note = a, c, g, u, unknown, other, or absent
  misc_difference 307: note = a, c, g, u, unknown, other, or absent
  misc_difference 308: note = a, c, g, u, unknown, other, or absent
  misc_difference 309: note = a, c, g, u, unknown, other, or absent
  misc_difference 310: note = a, c, g, u, unknown, other, or absent
  misc_difference 311: note = a, c, g, u, unknown, other, or absent
  misc_difference 312: note = a, c, g, u, unknown, other, or absent
  misc_difference 313: note = a, c, g, u, unknown, other, or absent
  misc_difference 314: note = a, c, g, u, unknown, other, or absent
  misc_difference 315: note = a, c, g, u, unknown, other, or absent
  misc_difference 316: note = a, c, g, u, unknown, other, or absent
  misc_difference 317: note = a, c, g, u, unknown, other, or absent
  misc_difference 318: note = a, c, g, u, unknown, other, or absent
  misc_difference 319: note = a, c, g, u, unknown, other, or absent
  misc_difference 320: note = a, c, g, u, unknown, other, or absent
  misc_difference 321: note = a, c, g, u, unknown, other, or absent
  misc_difference 322: note = a, c, g, u, unknown, other, or absent
  misc_difference 323: note = May be absent
  misc_difference 324: note = May be absent
  misc_difference 325: note = May be absent
  misc_difference 326: note = May be absent
  misc_difference 327: note = May be absent
  misc_difference 328: note = May be absent
  misc_difference 329: note = a, c, g, u, unknown, other, or absent
  misc_difference 330: note = May be absent
  misc_difference 331: note = May be absent
  misc_difference 332: note = May be absent
  misc_difference 333: note = a, c, g, u, unknown, other, or absent
  misc_difference 334: note = a, c, g, u, unknown, other, or absent
  misc_difference 335: note = a, c, g, u, unknown, other, or absent
  misc_difference 336: note = a, c, g, u, unknown, other, or absent
  misc_difference 337: note = a, c, g, u, unknown, other, or absent
  misc_difference 338: note = a, c, g, u, unknown, other, or absent
  misc_difference 339: note = a, c, g, u, unknown, other, or absent
  misc_difference 340: note = a, c, g, u, unknown, other, or absent
  misc_difference 341: note = a, c, g, u, unknown, other, or absent
  misc_difference 342: note = a, c, g, u, unknown, other, or absent
  misc_difference 343: note = May be absent
  misc_difference 45..316: note = This region may encompass 1-271 nucleotides
gnnnnnnnkvgnnhddnhwrrnnnrnnvynnnnnnbtnckrhnbnnnnnnnnnnnnnnnnnnnnnnnnnnnnnnnnnnnnnnnnnnnnnnnnnnnnnnnnnnnnnnnnnnnnnnnnnnnnnnnnnnnnnnnnnnnnnnnnnnnnnnnnnnnnnnnnnnnnnnnnnnnnnnnnnnnnnnnnnnnnnnnnnnnnnnnnnnnnnnnnnnnnnnnnnnnnnnnnnnnnnnnnnnnnnnnnnnnnnnnnnnnnnnnnnnnnnnnnnnnnnnnnnnnnnnnnnnnnnnnnnnnnnnnnnnnnnnnnnnnnnnnnnnnnnnnnnnnnnngttyranyybnnnnnnnnnnd

SEQ ID NO: 566 - RNA, 342 nt, synthetic construct
  source 1..342: mol_type = other RNA
  misc_difference 1: note = May be absent
  misc_difference 2: note = May be absent
  misc_difference 3: note = a, c, g, u, unknown, other, or absent
  misc_difference 4: note = May be absent
  misc_difference 5: note = May be absent
  misc_difference 6: note = a, c, g, u, unknown, other, or absent
  misc_difference 7: note = a, c, g, u, unknown, other, or absent
  misc_difference 8: note = May be absent
  misc_difference 9: note = May be absent
  misc_difference 10: note = May be absent
  misc_difference 11: note = May be absent
  misc_difference 12: note = May be absent
  misc_difference 13: note = a, c, g, u, unknown, other, or absent
  misc_difference 14: note = May be absent
  misc_difference 15: note = May be absent
  misc_difference 16: note = May be absent
  misc_difference 17: note = May be absent
  misc_difference 18: note = May be absent
  misc_difference 19: note = May be absent
  misc_difference 20: note = May be absent
  misc_difference 21: note = May be absent
  misc_difference 22: note = May be absent
  misc_difference 23: note = May be absent
  misc_difference 24: note = May be absent
  misc_difference 25: note = May be absent
  misc_difference 26: note = a, c, g, u, unknown, other, or absent
  misc_difference 27: note = May be absent
  misc_difference 28: note = May be absent
  misc_difference 29: note = May be absent
  misc_difference 30: note = May be absent
  misc_difference 31: note = May be absent
  misc_difference 32: note = a, c, g, u, unknown, other, or absent
  misc_difference 33: note = May be absent
  misc_difference 34: note = May be absent
  misc_difference 35: note = May be absent
  misc_difference 36: note = May be absent
  misc_difference 37: note = a, c, g, u, unknown, other, or absent
  misc_difference 38: note = May be absent
  misc_difference 39: note = May be absent
  misc_difference 40: note = May be absent
  misc_difference 41: note = May be absent
  misc_difference 42: note = May be absent
  misc_difference 43: note = May be absent
  misc_difference 44: note = a, c, g, u, unknown, other, or absent
  misc_difference 45: note = May be absent
  misc_difference 46: note = May be absent
  misc_difference 47: note = a, c, g, u, unknown, other, or absent
  misc_difference 48: note = a, c, g, u, unknown, other, or absent
  misc_difference 49: note = a, c, g, u, unknown, other, or absent
  misc_difference 50: note = a, c, g, u, unknown, other, or absent
  misc_difference 51: note = a, c, g, u, unknown, other, or absent
  misc_difference 52: note = a, c, g, u, unknown, other, or absent
  misc_difference 53: note = a, c, g, u, unknown, other, or absent
  misc_difference 54: note = a, c, g, u, unknown, other, or absent
  misc_difference 55: note = a, c, g, u, unknown, other, or absent
  misc_difference 56: note = a, c, g, u, unknown, other, or absent
  misc_difference 57: note = a, c, g, u, unknown, other, or absent
  misc_difference 58: note = a, c, g, u, unknown, other, or absent
  misc_difference 59: note = a, c, g, u, unknown, other, or absent
  misc_difference 60: note = a, c, g, u, unknown, other, or absent
  misc_difference 61: note = a, c, g, u, unknown, other, or absent
  misc_difference 62: note = a, c, g, u, unknown, other, or absent
  misc_difference 63: note = a, c, g, u, unknown, other, or absent
  misc_difference 64: note = a, c, g, u, unknown, other, or absent
  misc_difference 65: note = a, c, g, u, unknown, other, or absent
  misc_difference 66: note = a, c, g, u, unknown, other, or absent
  misc_difference 67: note = a, c, g, u, unknown, other, or absent
  misc_difference 68: note = a, c, g, u, unknown, other, or absent
  misc_difference 69: note = a, c, g, u, unknown, other, or absent
  misc_difference 70: note = a, c, g, u, unknown, other, or absent
  misc_difference 71: note = a, c, g, u, unknown, other, or absent
  misc_difference 72: note = a, c, g, u, unknown, other, or absent
  misc_difference 73: note = a, c, g, u, unknown, other, or absent
  misc_difference 74: note = a, c, g, u, unknown, other, or absent
  misc_difference 75: note = a, c, g, u, unknown, other, or absent
  misc_difference 76: note = a, c, g, u, unknown, other, or absent
  misc_difference 77: note = a, c, g, u, unknown, other, or absent
  misc_difference 78: note = a, c, g, u, unknown, other, or absent
  misc_difference 79: note = a, c, g, u, unknown, other, or absent
  misc_difference 80: note = a, c, g, u, unknown, other, or absent
  misc_difference 81: note = a, c, g, u, unknown, other, or absent
  misc_difference 82: note = a, c, g, u, unknown, other, or absent
  misc_difference 83: note = a, c, g, u, unknown, other, or absent
  misc_difference 84: note = a, c, g, u, unknown, other, or absent
  misc_difference 85: note = a, c, g, u, unknown, other, or absent
  misc_difference 86: note = a, c, g, u, unknown, other, or absent
  misc_difference 87: note = a, c, g, u, unknown, other, or absent
  misc_difference 88: note = a, c, g, u, unknown, other, or absent
  misc_difference 89: note = a, c, g, u, unknown, other, or absent
  misc_difference 90: note = a, c, g, u, unknown, other, or absent
  misc_difference 91: note = a, c, g, u, unknown, other, or absent
  misc_difference 92: note = a, c, g, u, unknown, other, or absent
  misc_difference 93: note = a, c, g, u, unknown, other, or absent
  misc_difference 94: note = a, c, g, u, unknown, other, or absent
  misc_difference 95: note = a, c, g, u, unknown, other, or absent
  misc_difference 96: note = a, c, g, u, unknown, other, or absent
  misc_difference 97: note = a, c, g, u, unknown, other, or absent
  misc_difference 98: note = a, c, g, u, unknown, other, or absent
  misc_difference 99: note = a, c, g, u, unknown, other, or absent
  misc_difference 100: note = a, c, g, u, unknown, other, or absent
  misc_difference 101: note = a, c, g, u, unknown, other, or absent
  misc_difference 102: note = a, c, g, u, unknown, other, or absent
  misc_difference 103: note = a, c, g, u, unknown, other, or absent
  misc_difference 104: note = a, c, g, u, unknown, other, or absent
  misc_difference 105: note = a, c, g, u, unknown, other, or absent
  misc_difference 106: note = a, c, g, u, unknown, other, or absent
  misc_difference 107: note = a, c, g, u, unknown, other, or absent
  misc_difference 108: note = a, c, g, u, unknown, other, or absent
  misc_difference 109: note = a, c, g, u, unknown, other, or absent
  misc_difference 110: note = a, c, g, u, unknown, other, or absent
  misc_difference 111: note = a, c, g, u, unknown, other, or absent
  misc_difference 112: note = a, c, g, u, unknown, other, or absent
  misc_difference 113: note = a, c, g, u, unknown, other, or absent
  misc_difference 114: note = a, c, g, u, unknown, other, or absent
  misc_difference 115: note = a, c, g, u, unknown, other, or absent
  misc_difference 116: note = a, c, g, u, unknown, other, or absent
  misc_difference 117: note = a, c, g, u, unknown, other, or absent
  misc_difference 118: note = a, c, g, u, unknown, other, or absent
  misc_difference 119: note = a, c, g, u, unknown, other, or absent
  misc_difference 120: note = a, c, g, u, unknown, other, or absent
  misc_difference 121: note = a, c, g, u, unknown, other, or absent
  misc_difference 122: note = a, c, g, u, unknown, other, or absent
  misc_difference 123: note = a, c, g, u, unknown, other, or absent
  misc_difference 124: note = a, c, g, u, unknown, other, or absent
  misc_difference 125: note = a, c, g, u, unknown, other, or absent
  misc_difference 126: note = a, c, g, u, unknown, other, or absent
  misc_difference 127: note = a, c, g, u, unknown, other, or absent
  misc_difference 128: note = a, c, g, u, unknown, other, or absent
  misc_difference 129: note = a, c, g, u, unknown, other, or absent
  misc_difference 130: note = a, c, g, u, unknown, other, or absent
  misc_difference 131: note = a, c, g, u, unknown, other, or absent
  misc_difference 132: note = a, c, g, u, unknown, other, or absent
  misc_difference 133: note = a, c, g, u, unknown, other, or absent
  misc_difference 134: note = a, c, g, u, unknown, other, or absent
  misc_difference 135: note = a, c, g, u, unknown, other, or absent
  misc_difference 136: note = a, c, g, u, unknown, other, or absent
  misc_difference 137: note = a, c, g, u, unknown, other, or absent
  misc_difference 138: note = a, c, g, u, unknown, other, or absent
  misc_difference 139: note = a, c, g, u, unknown, other, or absent
  misc_difference 140: note = a, c, g, u, unknown, other, or absent
  misc_difference 141: note = a, c, g, u, unknown, other, or absent
  misc_difference 142: note = a, c, g, u, unknown, other, or absent
  misc_difference 143: note = a, c, g, u, unknown, other, or absent
  misc_difference 144: note = a, c, g, u, unknown, other, or absent
  misc_difference 145: note = a, c, g, u, unknown, other, or absent
  misc_difference 146: note = a, c, g, u, unknown, other, or absent
  misc_difference 147: note = a, c, g, u, unknown, other, or absent
  misc_difference 148: note = a, c, g, u, unknown, other, or absent
  misc_difference 149: note = a, c, g, u, unknown, other, or absent
  misc_difference 150: note = a, c, g, u, unknown, other, or absent
  misc_difference 151: note = a, c, g, u, unknown, other, or absent
  misc_difference 152: note = a, c, g, u, unknown, other, or absent
  misc_difference 153: note = a, c, g, u, unknown, other, or absent
  misc_difference 154: note = a, c, g, u, unknown, other, or absent
  misc_difference 155: note = a, c, g, u, unknown, other, or absent
  misc_difference 156: note = a, c, g, u, unknown, other, or absent
  misc_difference 157: note = a, c, g, u, unknown, other, or absent
  misc_difference 158: note = a, c, g, u, unknown, other, or absent
  misc_difference 159: note = a, c, g, u, unknown, other, or absent
  misc_difference 160: note = a, c, g, u, unknown, other, or absent
  misc_difference 161: note = a, c, g, u, unknown, other, or absent
  misc_difference 162: note = a, c, g, u, unknown, other, or absent
  misc_difference 163: note = a, c, g, u, unknown, other, or absent
  misc_difference 164: note = a, c, g, u, unknown, other, or absent
  misc_difference 165: note = a, c, g, u, unknown, other, or absent
  misc_difference 166: note = a, c, g, u, unknown, other, or absent
  misc_difference 167: note = a, c, g, u, unknown, other, or absent
  misc_difference 168: note = a, c, g, u, unknown, other, or absent
  misc_difference 169: note = a, c, g, u, unknown, other, or absent
  misc_difference 170: note = a, c, g, u, unknown, other, or absent
  misc_difference 171: note = a, c, g, u, unknown, other, or absent
  misc_difference 172: note = a, c, g, u, unknown, other, or absent
  misc_difference 173: note = a, c, g, u, unknown, other, or absent
  misc_difference 174: note = a, c, g, u, unknown, other, or absent
  misc_difference 175: note = a, c, g, u, unknown, other, or absent
  misc_difference 176: note = a, c, g, u, unknown, other, or absent
  misc_difference 177: note = a, c, g, u, unknown, other, or absent
  misc_difference 178: note = a, c, g, u, unknown, other, or absent
  misc_difference 179: note = a, c, g, u, unknown, other, or absent
  misc_difference 180: note = a, c, g, u, unknown, other, or absent
  misc_difference 181: note = a, c, g, u, unknown, other, or absent
  misc_difference 182: note = a, c, g, u, unknown, other, or absent
  misc_difference 183: note = a, c, g, u, unknown, other, or absent
  misc_difference 184: note = a, c, g, u, unknown, other, or absent
  misc_difference 185: note = a, c, g, u, unknown, other, or absent
  misc_difference 186: note = a, c, g, u, unknown, other, or absent
  misc_difference 187: note = a, c, g, u, unknown, other, or absent
  misc_difference 188: note = a, c, g, u, unknown, other, or absent
  misc_difference 189: note = a, c, g, u, unknown, other, or absent
  misc_difference 190: note = a, c, g, u, unknown, other, or absent
  misc_difference 191: note = a, c, g, u, unknown, other, or absent
  misc_difference 192: note = a, c, g, u, unknown, other, or absent
  misc_difference 193: note = a, c, g, u, unknown, other, or absent
  misc_difference 194: note = a, c, g, u, unknown, other, or absent
  misc_difference 195: note = a, c, g, u, unknown, other, or absent
  misc_difference 196: note = a, c, g, u, unknown, other, or absent
  misc_difference 197: note = a, c, g, u, unknown, other, or absent
  misc_difference 198: note = a, c, g, u, unknown, other, or absent
  misc_difference 199: note = a, c, g, u, unknown, other, or absent
  misc_difference 200: note = a, c, g, u, unknown, other, or absent
  misc_difference 201: note = a, c, g, u, unknown, other, or absent
  misc_difference 202: note = a, c, g, u, unknown, other, or absent
  misc_difference 203: note = a, c, g, u, unknown, other, or absent
  misc_difference 204: note = a, c, g, u, unknown, other, or absent
  misc_difference 205: note = a, c, g, u, unknown, other, or absent
  misc_difference 206: note = a, c, g, u, unknown, other, or absent
  misc_difference 207: note = a, c, g, u, unknown, other, or absent
  misc_difference 208: note = a, c, g, u, unknown, other, or absent
  misc_difference 209: note = a, c, g, u, unknown, other, or absent
  misc_difference 210: note = a, c, g, u, unknown, other, or absent
  misc_difference 211: note = a, c, g, u, unknown, other, or absent
  misc_difference 212: note = a, c, g, u, unknown, other, or absent
  misc_difference 213: note = a, c, g, u, unknown, other, or absent
  misc_difference 214: note = a, c, g, u, unknown, other, or absent
  misc_difference 215: note = a, c, g, u, unknown, other, or absent
  misc_difference 216: note = a, c, g, u, unknown, other, or absent
  misc_difference 217: note = a, c, g, u, unknown, other, or absent
  misc_difference 218: note = a, c, g, u, unknown, other, or absent
  misc_difference 219: note = a, c, g, u, unknown, other, or absent
  misc_difference 220: note = a, c, g, u, unknown, other, or absent
  misc_difference 221: note = a, c, g, u, unknown, other, or absent
  misc_difference 222: note = a, c, g, u, unknown, other, or absent
  misc_difference 223: note = a, c, g, u, unknown, other, or absent
  misc_difference 224: note = a, c, g, u, unknown, other, or absent
  misc_difference 225: note = a, c, g, u, unknown, other, or absent
  misc_difference 226: note = a, c, g, u, unknown, other, or absent
  misc_difference 227: note = a, c, g, u, unknown, other, or absent
  misc_difference 228: note = a, c, g, u, unknown, other, or absent
  misc_difference 229: note = a, c, g, u, unknown, other, or absent
  misc_difference 230: note = a, c, g, u, unknown, other, or absent
  misc_difference 231: note = a, c, g, u, unknown, other, or absent
  misc_difference 232: note = a, c, g, u, unknown, other, or absent
  misc_difference 233: note = a, c, g, u, unknown, other, or absent
  misc_difference 234: note = a, c, g, u, unknown, other, or absent
  misc_difference 235: note = a, c, g, u, unknown, other, or absent
  misc_difference 236: note = a, c, g, u, unknown, other, or absent
  misc_difference 237: note = a, c, g, u, unknown, other, or absent
  misc_difference 238: note = a, c, g, u, unknown, other, or absent
  misc_difference 239: note = a, c, g, u, unknown, other, or absent
  misc_difference 240: note = a, c, g, u, unknown, other, or absent
  misc_difference 241: note = a, c, g, u, unknown, other, or absent
  misc_difference 242: note = a, c, g, u, unknown, other, or absent
  misc_difference 243: note = a, c, g, u, unknown, other, or absent
  misc_difference 244: note = a, c, g, u, unknown, other, or absent
  misc_difference 245: note = a, c, g, u, unknown, other, or absent
  misc_difference 246: note = a, c, g, u, unknown, other, or absent
  misc_difference 247: note = a, c, g, u, unknown, other, or absent
  misc_difference 248: note = a, c, g, u, unknown, other, or absent
  misc_difference 249: note = a, c, g, u, unknown, other, or absent
  misc_difference 250: note = a, c, g, u, unknown, other, or absent
  misc_difference 251: note = a, c, g, u, unknown, other, or absent
  misc_difference 252: note = a, c, g, u, unknown, other, or absent
  misc_difference 253: note = a, c, g, u, unknown, other, or absent
  misc_difference 254: note = a, c, g, u, unknown, other, or absent
  misc_difference 255: note = a, c, g, u, unknown, other, or absent
  misc_difference 256: note = a, c, g, u, unknown, other, or absent
  misc_difference 257: note = a, c, g, u, unknown, other, or absent
  misc_difference 258: note = a, c, g, u, unknown, other, or absent
  misc_difference 259: note = a, c, g, u, unknown, other, or absent
  misc_difference 260: note = a, c, g, u, unknown, other, or absent
  misc_difference 261: note = a, c, g, u, unknown, other, or absent
  misc_difference 262: note = a, c, g, u, unknown, other, or absent
  misc_difference 263: note = a, c, g, u, unknown, other, or absent
  misc_difference 264: note = a, c, g, u, unknown, other, or absent
  misc_difference 265: note = a, c, g, u, unknown, other, or absent
  misc_difference 266: note = a, c, g, u, unknown, other, or absent
  misc_difference 267: note = a, c, g, u, unknown, other, or absent
  misc_difference 268: note = a, c, g, u, unknown, other, or absent
  misc_difference 269: note = a, c, g, u, unknown, other, or absent
  misc_difference 270: note = a, c, g, u, unknown, other, or absent
  misc_difference 271: note = a, c, g, u, unknown, other, or absent
  misc_difference 272: note = a, c, g, u, unknown, other, or absent
  misc_difference 273: note = a, c, g, u, unknown, other, or absent
  misc_difference 274: note = a, c, g, u, unknown, other, or absent
  misc_difference 275: note = a, c, g, u, unknown, other, or absent
  misc_difference 276: note = a, c, g, u, unknown, other, or absent
  misc_difference 277: note = a, c, g, u, unknown, other, or absent
  misc_difference 278: note = a, c, g, u, unknown, other, or absent
  misc_difference 279: note = a, c, g, u, unknown, other, or absent
  misc_difference 280: note = a, c, g, u, unknown, other, or absent
  misc_difference 281: note = a, c, g, u, unknown, other, or absent
  misc_difference 282: note = a, c, g, u, unknown, other, or absent
  misc_difference 283: note = a, c, g, u, unknown, other, or absent
  misc_difference 284: note = a, c, g, u, unknown, other, or absent
  misc_difference 285: note = a, c, g, u, unknown, other, or absent
  misc_difference 286: note = a, c, g, u, unknown, other, or absent
  misc_difference 287: note = a, c, g, u, unknown, other, or absent
  misc_difference 288: note = a, c, g, u, unknown, other, or absent
  misc_difference 289: note = a, c, g, u, unknown, other, or absent
  misc_difference 290: note = a, c, g, u, unknown, other, or absent
  misc_difference 291: note = a, c, g, u, unknown, other, or absent
  misc_difference 292: note = a, c, g, u, unknown, other, or absent
  misc_difference 293: note = a, c, g, u, unknown, other, or absent
  misc_difference 294: note = a, c, g, u, unknown, other, or absent
  misc_difference 295: note = a, c, g, u, unknown, other, or absent
  misc_difference 296: note = a, c, g, u, unknown, other, or absent
  misc_difference 297: note = a, c, g, u, unknown, other, or absent
  misc_difference 298: note = a, c, g, u, unknown, other, or absent
  misc_difference 299: note = a, c, g, u, unknown, other, or absent
  misc_difference 300: note = a, c, g, u, unknown, other, or absent
  misc_difference 301: note = a, c, g, u, unknown, other, or absent
  misc_difference 302: note = a, c, g, u, unknown, other, or absent
  misc_difference 303: note = a, c, g, u, unknown, other, or absent
  misc_difference 304: note = a, c, g, u, unknown, other, or absent
  misc_difference 305: note = a, c, g, u, unknown, other, or absent
  misc_difference 306: note = a, c, g, u, unknown, other, or absent
  misc_difference 307: note = a, c, g, u, unknown, other, or absent
  misc_difference 308: note = a, c, g, u, unknown, other, or absent
  misc_difference 309: note = a, c, g, u, unknown, other, or absent
  misc_difference 310: note = a, c, g, u, unknown, other, or absent
  misc_difference 311: note = a, c, g, u, unknown, other, or absent
  misc_difference 312: note = a, c, g, u, unknown, other, or absent
  misc_difference 313: note = a, c, g, u, unknown, other, or absent
  misc_difference 314: note = a, c, g, u, unknown, other, or absent
  misc_difference 315: note = a, c, g, u, unknown, other, or absent
  misc_difference 316: note = a, c, g, u, unknown, other, or absent
  misc_difference 317: note = a, c, g, u, unknown, other, or absent
  misc_difference 318: note = May be absent
  misc_difference 319: note = May be absent
  misc_difference 320: note = May be absent
  misc_difference 321: note = May be absent
  misc_difference 322: note = May be absent
  misc_difference 323: note = May be absent
  misc_difference 324: note = May be absent
  misc_difference 325: note = May be absent
  misc_difference 326: note = May be absent
  misc_difference 327: note = May be absent
  misc_difference 328: note = a, c, g, u, unknown, other, or absent
  misc_difference 329: note = May be absent
  misc_difference 330: note = May be absent
  misc_difference 331: note = May be absent
  misc_difference 332: note = May be absent
  misc_difference 333: note = May be absent
  misc_difference 334: note = May be absent
  misc_difference 335: note = May be absent
  misc_difference 336: note = a, c, g, u, unknown, other, or absent
  misc_difference 337: note = a, c, g, u, unknown, other, or absent
  misc_difference 338: note = a, c, g, u, unknown, other, or absent
  misc_difference 339: note = May be absent
  misc_difference 340: note = a, c, g, u, unknown, other, or absent
  misc_difference 341: note = May be absent
  misc_difference 342: note = May be absent
  misc_difference 47..318: note = This region may encompass 1-271 nucleotides
grnvbnnvkbgbnydrwtrgwygarnrydyynsvytnckrmkbnrrnnnnnnnnnnnnnnnnnnnnnnnnnnnnnnnnnnnnnnnnnnnnnnnnnnnnnnnnnnnnnnnnnnnnnnnnnnnnnnnnnnnnnnnnnnnnnnnnnnnnnnnnnnnnnnnnnnnnnnnnnnnnnnnnnnnnnnnnnnnnnnnnnnnnnnnnnnnnnnnnnnnnnnnnnnnnnnnnnnnnnnnnnnnnnnnnnnnnnnnnnnnnnnnnnnnnnnnnnnnnnnnnnnnnnnnnnnnnnnnnnnnnnnnnnnnnnnnnnnnnnnnnnnnnnnnshvggttyrantycbdbynnnbnhr

SEQ ID NO: 567 - RNA, 342 nt, synthetic construct
  source 1..342: mol_type = other RNA
  misc_difference 1: note = May be absent
  misc_difference 2: note = May be absent
  misc_difference 3: note = a, c, g, u, unknown, other, or absent
  misc_difference 4: note = May be absent
  misc_difference 5: note = May be absent
  misc_difference 6: note = May be absent
  misc_difference 7: note = a, c, g, u, unknown, other, or absent
  misc_difference 8: note = May be absent
  misc_difference 9: note = May be absent
  misc_difference 10: note = May be absent
  misc_difference 11: note = May be absent
  misc_difference 12: note = May be absent
  misc_difference 13: note = May be absent
  misc_difference 14: note = May be absent
  misc_difference 15: note = May be absent
  misc_difference 16: note = May be absent
  misc_difference 17: note = May be absent
  misc_difference 18: note = May be absent
  misc_difference 19: note = May be absent
  misc_difference 20: note = May be absent
  misc_difference 21: note = May be absent
  misc_difference 22: note = May be absent
  misc_difference 23: note = May be absent
  misc_difference 24: note = May be absent
  misc_difference 25: note = May be absent
  misc_difference 26: note = May be absent
  misc_difference 27: note = May be absent
  misc_difference 28: note = May be absent
  misc_difference 29: note = May be absent
  misc_difference 30: note = May be absent
  misc_difference 31: note = May be absent
  misc_difference 32: note = May be absent
  misc_difference 33: note = May be absent
  misc_difference 34: note = May be absent
  misc_difference 35: note = May be absent
  misc_difference 36: note = May be absent
  misc_difference 37: note = May be absent
  misc_difference 38: note = May be absent
  misc_difference 39: note = May be absent
  misc_difference 40: note = May be absent
  misc_difference 41: note = May be absent
  misc_difference 42: note = May be absent
  misc_difference 43: note = May be absent
  misc_difference 44: note = May be absent
  misc_difference 45: note = May be absent
  misc_difference 46: note = May be absent
  misc_difference 47: note = a, c, g, u, unknown, other, or absent
  misc_difference 48: note = a, c, g, u, unknown, other, or absent
  misc_difference 49: note = a, c, g, u, unknown, other, or absent
  misc_difference 50: note = a, c, g, u, unknown, other, or absent
  misc_difference 51: note = a, c, g, u, unknown, other, or absent
  misc_difference 52: note = a, c, g, u, unknown, other, or absent
  misc_difference 53: note = a, c, g, u, unknown, other, or absent
  misc_difference 54: note = a, c, g, u, unknown, other, or absent
  misc_difference 55: note = a, c, g, u, unknown, other, or absent
  misc_difference 56: note = a, c, g, u, unknown, other, or absent
  misc_difference 57: note = a, c, g, u, unknown, other, or absent
  misc_difference 58: note = a, c, g, u, unknown, other, or absent
  misc_difference 59: note = a, c, g, u, unknown, other, or absent
  misc_difference 60: note = a, c, g, u, unknown, other, or absent
  misc_difference 61: note = a, c, g, u, unknown, other, or absent
  misc_difference 62: note = a, c, g, u, unknown, other, or absent
  misc_difference 63: note = a, c, g, u, unknown, other, or absent
  misc_difference 64: note = a, c, g, u, unknown, other, or absent
  misc_difference 65: note = a, c, g, u, unknown, other, or absent
  misc_difference 66: note = a, c, g, u, unknown, other, or absent
  misc_difference 67: note = a, c, g, u, unknown, other, or absent
  misc_difference 68: note = a, c, g, u, unknown, other, or absent
  misc_difference 69: note = a, c, g, u, unknown, other, or absent
  misc_difference 70: note = a, c, g, u, unknown, other, or absent
  misc_difference 71: note = a, c, g, u, unknown, other, or absent
  misc_difference 72: note = a, c, g, u, unknown, other, or absent
  misc_difference 73: note = a, c, g, u, unknown, other, or absent
  misc_difference 74: note = a, c, g, u, unknown, other, or absent
  misc_difference 75: note = a, c, g, u, unknown, other, or absent
  misc_difference 76: note = a, c, g, u, unknown, other, or absent
  misc_difference 77: note = a, c, g, u, unknown, other, or absent
  misc_difference 78: note = a, c, g, u, unknown, other, or absent
  misc_difference 79: note = a, c, g, u, unknown, other, or absent
  misc_difference 80: note = a, c, g, u, unknown, other, or absent
  misc_difference 81: note = a, c, g, u, unknown, other, or absent
  misc_difference 82: note = a, c, g, u, unknown, other, or absent
  misc_difference 83: note = a, c, g, u, unknown, other, or absent
  misc_difference 84: note = a, c, g, u, unknown, other, or absent
  misc_difference 85: note = a, c, g, u, unknown, other, or absent
  misc_difference 86: note = a, c, g, u, unknown, other, or absent
  misc_difference 87: note = a, c, g, u, unknown, other, or absent
  misc_difference 88: note = a, c, g, u, unknown, other, or absent
  misc_difference 89: note = a, c, g, u, unknown, other, or absent
  misc_difference 90: note = a, c, g, u, unknown, other, or absent
  misc_difference 91: note = a, c, g, u, unknown, other, or absent
  misc_difference 92: note = a, c, g, u, unknown, other, or absent
  misc_difference 93: note = a, c, g, u, unknown, other, or absent
  misc_difference 94: note = a, c, g, u, unknown, other, or absent
  misc_difference 95: note = a, c, g, u, unknown, other, or absent
  misc_difference 96: note = a, c, g, u, unknown, other, or absent
  misc_difference 97: note = a, c, g, u, unknown, other, or absent
  misc_difference 98: note = a, c, g, u, unknown, other, or absent
  misc_difference 99: note = a, c, g, u, unknown, other, or absent
  misc_difference 100: note = a, c, g, u, unknown, other, or absent
  misc_difference 101: note = a, c, g, u, unknown, other, or absent
  misc_difference 102: note = a, c, g, u, unknown, other, or absent
  misc_difference 103: note = a, c, g, u, unknown, other, or absent
  misc_difference 104: note = a, c, g, u, unknown, other, or absent
  misc_difference 105: note = a, c, g, u, unknown, other, or absent
  misc_difference 106: note = a, c, g, u, unknown, other, or absent
  misc_difference 107: note = a, c, g, u, unknown, other, or absent
  misc_difference 108: note = a, c, g, u, unknown, other, or absent
  misc_difference 109: note = a, c, g, u, unknown, other, or absent
  misc_difference 110: note = a, c, g, u, unknown, other, or absent
  misc_difference 111: note = a, c, g, u, unknown, other, or absent
  misc_difference 112: note = a, c, g, u, unknown, other, or absent
  misc_difference 113: note = a, c, g, u, unknown, other, or absent
  misc_difference 114: note = a, c, g, u, unknown, other, or absent
  misc_difference 115: note = a, c, g, u, unknown, other, or absent
  misc_difference 116: note = a, c, g, u, unknown, other, or absent
  misc_difference 117: note = a, c, g, u, unknown, other, or absent
  misc_difference 118: note = a, c, g, u, unknown, other, or absent
  misc_difference 119: note = a, c, g, u, unknown, other, or absent
  misc_difference 120: note = a, c, g, u, unknown, other, or absent
  misc_difference 121: note = a, c, g, u, unknown, other, or absent
  misc_difference 122: note = a, c, g, u, unknown, other, or absent
  misc_difference 123: note = a, c, g, u, unknown, other, or absent
  misc_difference 124: note = a, c, g, u, unknown, other, or absent
  misc_difference 125: note = a, c, g, u, unknown, other, or absent
  misc_difference 126: note = a, c, g, u, unknown, other, or absent
  misc_difference 127: note = a, c, g, u, unknown, other, or absent
  misc_difference 128: note = a, c, g, u, unknown, other, or absent
  misc_difference 129: note = a, c, g, u, unknown, other, or absent
  misc_difference 130: note = a, c, g, u, unknown, other, or absent
  misc_difference 131: note = a, c, g, u, unknown, other, or absent
  misc_difference 132: note = a, c, g, u, unknown, other, or absent
  misc_difference 133: note = a, c, g, u, unknown, other, or absent
  misc_difference 134: note = a, c, g, u, unknown, other, or absent
  misc_difference 135: note = a, c, g, u, unknown, other, or absent
  misc_difference 136: note = a, c, g, u, unknown, other, or absent
  misc_difference 137: note = a, c, g, u, unknown, other, or absent
  misc_difference 138: note = a, c, g, u, unknown, other, or absent
  misc_difference 139: note = a, c, g, u, unknown, other, or absent
  misc_difference 140: note = a, c, g, u, unknown, other, or absent
  misc_difference 141: note = a, c, g, u, unknown, other, or absent
  misc_difference 142: note = a, c, g, u, unknown, other, or absent
  misc_difference 143: note = a, c, g, u, unknown, other, or absent
  misc_difference 144: note = a, c, g, u, unknown, other, or absent
  misc_difference 145: note = a, c, g, u, unknown, other, or absent
  misc_difference 146: note = a, c, g, u, unknown, other, or absent
  misc_difference 147: note = a, c, g, u, unknown, other, or absent
  misc_difference 148: note = a, c, g, u, unknown, other, or absent
  misc_difference 149: note = a, c, g, u, unknown, other, or absent
  misc_difference 150: note = a, c, g, u, unknown, other, or absent
  misc_difference 151: note = a, c, g, u, unknown, other, or absent
  misc_difference 152: note = a, c, g, u, unknown, other, or absent
  misc_difference 153: note = a, c, g, u, unknown, other, or absent
  misc_difference 154: note = a, c, g, u, unknown, other, or absent
  misc_difference 155: note = a, c, g, u, unknown, other, or absent
  misc_difference 156: note = a, c, g, u, unknown, other, or absent
  misc_difference 157: note = a, c, g, u, unknown, other, or absent
  misc_difference 158: note = a, c, g, u, unknown, other, or absent
  misc_difference 159: note = a, c, g, u, unknown, other, or absent
  misc_difference 160: note = a, c, g, u, unknown, other, or absent
  misc_difference 161: note = a, c, g, u, unknown, other, or absent
  misc_difference 162: note = a, c, g, u, unknown, other, or absent
  misc_difference 163: note = a, c, g, u, unknown, other, or absent
  misc_difference 164: note = a, c, g, u, unknown, other, or absent
  misc_difference 165: note = a, c, g, u, unknown, other, or absent
  misc_difference 166: note = a, c, g, u, unknown, other, or absent
  misc_difference 167: note = a, c, g, u, unknown, other, or absent
  misc_difference 168: note = a, c, g, u, unknown, other, or absent
  misc_difference 169: note = a, c, g, u, unknown, other, or absent
  misc_difference 170: note = a, c, g, u, unknown, other, or absent
  misc_difference 171: note = a, c, g, u, unknown, other, or absent
  misc_difference 172: note = a, c, g, u, unknown, other, or absent
  misc_difference 173: note = a, c, g, u, unknown, other, or absent
  misc_difference 174: note = a, c, g, u, unknown, other, or absent
  misc_difference 175: note = a, c, g, u, unknown, other, or absent
  misc_difference 176: note = a, c, g, u, unknown, other, or absent
  misc_difference 177: note = a, c, g, u, unknown, other, or absent
  misc_difference 178: note = a, c, g, u, unknown, other, or absent
  misc_difference 179: note = a, c, g, u, unknown, other, or absent
  misc_difference 180: note = a, c, g, u, unknown, other, or absent
  misc_difference 181: note = a, c, g, u, unknown, other, or absent
  misc_difference 182: note = a, c, g, u, unknown, other, or absent
  misc_difference 183: note = a, c, g, u, unknown, other, or absent
  misc_difference 184: note = a, c, g, u, unknown, other, or absent
  misc_difference 185: note = a, c, g, u, unknown, other, or absent
  misc_difference 186: note = a, c, g, u, unknown, other, or absent
  misc_difference 187: note = a, c, g, u, unknown, other, or absent
  misc_difference 188: note = a, c, g, u, unknown, other, or absent
  misc_difference 189: note = a, c, g, u, unknown, other, or absent
  misc_difference 190: note = a, c, g, u, unknown, other, or absent
  misc_difference 191: note = a, c, g, u, unknown, other, or absent
  misc_difference 192: note = a, c, g, u, unknown, other, or absent
  misc_difference 193: note = a, c, g, u, unknown, other, or absent
  misc_difference 194: note = a, c, g, u, unknown, other, or absent
  misc_difference 195: note = a, c, g, u, unknown, other, or absent
  misc_difference 196: note = a, c, g, u, unknown, other, or absent
  misc_difference 197: note = a, c, g, u, unknown, other, or absent
  misc_difference 198: note = a, c, g, u, unknown, other, or absent
  misc_difference 199: note = a, c, g, u, unknown, other, or absent
  misc_difference 200: note = a, c, g, u, unknown, other, or absent
  misc_difference 201: note = a, c, g, u, unknown, other, or absent
  misc_difference 202: note = a, c, g, u, unknown, other, or absent
  misc_difference 203: note = a, c, g, u, unknown, other, or absent
  misc_difference 204: note = a, c, g, u, unknown, other, or absent
  misc_difference 205: note = a, c, g, u, unknown, other, or absent
  misc_difference 206: note = a, c, g, u, unknown, other, or absent
  misc_difference 207: note = a, c, g, u, unknown, other, or absent
  misc_difference 208: note = a, c, g, u, unknown, other, or absent
  misc_difference 209: note = a, c, g, u, unknown, other, or absent
  misc_difference 210: note = a, c, g, u, unknown, other, or absent
  misc_difference 211: note = a, c, g, u, unknown, other, or absent
  misc_difference 212: note = a, c, g, u, unknown, other, or absent
  misc_difference 213: note = a, c, g, u, unknown, other, or absent
  misc_difference 214: note = a, c, g, u, unknown, other, or absent
  misc_difference 215: note = a, c, g, u, unknown, other, or absent
  misc_difference 216: note = a, c, g, u, unknown, other, or absent
  misc_difference 217: note = a, c, g, u, unknown, other, or absent
  misc_difference 218: note = a, c, g, u, unknown, other, or absent
  misc_difference 219: note = a, c, g, u, unknown, other, or absent
  misc_difference 220: note = a, c, g, u, unknown, other, or absent
  misc_difference 221: note = a, c, g, u, unknown, other, or absent
  misc_difference 222: note = a, c, g, u, unknown, other, or absent
  misc_difference 223: note = a, c, g, u, unknown, other, or absent
  misc_difference 224: note = a, c, g, u, unknown, other, or absent
  misc_difference 225: note = a, c, g, u, unknown, other, or absent
  misc_difference 226: note = a, c, g, u, unknown, other, or absent
  misc_difference 227: note = a, c, g, u, unknown, other, or absent
  misc_difference 228: note = a, c, g, u, unknown, other, or absent
  misc_difference 229: note = a, c, g, u, unknown, other, or absent
  misc_difference 230: note = a, c, g, u, unknown, other, or absent
  misc_difference 231: note = a, c, g, u, unknown, other, or absent
  misc_difference 232: note = a, c, g, u, unknown, other, or absent
  misc_difference 233: note = a, c, g, u, unknown, other, or absent
  misc_difference 234: note = a, c, g, u, unknown, other, or absent
  misc_difference 235: note = a, c, g, u, unknown, other, or absent
  misc_difference 236: note = a, c, g, u, unknown, other, or absent
  misc_difference 237: note = a, c, g, u, unknown, other, or absent
  misc_difference 238: note = a, c, g, u, unknown, other, or absent
  misc_difference 239: note = a, c, g, u, unknown, other, or absent
  misc_difference 240: note = a, c, g, u, unknown, other, or absent
  misc_difference 241: note = a, c, g, u, unknown, other, or absent
  misc_difference 242: note = a, c, g, u, unknown, other, or absent
  misc_difference 243: note = a, c, g, u, unknown, other, or absent
  misc_difference 244: note = a, c, g, u, unknown, other, or absent
  misc_difference 245: note = a, c, g, u, unknown, other, or absent
  misc_difference 246: note = a, c, g, u, unknown, other, or absent
  misc_difference 247: note = a, c, g, u, unknown, other, or absent
  misc_difference 248: note = a, c, g, u, unknown, other, or absent
  misc_difference 249: note = a, c, g, u, unknown, other, or absent
  misc_difference 250: note = a, c, g, u, unknown, other, or absent
  misc_difference 251: note = a, c, g, u, unknown, other, or absent
  misc_difference 252: note = a, c, g, u, unknown, other, or absent
  misc_difference 253: note = a, c, g, u, unknown, other, or absent
  misc_difference 254: note = a, c, g, u, unknown, other, or absent
  misc_difference 255: note = a, c, g, u, unknown, other, or absent
  misc_difference 256: note = a, c, g, u, unknown, other, or absent
  misc_difference 257: note = a, c, g, u, unknown, other, or absent
  misc_difference 258: note = a, c, g, u, unknown, other, or absent
  misc_difference 259: note = a, c, g, u, unknown, other, or absent
  misc_difference 260: note = a, c, g, u, unknown, other, or absent
  misc_difference 261: note = a, c, g, u, unknown, other, or absent
  misc_difference 262: note = a, c, g, u, unknown, other, or absent
  misc_difference 263: note = a, c, g, u, unknown, other, or absent
  misc_difference 264: note = a, c, g, u, unknown, other, or absent
  misc_difference 265: note = a, c, g, u, unknown, other, or absent
  misc_difference 266: note = a, c, g, u, unknown, other, or absent
  misc_difference 267: note = a, c, g, u, unknown, other, or absent
  misc_difference 268: note = a, c, g, u, unknown, other, or absent
  misc_difference 269: note = a, c, g, u, unknown, other, or absent
  misc_difference 270: note = a, c, g, u, unknown, other, or absent
  misc_difference 271: note = a, c, g, u, unknown, other, or absent
  misc_difference 272: note = a, c, g, u, unknown, other, or absent
  misc_difference 273: note = a, c, g, u, unknown, other, or absent
  misc_difference 274: note = a, c, g, u, unknown, other, or absent
  misc_difference 275: note = a, c, g, u, unknown, other, or absent
  misc_difference 276: note = a, c, g, u, unknown, other, or absent
  misc_difference 277: note = a, c, g, u, unknown, other, or absent
  misc_difference 278: note = a, c, g, u, unknown, other, or absent
  misc_difference 279: note = a, c, g, u, unknown, other, or absent
  misc_difference 280: note = a, c, g, u, unknown, other, or absent
  misc_difference 281: note = a, c, g, u, unknown, other, or absent
  misc_difference 282: note = a, c, g, u, unknown, other, or absent
  misc_difference 283: note = a, c, g, u, unknown, other, or absent
  misc_difference 284: note = a, c, g, u, unknown, other, or absent
  misc_difference 285: note = a, c, g, u, unknown, other, or absent
  misc_difference 286: note = a, c, g, u, unknown, other, or absent
  misc_difference 287: note = a, c, g, u, unknown, other, or absent
  misc_difference 288: note = a, c, g, u, unknown, other, or absent
  misc_difference 289: note = a, c, g, u, unknown, other, or absent
  misc_difference 290: note = a, c, g, u, unknown, other, or absent
  misc_difference 291: note = a, c, g, u, unknown, other, or absent
  misc_difference 292: note = a, c, g, u, unknown, other, or absent
  misc_difference 293: note = a, c, g, u, unknown, other, or absent
  misc_difference 294: note = a, c, g, u, unknown, other, or absent
  misc_difference 295: note = a, c, g, u, unknown, other, or absent
  misc_difference 296: note = a, c, g, u, unknown, other, or absent
  misc_difference 297: note = a, c, g, u, unknown, other, or absent
  misc_difference 298: note = a, c, g, u, unknown, other, or absent
  misc_difference 299: note = a, c, g, u, unknown, other, or absent
  misc_difference 300: note = a, c, g, u, unknown, other, or absent
  misc_difference 301: note = a, c, g, u, unknown, other, or absent
  misc_difference 302: note = a, c, g, u, unknown, other, or absent
  misc_difference 303: note = a, c, g, u, unknown, other, or absent
  misc_difference 304: note = a, c, g, u, unknown, other, or absent
  misc_difference 305: note = a, c, g, u, unknown, other, or absent
  misc_difference 306: note = a, c, g, u, unknown, other, or absent
  misc_difference 307: note = a, c, g, u, unknown, other, or absent
  misc_difference 308: note = a, c, g, u, unknown, other, or absent
  misc_difference 309: note = a, c, g, u, unknown, other, or absent
  misc_difference 310: note = a, c, g, u, unknown, other, or absent
  misc_difference 311: note = a, c, g, u, unknown, other, or absent
  misc_difference 312: note = a, c, g, u, unknown, other, or absent
  misc_difference 313: note = a, c, g, u, unknown, other, or absent
  misc_difference 314: note = a, c, g, u, unknown, other, or absent
  misc_difference 315: note = a, c, g, u, unknown, other, or absent
  misc_difference 316: note = a, c, g, u, unknown, other, or absent
  misc_difference 317: note = a, c, g, u, unknown, other, or absent
  misc_difference 318: note = May be absent
  misc_difference 319: note = May be absent
  misc_difference 320: note = May be absent
  misc_difference 321: note = May be absent
  misc_difference 322: note = May be absent
  misc_difference 323: note = May be absent
  misc_difference 324: note = May be absent
  misc_difference 325: note = May be absent
  misc_difference 326: note = May be absent
  misc_difference 327: note = May be absent
  misc_difference 328: note = May be absent
  misc_difference 329: note = May be absent
  misc_difference 330: note = May be absent
  misc_difference 331: note = May be absent
  misc_difference 332: note = May be absent
  misc_difference 333: note = May be absent
  misc_difference 334: note = May be absent
  misc_difference 335: note = May be absent
  misc_difference 336: note = a, c, g, u, unknown, other, or absent
  misc_difference 337: note = May be absent
  misc_difference 338: note = May be absent
  misc_difference 339: note = May be absent
  misc_difference 340: note = a, c, g, u, unknown, other, or absent
  misc_difference 341: note = May be absent
  misc_difference 342: note = May be absent
  misc_difference 47..318: note = This region may encompass 1-271 nucleotides
grnvyvnskkgssydawtggaygarsgyryykgmythckrakymrrnnnnnnnnnnnnnnnnnnnnnnnnnnnnnnnnnnnnnnnnnnnnnnnnnnnnnnnnnnnnnnnnnnnnnnnnnnnnnnnnnnnnnnnnnnnnnnnnnnnnnnnnnnnnnnnnnnnnnnnnnnnnnnnnnnnnnnnnnnnnnnnnnnnnnnnnnnnnnnnnnnnnnnnnnnnnnnnnnnnnnnnnnnnnnnnnnnnnnnnnnnnnnnnnnnnnnnnnnnnnnnnnnnnnnnnnnnnnnnnnnnnnnnnnnnnnnnnnnnnnnnnnnnnnnnnshrggttygavtycydbynbdbnyg

SEQ ID NO: 568 - RNA, 341 nt, synthetic construct
  source 1..341: mol_type = other RNA
  misc_difference 1: note = May be absent
  misc_difference 2: note = a, c, g, u, unknown, other, or absent
  misc_difference 3: note = May be absent
  misc_difference 4: note = a, c, g, u, unknown, other, or absent
  misc_difference 5: note = a, c, g, u, unknown, other, or absent
  misc_difference 6: note = a, c, g, u, unknown, other, or absent
  misc_difference 7: note = May be absent
  misc_difference 8: note = May be absent
  misc_difference 9: note = May be absent
  misc_difference 10: note = May be absent
  misc_difference 11: note = May be absent
  misc_difference 12: note = a, c, g, u, unknown, other, or absent
  misc_difference 13: note = May be absent
  misc_difference 14: note = May be absent
  misc_difference 15: note = May be absent
  misc_difference 16: note = May be absent
  misc_difference 17: note = a, c, g, u, unknown, other, or absent
  misc_difference 18: note = May be absent
  misc_difference 19: note = May be absent
  misc_difference 20: note = May be absent
  misc_difference 21: note = May be absent
  misc_difference 22: note = May be absent
  misc_difference 23: note = May be absent
  misc_difference 24: note = May be absent
  misc_difference 25: note = a, c, g, u, unknown, other, or absent
  misc_difference 26: note = May be absent
  misc_difference 27: note = May be absent
  misc_difference 28: note = a, c, g, u, unknown, other, or absent
  misc_difference 29: note = a, c, g, u, unknown, other, or absent
  misc_difference 30: note = a, c, g, u, unknown, other, or absent
  misc_difference 31: note = May be absent
  misc_difference 32: note = May be absent
  misc_difference 33: note = May be absent
  misc_difference 34: note = May be absent
  misc_difference 35: note = May be absent
  misc_difference 36: note = May be absent
  misc_difference 37: note = May be absent
  misc_difference 38: note = May be absent
  misc_difference 39: note = May be absent
  misc_difference 40: note = May be absent
  misc_difference 41: note = May be absent
  misc_difference 42: note = May be absent
  misc_difference 43: note = a, c, g, u, unknown, other, or absent
  misc_difference 44: note = a, c, g, u, unknown, other, or absent
  misc_difference 45: note = a, c, g, u, unknown, other, or absent
  misc_difference 46: note = a, c, g, u, unknown, other, or absent
  misc_difference 47: note = a, c, g, u, unknown, other, or absent
  misc_difference 48: note = a, c, g, u, unknown, other, or absent
  misc_difference 49: note = a, c, g, u, unknown, other, or absent
  misc_difference 50: note = a, c, g, u, unknown, other, or absent
  misc_difference 51: note = a, c, g, u, unknown, other, or absent
  misc_difference 52: note = a, c, g, u, unknown, other, or absent
  misc_difference 53: note = a, c, g, u, unknown, other, or absent
  misc_difference 54: note = a, c, g, u, unknown, other, or absent
  misc_difference 55: note = a, c, g, u, unknown, other, or absent
  misc_difference 56: note = a, c, g, u, unknown, other, or absent
  misc_difference 57: note = a, c, g, u, unknown, other, or absent
  misc_difference 58: note = a, c, g, u, unknown, other, or absent
  misc_difference 59: note = a, c, g, u, unknown, other, or absent
  misc_difference 60: note = a, c, g, u, unknown, other, or absent
  misc_difference 61: note = a, c, g, u, unknown, other, or absent
  misc_difference 62: note = a, c, g, u, unknown, other, or absent
  misc_difference 63: note = a, c, g, u, unknown, other, or absent
  misc_difference 64: note = a, c, g, u, unknown, other, or absent
  misc_difference 65: note = a, c, g, u, unknown, other, or absent
  misc_difference 66: note = a, c, g, u, unknown, other, or absent
  misc_difference 67: note = a, c, g, u, unknown, other, or absent
  misc_difference 68: note = a, c, g, u, unknown, other, or absent
  misc_difference 69: note = a, c, g, u, unknown, other, or absent
  misc_difference 70: note = a, c, g, u, unknown, other, or absent
  misc_difference 71: note = a, c, g, u, unknown, other, or absent
  misc_difference 72: note = a, c, g, u, unknown, other, or absent
  misc_difference 73: note = a, c, g, u, unknown, other, or absent
  misc_difference 74: note = a, c, g, u, unknown, other, or absent
  misc_difference 75: note = a, c, g, u, unknown, other, or absent
  misc_difference 76: note = a, c, g, u, unknown, other, or absent
  misc_difference 77: note = a, c, g, u, unknown, other, or absent
  misc_difference 78: note = a, c, g, u, unknown, other, or absent
  misc_difference 79: note = a, c, g, u, unknown, other, or absent
  misc_difference 80: note = a, c, g, u, unknown, other, or absent
  misc_difference 81: note = a, c, g, u, unknown, other, or absent
  misc_difference 82: note = a, c, g, u, unknown, other, or absent
  misc_difference 83: note = a, c, g, u, unknown, other, or absent
  misc_difference 84: note = a, c, g, u, unknown, other, or absent
  misc_difference 85: note = a, c, g, u, unknown, other, or absent
  misc_difference 86: note = a, c, g, u, unknown, other, or absent
  misc_difference 87: note = a, c, g, u, unknown, other, or absent
  misc_difference 88: note = a, c, g, u, unknown, other, or absent
  misc_difference 89: note = a, c, g, u, unknown, other, or absent
  misc_difference 90: note = a, c, g, u, unknown, other, or absent
  misc_difference 91: note = a, c, g, u, unknown, other, or absent
  misc_difference 92: note = a, c, g, u, unknown, other, or absent
  misc_difference 93: note = a, c, g, u, unknown, other, or absent
  misc_difference 94: note = a, c, g, u, unknown, other, or absent
  misc_difference 95: note = a, c, g, u, unknown, other, or absent
  misc_difference 96: note = a, c, g, u, unknown, other, or absent
  misc_difference 97: note = a, c, g, u, unknown, other, or absent
  misc_difference 98: note = a, c, g, u, unknown, other, or absent
  misc_difference 99: note = a, c, g, u, unknown, other, or absent
  misc_difference 100: note = a, c, g, u, unknown, other, or absent
  misc_difference 101: note = a, c, g, u, unknown, other, or absent
  misc_difference 102: note = a, c, g, u, unknown, other, or absent
  misc_difference 103: note = a, c, g, u, unknown, other, or absent
  misc_difference 104: note = a, c, g, u, unknown, other, or absent
  misc_difference 105: note = a, c, g, u, unknown, other, or absent
  misc_difference 106: note = a, c, g, u, unknown, other, or absent
  misc_difference 107: note = a, c, g, u, unknown, other, or absent
  misc_difference 108: note = a, c, g, u, unknown, other, or absent
  misc_difference 109: note = a, c, g, u, unknown, other, or absent
  misc_difference 110: note = a, c, g, u, unknown, other, or absent
  misc_difference 111: note = a, c, g, u, unknown, other, or absent
  misc_difference 112: note = a, c, g, u, unknown, other, or absent
  misc_difference 113: note = a, c, g, u, unknown, other, or absent
  misc_difference 114: note = a, c, g, u, unknown, other, or absent
  misc_difference 115: note = a, c, g, u, unknown, other, or absent
  misc_difference 116: note = a, c, g, u, unknown, other, or absent
  misc_difference 117: note = a, c, g, u, unknown, other, or absent
  misc_difference 118: note = a, c, g, u, unknown, other, or absent
  misc_difference 119: note = a, c, g, u, unknown, other, or absent
  misc_difference 120: note = a, c, g, u, unknown, other, or absent
  misc_difference 121: note = a, c, g, u, unknown, other, or absent
  misc_difference 122: note = a, c, g, u, unknown, other, or absent
  misc_difference 123: note = a, c, g, u, unknown, other, or absent
  misc_difference 124: note = a, c, g, u, unknown, other, or absent
  misc_difference 125: note = a, c, g, u, unknown, other, or absent
  misc_difference 126: note = a, c, g, u, unknown, other, or absent
  misc_difference 127: note = a, c, g, u, unknown, other, or absent
  misc_difference 128: note = a, c, g, u, unknown, other, or absent
  misc_difference 129: note = a, c, g, u, unknown, other, or absent
  misc_difference 130: note = a, c, g, u, unknown, other, or absent
  misc_difference 131: note = a, c, g, u, unknown, other, or absent
  misc_difference 132: note = a, c, g, u, unknown, other, or absent
  misc_difference 133: note = a, c, g, u, unknown, other, or absent
  misc_difference 134: note = a, c, g, u, unknown, other, or absent
  misc_difference 135: note = a, c, g, u, unknown, other, or absent
  misc_difference 136: note = a, c, g, u, unknown, other, or absent
  misc_difference 137: note = a, c, g, u, unknown, other, or absent
  misc_difference 138: note = a, c, g, u, unknown, other, or absent
  misc_difference 139: note = a, c, g, u, unknown, other, or absent
  misc_difference 140: note = a, c, g, u, unknown, other, or absent
  misc_difference 141: note = a, c, g, u, unknown, other, or absent
  misc_difference 142: note = a, c, g, u, unknown, other, or absent
  misc_difference 143: note = a, c, g, u, unknown, other, or absent
  misc_difference 144: note = a, c, g, u, unknown, other, or absent
  misc_difference 145: note = a, c, g, u, unknown, other, or absent
  misc_difference 146: note = a, c, g, u, unknown, other, or absent
  misc_difference 147: note = a, c, g, u, unknown, other, or absent
  misc_difference 148: note = a, c, g, u, unknown, other, or absent
  misc_difference 149: note = a, c, g, u, unknown, other, or absent
  misc_difference 150: note = a, c, g, u, unknown, other, or absent
  misc_difference 151: note = a, c, g, u, unknown, other, or absent
  misc_difference 152: note = a, c, g, u, unknown, other, or absent
  misc_difference 153: note = a, c, g, u, unknown, other, or absent
  misc_difference 154: note = a, c, g, u, unknown, other, or absent
  misc_difference 155: note = a, c, g, u, unknown, other, or absent
  misc_difference 156: note = a, c, g, u, unknown, other, or absent
  misc_difference 157: note = a, c, g, u, unknown, other, or absent
  misc_difference 158: note = a, c, g, u, unknown, other, or absent
  misc_difference 159: note = a, c, g, u, unknown, other, or absent
  misc_difference 160: note = a, c, g, u, unknown, other, or absent
  misc_difference 161: note = a, c, g, u, unknown, other, or absent
  misc_difference 162: note = a, c, g, u, unknown, other, or absent
  misc_difference 163: note = a, c, g, u, unknown, other, or absent
  misc_difference 164: note = a, c, g, u, unknown, other, or absent
  misc_difference 165: note = a, c, g, u, unknown, other, or absent
  misc_difference 166: note = a, c, g, u, unknown, other, or absent
  misc_difference 167: note = a, c, g, u, unknown, other, or absent
  misc_difference 168: note = a, c, g, u, unknown, other, or absent
  misc_difference 169: note = a, c, g, u, unknown, other, or absent
  misc_difference 170: note = a, c, g, u, unknown, other, or absent
  misc_difference 171: note = a, c, g, u, unknown, other, or absent
  misc_difference 172: note = a, c, g, u, unknown, other, or absent
  misc_difference 173: note = a, c, g, u, unknown, other, or absent
  misc_difference 174: note = a, c, g, u, unknown, other, or absent
  misc_difference 175: note = a, c, g, u, unknown, other, or absent
  misc_difference 176: note = a, c, g, u, unknown, other, or absent
  misc_difference 177: note = a, c, g, u, unknown, other, or absent
  misc_difference 178: note = a, c, g, u, unknown, other, or absent
  misc_difference 179: note = a, c, g, u, unknown, other, or absent
  misc_difference 180: note = a, c, g, u, unknown, other, or absent
  misc_difference 181: note = a, c, g, u, unknown, other, or absent
  misc_difference 182: note = a, c, g, u, unknown, other, or absent
  misc_difference 183: note = a, c, g, u, unknown, other, or absent
  misc_difference 184: note = a, c, g, u, unknown, other, or absent
  misc_difference 185: note = a, c, g, u, unknown, other, or absent
  misc_difference 186: note = a, c, g, u, unknown, other, or absent
  misc_difference 187: note = a, c, g, u, unknown, other, or absent
  misc_difference 188: note = a, c, g, u, unknown, other, or absent
  misc_difference 189: note = a, c, g, u, unknown, other, or absent
  misc_difference 190: note = a, c, g, u, unknown, other, or absent
  misc_difference 191: note = a, c, g, u, unknown, other, or absent
  misc_difference 192: note = a, c, g, u, unknown, other, or absent
  misc_difference 193: note = a, c, g, u, unknown, other, or absent
  misc_difference 194: note = a, c, g, u, unknown, other, or absent
  misc_difference 195: note = a, c, g, u, unknown, other, or absent
  misc_difference 196: note = a, c, g, u, unknown, other, or absent
  misc_difference 197: note = a, c, g, u, unknown, other, or absent
  misc_difference 198: note = a, c, g, u, unknown, other, or absent
  misc_difference 199: note = a, c, g, u, unknown, other, or absent
  misc_difference 200: note = a, c, g, u, unknown, other, or absent
  misc_difference 201: note = a, c, g, u, unknown, other, or absent
  misc_difference 202: note = a, c, g, u, unknown, other, or absent
  misc_difference 203: note = a, c, g, u, unknown, other, or absent
  misc_difference 204: note = a, c, g, u, unknown, other, or absent
  misc_difference 205: note = a, c, g, u, unknown, other, or absent
  misc_difference 206: note = a, c, g, u, unknown, other, or absent
  misc_difference 207: note = a, c, g, u, unknown, other, or absent
  misc_difference 208: note = a, c, g, u, unknown, other, or absent
  misc_difference 209: note = a, c, g, u, unknown, other, or absent
  misc_difference 210: note = a, c, g, u, unknown, other, or absent
  misc_difference 211: note = a, c, g, u, unknown, other, or absent
  misc_difference 212: note = a, c, g, u, unknown, other, or absent
  misc_difference 213: note = a, c, g, u, unknown, other, or absent
  misc_difference 214: note = a, c, g, u, unknown, other, or absent
  misc_difference 215: note = a, c, g, u, unknown, other, or absent
  misc_difference 216: note = a, c, g, u, unknown, other, or absent
  misc_difference 217: note = a, c, g, u, unknown, other, or absent
  misc_difference 218: note = a, c, g, u, unknown, other, or absent
  misc_difference 219: note = a, c, g, u, unknown, other, or absent
  misc_difference 220: note = a, c, g, u, unknown, other, or absent
  misc_difference 221: note = a, c, g, u, unknown, other, or absent
  misc_difference 222: note = a, c, g, u, unknown, other, or absent
  misc_difference 223: note = a, c, g, u, unknown, other, or absent
  misc_difference 224: note = a, c, g, u, unknown, other, or absent
  misc_difference 225: note = a, c, g, u, unknown, other, or absent
  misc_difference 226: note = a, c, g, u, unknown, other, or absent
  misc_difference 227: note = a, c, g, u, unknown, other, or absent
  misc_difference 228: note = a, c, g, u, unknown, other, or absent
  misc_difference 229: note = a, c, g, u, unknown, other, or absent
  misc_difference 230: note = a, c, g, u, unknown, other, or absent
  misc_difference 231: note = a, c, g, u, unknown, other, or absent
  misc_difference 232: note = a, c, g, u, unknown, other, or absent
  misc_difference 233: note = a, c, g, u, unknown, other, or absent
  misc_difference 234: note = a, c, g, u, unknown, other, or absent
  misc_difference 235: note = a, c, g, u, unknown, other, or absent
  misc_difference 236: note = a, c, g, u, unknown, other, or absent
  misc_difference 237: note = a, c, g, u, unknown, other, or absent
  misc_difference 238: note = a, c, g, u, unknown, other, or absent
  misc_difference 239: note = a, c, g, u, unknown, other, or absent
  misc_difference 240: note = a, c, g, u, unknown, other, or absent
  misc_difference 241: note = a, c, g, u, unknown, other, or absent
  misc_difference 242: note = a, c, g, u, unknown, other, or absent
  misc_difference 243: note = a, c, g, u, unknown, other, or absent
  misc_difference 244: note = a, c, g, u, unknown, other, or absent
  misc_difference 245: note = a, c, g, u, unknown, other, or absent
  misc_difference 246: note = a, c, g, u, unknown, other, or absent
  misc_difference 247: note = a, c, g, u, unknown, other, or absent
  misc_difference 248: note = a, c, g, u, unknown, other, or absent
  misc_difference 249: note = a, c, g, u, unknown, other, or absent
  misc_difference 250: note = a, c, g, u, unknown, other, or absent
  misc_difference 251: note = a, c, g, u, unknown, other, or absent
  misc_difference 252: note = a, c, g, u, unknown, other, or absent
  misc_difference 253: note = a, c, g, u, unknown, other, or absent
  misc_difference 254: note = a, c, g, u, unknown, other, or absent
  misc_difference 255: note = a, c, g, u, unknown, other, or absent
  misc_difference 256: note = a, c, g, u, unknown, other, or absent
  misc_difference 257: note = a, c, g, u, unknown, other, or absent
  misc_difference 258: note = a, c, g, u, unknown, other, or absent
  misc_difference 259: note = a, c, g, u, unknown, other, or absent
  misc_difference 260: note = a, c, g, u, unknown, other, or absent
  misc_difference 261: note = a, c, g, u, unknown, other, or absent
  misc_difference 262: note = a, c, g, u, unknown, other, or absent
  misc_difference 263: note = a, c, g, u, unknown, other, or absent
  misc_difference 264: note = a, c, g, u, unknown, other, or absent
  misc_difference 265: note = a, c, g, u, unknown, other, or absent
  misc_difference 266: note = a, c, g, u, unknown, other, or absent
  misc_difference 267: note = a, c, g, u, unknown, other, or absent
  misc_difference 268: note = a, c, g, u, unknown, other, or absent
  misc_difference 269: note = a, c, g, u, unknown, other, or absent
  misc_difference 270: note = a, c, g, u, unknown, other, or absent
  misc_difference 271: note = a, c, g, u, unknown, other, or absent
  misc_difference 272: note = a, c, g, u, unknown, other, or absent
  misc_difference 273: note = a, c, g, u, unknown, other, or absent
  misc_difference 274: note = a, c, g, u, unknown, other, or absent
  misc_difference 275: note = a, c, g, u, unknown, other, or absent
  misc_difference 276: note = a, c, g, u, unknown, other, or absent
  misc_difference 277: note = a, c, g, u, unknown, other, or absent
  misc_difference 278: note = a, c, g, u, unknown, other, or absent
  misc_difference 279: note = a, c, g, u, unknown, other, or absent
  misc_difference 280: note = a, c, g, u, unknown, other, or absent
  misc_difference 281: note = a, c, g, u, unknown, other, or absent
  misc_difference 282: note = a, c, g, u, unknown, other, or absent
  misc_difference 283: note = a, c, g, u, unknown, other, or absent
  misc_difference 284: note = a, c, g, u, unknown, other, or absent
  misc_difference 285: note = a, c, g, u, unknown, other, or absent
  misc_difference 286: note = a, c, g, u, unknown, other, or absent
  misc_difference 287: note = a, c, g, u, unknown, other, or absent
  misc_difference 288: note = a, c, g, u, unknown, other, or absent
  misc_difference 289: note = a, c, g, u, unknown, other, or absent
  misc_difference 290: note = a, c, g, u, unknown, other, or absent
  misc_difference 291: note = a, c, g, u, unknown, other, or absent
  misc_difference 292: note = a, c, g, u, unknown, other, or absent
  misc_difference 293: note = a, c, g, u, unknown, other, or absent
  misc_difference 294: note = a, c, g, u, unknown, other, or absent
  misc_difference 295: note = a, c, g, u, unknown, other, or absent
  misc_difference 296: note = a, c, g, u, unknown, other, or absent
  misc_difference 297: note = a, c, g, u, unknown, other, or absent
  misc_difference 298: note = a, c, g, u, unknown, other, or absent
  misc_difference 299: note = a, c, g, u, unknown, other, or absent
  misc_difference 300: note = a, c, g, u, unknown, other, or absent
  misc_difference 301: note = a, c, g, u, unknown, other, or absent
  misc_difference 302: note = a, c, g, u, unknown, other, or absent
  misc_difference 303: note = a, c, g, u, unknown, other, or absent
  misc_difference 304: note = a, c, g, u, unknown, other, or absent
  misc_difference 305: note = a, c, g, u, unknown, other, or absent
  misc_difference 306: note = a, c, g, u, unknown, other, or absent
  misc_difference 307: note = a, c, g, u, unknown, other, or absent
  misc_difference 308: note = a, c, g, u, unknown, other, or absent
  misc_difference 309: note = a, c, g, u, unknown, other, or absent
  misc_difference 310: note = a, c, g, u, unknown, other, or absent
  misc_difference 311: note = a, c, g, u, unknown, other, or absent
  misc_difference 312: note = a, c, g, u, unknown, other, or absent
  misc_difference 313: note = a, c, g, u, unknown, other, or absent
  misc_difference 314: note = a, c, g, u, unknown, other, or absent
  misc_difference 315: note = a, c, g, u, unknown, other, or absent
  misc_difference 316: note = a, c, g, u, unknown, other, or absent
  misc_difference 317: note = May be absent
  misc_difference 318: note = a, c, g, u, unknown, other, or absent
  misc_difference 319: note = a, c, g, u, unknown, other, or absent
  misc_difference 320: note = May be absent
  misc_difference 321: note = May be absent
  misc_difference 322: note = May be absent
  misc_difference 323: note = May be absent
  misc_difference 324: note = May be absent
  misc_difference 325: note = May be absent
  misc_difference 326: note = May be absent
  misc_difference 327: note = a, c, g, u, unknown, other, or absent
  misc_difference 328: note = May be absent
  misc_difference 329: note = May be absent
  misc_difference 330: note = May be absent
  misc_difference 331: note = a, c, g, u, unknown, other, or absent
  misc_difference 332: note = a, c, g, u, unknown, other, or absent
  misc_difference 333: note = May be absent
  misc_difference 334: note = a, c, g, u, unknown, other, or absent
  misc_difference 335: note = a, c, g, u, unknown, other, or absent
  misc_difference 336: note = a, c, g, u, unknown, other, or absent
  misc_difference 337: note = a, c, g, u, unknown, other, or absent
  misc_difference 338: note = May be absent
  misc_difference 339: note = a, c, g, u, unknown, other, or absent
  misc_difference 340: note = a, c, g, u, unknown, other, or absent
  misc_difference 341: note = May be absent
  misc_difference 43..314: note = This region may encompass 1-271 nucleotides
dnynnndtrghnhvrynggbhtrdnrynnnbsryyrttwahbnnnnnnnnnnnnnnnnnnnnnnnnnnnnnnnnnnnnnnnnnnnnnnnnnnnnnnnnnnnnnnnnnnnnnnnnnnnnnnnnnnnnnnnnnnnnnnnnnnnnnnnnnnnnnnnnnnnnnnnnnnnnnnnnnnnnnnnnnnnnnnnnnnnnnnnnnnnnnnnnnnnnnnnnnnnnnnnnnnnnnnnnnnnnnnnnnnnnnnnnnnnnnnnnnnnnnnnnnnnnnnnnnnnnnnnnnnnnnnnnnnnnnnnnnnnnnnnnnnnnnnnnnnnnnnnnnnvnnrgtkhvwnhcynnbnnnndnnr

SEQ ID NO: 569 - RNA, 341 nt, synthetic construct
  source 1..341: mol_type = other RNA
  misc_difference 1: note = May be absent
  misc_difference 2: note = May be absent
  misc_difference 3: note = May be absent
  misc_difference 4: note = May be absent
  misc_difference 5: note = May be absent
  misc_difference 6: note = May be absent
  misc_difference 7: note = May be absent
  misc_difference 8: note = May be absent
  misc_difference 9: note = May be absent
  misc_difference 10: note = May be absent
  misc_difference 11: note = May be absent
  misc_difference 12: note = May be absent
  misc_difference 13: note = May be absent
  misc_difference 14: note = May be absent
  misc_difference 15: note = May be absent
  misc_difference 16: note = May be absent
  misc_difference 17: note = a, c, g, u, unknown, other, or absent
  misc_difference 18: note = May be absent
  misc_difference 19: note = May be absent
  misc_difference 20: note = May be absent
  misc_difference 21: note = May be absent
  misc_difference 22: note = May be absent
  misc_difference 23: note = May be absent
  misc_difference 24: note = May be absent
  misc_difference 25: note = May be absent
  misc_difference 26: note = May be absent
  misc_difference 27: note = May be absent
  misc_difference 28: note = a, c, g, u, unknown, other, or absent
  misc_difference 29: note = May be absent
  misc_difference 30: note = May be absent
  misc_difference 31: note = May be absent
  misc_difference 32: note = May be absent
  misc_difference 33: note = May be absent
  misc_difference 34: note = May be absent
  misc_difference 35: note = May be absent
  misc_difference 36: note = May be absent
  misc_difference 37: note = May be absent
  misc_difference 38: note = May be absent
  misc_difference 39: note = May be absent
  misc_difference 40: note = May be absent
  misc_difference 41: note = May be absent
  misc_difference 42: note = May be absent
  misc_difference 43: note = May be absent
  misc_difference 44: note = May be absent
  misc_difference 45: note = May be absent
  misc_difference 46: note = a, c, g, u, unknown, other, or absent
  misc_difference 47: note = a, c, g, u, unknown, other, or absent
  misc_difference 48: note = a, c, g, u, unknown, other, or absent
  misc_difference 49: note = a, c, g, u, unknown, other, or absent
  misc_difference 50: note = a, c, g, u, unknown, other, or absent
  misc_difference 51: note = a, c, g, u, unknown, other, or absent
  misc_difference 52: note = a, c, g, u, unknown, other, or absent
  misc_difference 53: note = a, c, g, u, unknown, other, or absent
  misc_difference 54: note = a, c, g, u, unknown, other, or absent
  misc_difference 55: note = a, c, g, u, unknown, other, or absent
  misc_difference 56: note = a, c, g, u, unknown, other, or absent
  misc_difference 57: note = a, c, g, u, unknown, other, or absent
  misc_difference 58: note = a, c, g, u, unknown, other, or absent
  misc_difference 59: note = a, c, g, u, unknown, other, or absent
  misc_difference 60: note = a, c, g, u, unknown, other, or absent
  misc_difference 61: note = a, c, g, u, unknown, other, or absent
  misc_difference 62: note = a, c, g, u, unknown, other, or absent
  misc_difference 63: note = a, c, g, u, unknown, other, or absent
  misc_difference 64: note = a, c, g, u, unknown, other, or absent
  misc_difference 65: note = a, c, g, u, unknown, other, or absent
  misc_difference 66: note = a, c, g, u, unknown, other, or absent
  misc_difference 67: note = a, c, g, u, unknown, other, or absent
  misc_difference 68: note = a, c, g, u, unknown, other, or absent
  misc_difference 69: note = a, c, g, u, unknown, other, or absent
  misc_difference 70: note = a, c, g, u, unknown, other, or absent
  misc_difference 71: note = a, c, g, u, unknown, other, or absent
  misc_difference 72: note = a, c, g, u, unknown, other, or absent
  misc_difference 73: note = a, c, g, u, unknown, other, or absent
  misc_difference 74: note = a, c, g, u, unknown, other, or absent
  misc_difference 75: note = a, c, g, u, unknown, other, or absent
  misc_difference 76: note = a, c, g, u, unknown, other, or absent
  misc_difference 77: note = a, c, g, u, unknown, other, or absent
  misc_difference 78: note = a, c, g, u, unknown, other, or absent
  misc_difference 79: note = a, c, g, u, unknown, other, or absent
  misc_difference 80: note = a, c, g, u, unknown, other, or absent
  misc_difference 81: note = a, c, g, u, unknown, other, or absent
  misc_difference 82: note = a, c, g, u, unknown, other, or absent
  misc_difference 83: note = a, c, g, u, unknown, other, or absent
  misc_difference 84: note = a, c, g, u, unknown, other, or absent
  misc_difference 85: note = a, c, g, u, unknown, other, or absent
  misc_difference 86: note = a, c, g, u, unknown, other, or absent
  misc_difference 87: note = a, c, g, u, unknown, other, or absent
  misc_difference 88: note = a, c, g, u, unknown, other, or absent
  misc_difference 89: note = a, c, g, u, unknown, other, or absent
  misc_difference 90: note = a, c, g, u, unknown, other, or absent
  misc_difference 91: note = a, c, g, u, unknown, other, or absent
  misc_difference 92: note = a, c, g, u, unknown, other, or absent
  misc_difference 93: note = a, c, g, u, unknown, other, or absent
  misc_difference 94: note = a, c, g, u, unknown, other, or absent
  misc_difference 95: note = a, c, g, u, unknown, other, or absent
  misc_difference 96: note = a, c, g, u, unknown, other, or absent
  misc_difference 97: note = a, c, g, u, unknown, other, or absent
  misc_difference 98: note = a, c, g, u, unknown, other, or absent
  misc_difference 99: note = a, c, g, u, unknown, other, or absent
  misc_difference 100: note = a, c, g, u, unknown, other, or absent
  misc_difference 101: note = a, c, g, u, unknown, other, or absent
  misc_difference 102: note = a, c, g, u, unknown, other, or absent
  misc_difference 103: note = a, c, g, u, unknown, other, or absent
  misc_difference 104: note = a, c, g, u, unknown, other, or absent
  misc_difference 105: note = a, c, g, u, unknown, other, or absent
  misc_difference 106: note = a, c, g, u, unknown, other, or absent
  misc_difference 107: note = a, c, g, u, unknown, other, or absent
  misc_difference 108: note = a, c, g, u, unknown, other, or absent
  misc_difference 109: note = a, c, g, u, unknown, other, or absent
  misc_difference 110: note = a, c, g, u, unknown, other, or absent
  misc_difference 111: note = a, c, g, u, unknown, other, or absent
  misc_difference 112: note = a, c, g, u, unknown, other, or absent
  misc_difference 113: note = a, c, g, u, unknown, other, or absent
  misc_difference 114: note = a, c, g, u, unknown, other, or absent
  misc_difference 115: note = a, c, g, u, unknown, other, or absent
  misc_difference 116: note = a, c, g, u, unknown, other, or absent
  misc_difference 117: note = a, c, g, u, unknown, other, or absent
  misc_difference 118: note = a, c, g, u, unknown, other, or absent
  misc_difference 119: note = a, c, g, u, unknown, other, or absent
  misc_difference 120: note = a, c, g, u, unknown, other, or absent
  misc_difference 121: note = a, c, g, u, unknown, other, or absent
  misc_difference 122: note = a, c, g, u, unknown, other, or absent
  misc_difference 123: note = a, c, g, u, unknown, other, or absent
  misc_difference 124: note = a, c, g, u, unknown, other, or absent
  misc_difference 125: note = a, c, g, u, unknown, other, or absent
  misc_difference 126: note = a, c, g, u, unknown, other, or absent
  misc_difference 127: note = a, c, g, u, unknown, other, or absent
  misc_difference 128: note = a, c, g, u, unknown, other, or absent
  misc_difference 129: note = a, c, g, u, unknown, other, or absent
  misc_difference 130: note = a, c, g, u, unknown, other, or absent
  misc_difference 131: note = a, c, g, u, unknown, other, or absent
  misc_difference 132: note = a, c, g, u, unknown, other, or absent
  misc_difference 133: note = a, c, g, u, unknown, other, or absent
  misc_difference 134: note = a, c, g, u, unknown, other, or absent
  misc_difference 135: note = a, c, g, u, unknown, other, or absent
  misc_difference 136: note = a, c, g, u, unknown, other, or absent
  misc_difference 137: note = a, c, g, u, unknown, other, or absent
  misc_difference 138: note = a, c, g, u, unknown, other, or absent
  misc_difference 139: note = a, c, g, u, unknown, other, or absent
  misc_difference 140: note = a, c, g, u, unknown, other, or absent
  misc_difference 141: note = a, c, g, u, unknown, other, or absent
  misc_difference 142: note = a, c, g, u, unknown, other, or absent
  misc_difference 143: note = a, c, g, u, unknown, other, or absent
  misc_difference 144: note = a, c, g, u, unknown, other, or absent
  misc_difference 145: note = a, c, g, u, unknown, other, or absent
  misc_difference 146: note = a, c, g, u, unknown, other, or absent
  misc_difference 147: note = a, c, g, u, unknown, other, or absent
  misc_difference 148: note = a, c, g, u, unknown, other, or absent
  misc_difference 149: note = a, c, g, u, unknown, other, or absent
  misc_difference 150: note = a, c, g, u, unknown, other, or absent
  misc_difference 151: note = a, c, g, u, unknown, other, or absent
  misc_difference 152: note = a, c, g, u, unknown, other, or absent
  misc_difference 153: note = a, c, g, u, unknown, other, or absent
  misc_difference 154: note = a, c, g, u, unknown, other, or absent
  misc_difference 155: note = a, c, g, u, unknown, other, or absent
  misc_difference 156: note = a, c, g, u, unknown, other, or absent
  misc_difference 157: note = a, c, g, u, unknown, other, or absent
  misc_difference 158: note = a, c, g, u, unknown, other, or absent
  misc_difference 159: note = a, c, g, u, unknown, other, or absent
  misc_difference 160: note = a, c, g, u, unknown, other, or absent
  misc_difference 161: note = a, c, g, u, unknown, other, or absent
  misc_difference 162: note = a, c, g, u, unknown, other, or absent
  misc_difference 163: note = a, c, g, u, unknown, other, or absent
  misc_difference 164: note = a, c, g, u, unknown, other, or absent
  misc_difference 165: note = a, c, g, u, unknown, other, or absent
  misc_difference 166: note = a, c, g, u, unknown, other, or absent
  misc_difference 167: note = a, c, g, u, unknown, other, or absent
  misc_difference 168: note = a, c, g, u, unknown, other, or absent
  misc_difference 169: note = a, c, g, u, unknown, other, or absent
  misc_difference 170: note = a, c, g, u, unknown, other, or absent
  misc_difference 171: note = a, c, g, u, unknown, other, or absent
  misc_difference 172: note = a, c, g, u, unknown, other, or absent
  misc_difference 173: note = a, c, g, u, unknown, other, or absent
  misc_difference 174: note = a, c, g, u, unknown, other, or absent
  misc_difference 175: note = a, c, g, u, unknown, other, or absent
  misc_difference 176: note = a, c, g, u, unknown, other, or absent
  misc_difference 177: note = a, c, g, u, unknown, other, or absent
  misc_difference 178: note = a, c, g, u, unknown, other, or absent
  misc_difference 179: note = a, c, g, u, unknown, other, or absent
  misc_difference 180: note = a, c, g, u, unknown, other, or absent
  misc_difference 181: note = a, c, g, u, unknown, other, or absent
  misc_difference 182: note = a, c, g, u, unknown, other, or absent
  misc_difference 183: note = a, c, g, u, unknown, other, or absent
  misc_difference 184: note = a, c, g, u, unknown, other, or absent
  misc_difference 185: note = a, c, g, u, unknown, other, or absent
  misc_difference 186: note = a, c, g, u, unknown, other, or absent
  misc_difference 187: note = a, c, g, u, unknown, other, or absent
  misc_difference 188: note = a, c, g, u, unknown, other, or absent
  misc_difference 189: note = a, c, g, u, unknown, other, or absent
  misc_difference 190: note = a, c, g, u, unknown, other, or absent
  misc_difference 191: note = a, c, g, u, unknown, other, or absent
  misc_difference 192: note = a, c, g, u, unknown, other, or absent
  misc_difference 193: note = a, c, g, u, unknown, other, or absent
  misc_difference 194: note = a, c, g, u, unknown, other, or absent
  misc_difference 195: note = a, c, g, u, unknown, other, or absent
  misc_difference 196: note = a, c, g, u, unknown, other, or absent
  misc_difference 197: note = a, c, g, u, unknown, other, or absent
  misc_difference 198: note = a, c, g, u, unknown, other, or absent
  misc_difference 199: note = a, c, g, u, unknown, other, or absent
  misc_difference 200: note = a, c, g, u, unknown, other, or absent
  misc_difference 201: note = a, c, g, u, unknown, other, or absent
  misc_difference 202: note = a, c, g, u, unknown, other, or absent
  misc_difference 203: note = a, c, g, u, unknown, other, or absent
  misc_difference 204: note = a, c, g, u, unknown, other, or absent
  misc_difference 205: note = a, c, g, u, unknown, other, or absent
  misc_difference 206: note = a, c, g, u, unknown, other, or absent
  misc_difference 207: note = a, c, g, u, unknown, other, or absent
  misc_difference 208: note = a, c, g, u, unknown, other, or absent
  misc_difference 209: note = a, c, g, u, unknown, other, or absent
  misc_difference 210: note = a, c, g, u, unknown, other, or absent
  misc_difference 211: note = a, c, g, u, unknown, other, or absent
  misc_difference 212: note = a, c, g, u, unknown, other, or absent
  misc_difference 213: note = a, c, g, u, unknown, other, or absent
  misc_difference 214: note = a, c, g, u, unknown, other, or absent
  misc_difference 215: note = a, c, g, u, unknown, other, or absent
  misc_difference 216: note = a, c, g, u, unknown, other, or absent
  misc_difference 217: note = a, c, g, u, unknown, other, or absent
  misc_difference 218: note = a, c, g, u, unknown, other, or absent
  misc_difference 219: note = a, c, g, u, unknown, other, or absent
  misc_difference 220: note = a, c, g, u, unknown, other, or absent
  misc_difference 221: note = a, c, g, u, unknown, other, or absent
  misc_difference 222: note = a, c, g, u, unknown, other, or absent
  misc_difference 223: note = a, c, g, u, unknown, other, or absent
  misc_difference 224: note = a, c, g, u, unknown, other, or absent
  misc_difference 225: note = a, c, g, u, unknown, other, or absent
  misc_difference 226: note = a, c, g, u, unknown, other, or absent
  misc_difference 227: note = a, c, g, u, unknown, other, or absent
  misc_difference 228: note = a, c, g, u, unknown, other, or absent
  misc_difference 229: note = a, c, g, u, unknown, other, or absent
  misc_difference 230: note = a, c, g, u, unknown, other, or absent
  misc_difference 231: note = a, c, g, u, unknown, other, or absent
  misc_difference 232: note = a, c, g, u, unknown, other, or absent
  misc_difference 233: note = a, c, g, u, unknown, other, or absent
  misc_difference 234: note = a, c, g, u, unknown, other, or absent
  misc_difference 235: note = a, c, g, u, unknown, other, or absent
  misc_difference 236: note = a, c, g, u, unknown, other, or absent
  misc_difference 237: note = a, c, g, u, unknown, other, or absent
  misc_difference 238: note = a, c, g, u, unknown, other, or absent
  misc_difference 239: note = a, c, g, u, unknown, other, or absent
  misc_difference 240: note = a, c, g, u, unknown, other, or absent
  misc_difference 241: note = a, c, g, u, unknown, other, or absent
  misc_difference 242: note = a, c, g, u, unknown, other, or absent
  misc_difference 243: note = a, c, g, u, unknown, other, or absent
  misc_difference 244: note = a, c, g, u, unknown, other, or absent
  misc_difference 245: note = a, c, g, u, unknown, other, or absent
  misc_difference 246: note = a, c, g, u, unknown, other, or absent
  misc_difference 247: note = a, c, g, u, unknown, other, or absent
  misc_difference 248: note = a, c, g, u, unknown, other, or absent
  misc_difference 249: note = a, c, g, u, unknown, other, or absent
  misc_difference 250: note = a, c, g, u, unknown, other, or absent
  misc_difference 251: note = a, c, g, u, unknown, other, or absent
  misc_difference 252: note = a, c, g, u, unknown, other, or absent
  misc_difference 253: note = a, c, g, u, unknown, other, or absent
  misc_difference 254: note = a, c, g, u, unknown, other, or absent
  misc_difference 255: note = a, c, g, u, unknown, other, or absent
  misc_difference 256: note = a, c, g, u, unknown, other, or absent
  misc_difference 257: note = a, c, g, u, unknown, other, or absent
  misc_difference 258: note = a, c, g, u, unknown, other, or absent
  misc_difference 259: note = a, c, g, u, unknown, other, or absent
  misc_difference 260: note = a, c, g, u, unknown, other, or absent
  misc_difference 261: note = a, c, g, u, unknown, other, or absent
  misc_difference 262: note = a, c, g, u, unknown, other, or absent
  misc_difference 263: note = a, c, g, u, unknown, other, or absent
  misc_difference 264: note = a, c, g, u, unknown, other, or absent
  misc_difference 265: note = a, c, g, u, unknown, other, or absent
  misc_difference 266: note = a, c, g, u, unknown, other, or absent
  misc_difference 267: note = a, c, g, u, unknown, other, or absent
  misc_difference 268: note = a, c, g, u, unknown, other, or absent
  misc_difference 269: note = a, c, g, u, unknown, other, or absent
  misc_difference 270: note = a, c, g, u, unknown, other, or absent
  misc_difference 271: note = a, c, g, u, unknown, other, or absent
  misc_difference 272: note = a, c, g, u, unknown, other, or absent
  misc_difference 273: note = a, c, g, u, unknown, other, or absent
  misc_difference 274: note = a, c, g, u, unknown, other, or absent
  misc_difference 275: note = a, c, g, u, unknown, other, or absent
  misc_difference 276: note = a, c, g, u, unknown, other, or absent
  misc_difference 277: note = a, c, g, u, unknown, other, or absent
  misc_difference 278: note = a, c, g, u, unknown, other, or absent
  misc_difference 279: note = a, c, g, u, unknown, other, or absent
  misc_difference 280: note = a, c, g, u, unknown, other, or absent
  misc_difference 281: note = a, c, g, u, unknown, other, or absent
  misc_difference 282: note = a, c, g, u, unknown, other, or absent
  misc_difference 283: note = a, c, g, u, unknown, other, or absent
  misc_difference 284: note = a, c, g, u, unknown, other, or absent
  misc_difference 285: note = a, c, g, u, unknown, other, or absent
  misc_difference 286: note = a, c, g, u, unknown, other, or absent
  misc_difference 287: note = a, c, g, u, unknown, other, or absent
  misc_difference 288: note = a, c, g, u, unknown, other, or absent
  misc_difference 289: note = a, c, g, u, unknown, other, or absent
  misc_difference 290: note = a, c, g, u, unknown, other, or absent
  misc_difference 291: note = a, c, g, u, unknown, other, or absent
  misc_difference 292: note = a, c, g, u, unknown, other, or absent
  misc_difference 293: note = a, c, g, u, unknown, other, or absent
  misc_difference 294: note = a, c, g, u, unknown, other, or absent
  misc_difference 295: note = a, c, g, u, unknown, other, or absent
  misc_difference 296: note = a, c, g, u, unknown, other, or absent
  misc_difference 297: note = a, c, g, u, unknown, other, or absent
  misc_difference 298: note = a, c, g, u, unknown, other, or absent
  misc_difference 299: note = a, c, g, u, unknown, other, or absent
  misc_difference 300: note = a, c, g, u, unknown, other, or absent
  misc_difference 301: note = a, c, g, u, unknown, other, or absent
  misc_difference 302: note = a, c, g, u, unknown, other, or absent
  misc_difference 303: note = a, c, g, u, unknown, other, or absent
  misc_difference 304: note = a, c, g, u, unknown, other, or absent
  misc_difference 305: note = a, c, g, u, unknown, other, or absent
  misc_difference 306: note = a, c, g, u, unknown, other, or absent
  misc_difference 307: note = a, c, g, u, unknown, other, or absent
  misc_difference 308: note = a, c, g, u, unknown, other, or absent
  misc_difference 309: note = a, c, g, u, unknown, other, or absent
  misc_difference 310: note = a, c, g, u, unknown, other, or absent
  misc_difference 311: note = a, c, g, u, unknown, other, or absent
  misc_difference 312: note = a, c, g, u, unknown, other, or absent
  misc_difference 313: note = a, c, g, u, unknown, other, or absent
  misc_difference 314: note = a, c, g, u, unknown, other, or absent
  misc_difference 315: note = a, c, g, u, unknown, other, or absent
  misc_difference 316: note = a, c, g, u, unknown, other, or absent
  misc_difference 317: note = May be absent
  misc_difference 318: note = May be absent
  misc_difference 319: note = May be absent
  misc_difference 320: note = May be absent
  misc_difference 321: note = May be absent
  misc_difference 322: note = May be absent
  misc_difference 323: note = May be absent
  misc_difference 324: note = May be absent
  misc_difference 325: note = May be absent
  misc_difference 326: note = May be absent
  misc_difference 327: note = May be absent
  misc_difference 328: note = May be absent
  misc_difference 329: note = May be absent
  misc_difference 330: note = May be absent
  misc_difference 331: note = May be absent
  misc_difference 332: note = May be absent
  misc_difference 333: note = May be absent
  misc_difference 334: note = May be absent
  misc_difference 335: note = May be absent
  misc_difference 336: note = May be absent
  misc_difference 337: note = May be absent
  misc_difference 338: note = May be absent
  misc_difference 339: note = May be absent
  misc_difference 340: note = May be absent
  misc_difference 341: note = May be absent
  misc_difference 46..317: note = This region may encompass 1-271 nucleotides
rtytcygtrghryvrtnggbytarhgcnttysryyrttwahbddannnnnnnnnnnnnnnnnnnnnnnnnnnnnnnnnnnnnnnnnnnnnnnnnnnnnnnnnnnnnnnnnnnnnnnnnnnnnnnnnnnnnnnnnnnnnnnnnnnnnnnnnnnnnnnnnnnnnnnnnnnnnnnnnnnnnnnnnnnnnnnnnnnnnnnnnnnnnnnnnnnnnnnnnnnnnnnnnnnnnnnnnnnnnnnnnnnnnnnnnnnnnnnnnnnnnnnnnnnnnnnnnnnnnnnnnnnnnnnnnnnnnnnnnnnnnnnnnnnnnnnnnnnnnnnrgtrgtkhvwdmcyayysvrrrrbr

SEQ ID NO: 570 - RNA, 341 nt, synthetic construct
  source 1..341: mol_type = other RNA
  misc_difference 1: note = May be absent
  misc_difference 2: note = May be absent
  misc_difference 3: note = May be absent
  misc_difference 4: note = May be absent
  misc_difference 5: note = May be absent
  misc_difference 6: note = May be absent
  misc_difference 7: note = May be absent
  misc_difference 8: note = May be absent
  misc_difference 9: note = May be absent
  misc_difference 10: note = May be absent
  misc_difference 11: note = May be absent
  misc_difference 12: note = May be absent
  misc_difference 13: note = May be absent
  misc_difference 14: note = May be absent
  misc_difference 15: note = May be absent
  misc_difference 16: note = May be absent
  misc_difference 17: note = May be absent
  misc_difference 18: note = May be absent
  misc_difference 19: note = May be absent
  misc_difference 20: note = May be absent
  misc_difference 21: note = May be absent
  misc_difference 22: note = May be absent
  misc_difference 23: note = May be absent
  misc_difference 24: note = May be absent
  misc_difference 25: note = May be absent
  misc_difference 26: note = May be absent
  misc_difference 27: note = May be absent
  misc_difference 28: note = May be absent
  misc_difference 29: note = May be absent
  misc_difference 30: note = May be absent
  misc_difference 31: note = May be absent
  misc_difference 32: note = May be absent
  misc_difference 33: note = May be absent
  misc_difference 34: note = May be absent
  misc_difference 35: note = May be absent
  misc_difference 36: note = May be absent
  misc_difference 37: note = May be absent
  misc_difference 38: note = May be absent
  misc_difference 39: note = May be absent
  misc_difference 40: note = May be absent
  misc_difference 41: note = May be absent
  misc_difference 42: note = May be absent
  misc_difference 43: note = May be absent
  misc_difference 44: note = May be absent
  misc_difference 45: note = May be absent
  misc_difference 46: note = a, c, g, u, unknown, other, or absent
  misc_difference 47: note = a, c, g, u, unknown, other, or absent
  misc_difference 48: note = a, c, g, u, unknown, other, or absent
  misc_difference 49: note = a, c, g, u, unknown, other, or absent
  misc_difference 50: note = a, c, g, u, unknown, other, or absent
  misc_difference 51: note = a, c, g, u, unknown, other, or absent
  misc_difference 52: note = a, c, g, u, unknown, other, or absent
  misc_difference 53: note = a, c, g, u, unknown, other, or absent
  misc_difference 54: note = a, c, g, u, unknown, other, or absent
  misc_difference 55: note = a, c, g, u, unknown, other, or absent
  misc_difference 56: note = a, c, g, u, unknown, other, or absent
  misc_difference 57: note = a, c, g, u, unknown, other, or absent
  misc_difference 58: note = a, c, g, u, unknown, other, or absent
  misc_difference 59: note = a, c, g, u, unknown, other, or absent
  misc_difference 60: note = a, c, g, u, unknown, other, or absent
  misc_difference 61: note = a, c, g, u, unknown, other, or absent
  misc_difference 62: note = a, c, g, u, unknown, other, or absent
  misc_difference 63: note = a, c, g, u, unknown, other, or absent
  misc_difference 64: note = a, c, g, u, unknown, other, or absent
  misc_difference 65: note = a, c, g, u, unknown, other, or absent
  misc_difference 66: note = a, c, g, u, unknown, other, or absent
  misc_difference 67: note = a, c, g, u, unknown, other, or absent
  misc_difference 68: note = a, c, g, u, unknown, other, or absent
  misc_difference 69: note = a, c, g, u, unknown, other, or absent
  misc_difference 70: note = a, c, g, u, unknown, other, or absent
  misc_difference 71: note = a, c, g, u, unknown, other, or absent
  misc_difference 72: note = a, c, g, u, unknown, other, or absent
  misc_difference 73: note = a, c, g, u, unknown, other, or absent
  misc_difference 74: note = a, c, g, u, unknown, other, or absent
  misc_difference 75: note = a, c, g, u, unknown, other, or absent
  misc_difference 76: note = a, c, g, u, unknown, other, or absent
  misc_difference 77: note = a, c, g, u, unknown, other, or absent
  misc_difference 78: note = a, c, g, u, unknown, other, or absent
  misc_difference 79: note = a, c, g, u, unknown, other, or absent
  misc_difference 80: note = a, c, g, u, unknown, other, or absent
  misc_difference 81: note = a, c, g, u, unknown, other, or absent
  misc_difference 82: note = a, c, g, u, unknown, other, or absent
  misc_difference 83: note = a, c, g, u, unknown, other, or absent
  misc_difference 84: note = a, c, g, u, unknown, other, or absent
  misc_difference 85: note = a, c, g, u, unknown, other, or absent
  misc_difference 86: note = a, c, g, u, unknown, other, or absent
  misc_difference 87: note = a, c, g, u, unknown, other, or absent
  misc_difference 88: note = a, c, g, u, unknown, other, or absent
  misc_difference 89: note = a, c, g, u, unknown, other, or absent
  misc_difference 90: note = a, c, g, u, unknown, other, or absent
  misc_difference 91: note = a, c, g, u, unknown, other, or absent
  misc_difference 92: note = a, c, g, u, unknown, other, or absent
  misc_difference 93: note = a, c, g, u, unknown, other, or absent
  misc_difference 94: note = a, c, g, u, unknown, other, or absent
  misc_difference 95: note = a, c, g, u, unknown, other, or absent
  misc_difference 96: note = a, c, g, u, unknown, other, or absent
  misc_difference 97: note = a, c, g, u, unknown, other, or absent
  misc_difference 98: note = a, c, g, u, unknown, other, or absent
  misc_difference 99: note = a, c, g, u, unknown, other, or absent
  misc_difference 100: note = a, c, g, u, unknown, other, or absent
  misc_difference 101: note = a, c, g, u, unknown, other, or absent
  misc_difference 102: note = a, c, g, u, unknown, other, or absent
  misc_difference 103: note = a, c, g, u, unknown, other, or absent
  misc_difference 104: note = a, c, g, u, unknown, other, or absent
  misc_difference 105: note = a, c, g, u, unknown, other, or absent
  misc_difference 106: note = a, c, g, u, unknown, other, or absent
  misc_difference 107: note = a, c, g, u, unknown, other, or absent
  misc_difference 108: note = a, c, g, u, unknown, other, or absent
  misc_difference 109: note = a, c, g, u, unknown, other, or absent
  misc_difference 110: note = a, c, g, u, unknown, other, or absent
  misc_difference 111: note = a, c, g, u, unknown, other, or absent
  misc_difference 112: note = a, c, g, u, unknown, other, or absent
  misc_difference 113: note = a, c, g, u, unknown, other, or absent
  misc_difference 114: note = a, c, g, u, unknown, other, or absent
  misc_difference 115: note = a, c, g, u, unknown, other, or absent
  misc_difference 116: note = a, c, g, u, unknown, other, or absent
  misc_difference 117: note = a, c, g, u, unknown, other, or absent
  misc_difference 118: note = a, c, g, u, unknown, other, or absent
  misc_difference 119: note = a, c, g, u, unknown, other, or absent
  misc_difference 120: note = a, c, g, u, unknown, other, or absent
  misc_difference 121: note = a, c, g, u, unknown, other, or absent
  misc_difference 122: note = a, c, g, u, unknown, other, or absent
  misc_difference 123: note = a, c, g, u, unknown, other, or absent
  misc_difference 124: note = a, c, g, u, unknown, other, or absent
  misc_difference 125: note = a, c, g, u, unknown, other, or absent
  misc_difference 126: note = a, c, g, u, unknown, other, or absent
  misc_difference 127: note = a, c, g, u, unknown, other, or absent
  misc_difference 128: note = a, c, g, u, unknown, other, or absent
  misc_difference 129: note = a, c, g, u, unknown, other, or absent
  misc_difference 130: note = a, c, g, u, unknown, other, or absent
  misc_difference 131: note = a, c, g, u, unknown, other, or absent
  misc_difference 132: note = a, c, g, u, unknown, other, or absent
  misc_difference 133: note = a, c, g, u, unknown, other, or absent
  misc_difference 134: note = a, c, g, u, unknown, other, or absent
  misc_difference 135: note = a, c, g, u, unknown, other, or absent
  misc_difference 136: note = a, c, g, u, unknown, other, or absent
  misc_difference 137: note = a, c, g, u, unknown, other, or absent
  misc_difference 138: note = a, c, g, u, unknown, other, or absent
  misc_difference 139: note = a, c, g, u, unknown, other, or absent
  misc_difference 140: note = a, c, g, u, unknown, other, or absent
  misc_difference 141: note = a, c, g, u, unknown, other, or absent
  misc_difference 142: note = a, c, g, u, unknown, other, or absent
  misc_difference 143: note = a, c, g, u, unknown, other, or absent
  misc_difference 144: note = a, c, g, u, unknown, other, or absent
  misc_difference 145: note = a, c, g, u, unknown, other, or absent
  misc_difference 146: note = a, c, g, u, unknown, other, or absent
  misc_difference 147: note = a, c, g, u, unknown, other, or absent
  misc_difference 148: note = a, c, g, u, unknown, other, or absent
  misc_difference 149: note = a, c, g, u, unknown, other, or absent
  misc_difference 150: note = a, c, g, u, unknown, other, or absent
  misc_difference 151: note = a, c, g, u, unknown, other, or absent
  misc_difference 152: note = a, c, g, u, unknown, other, or absent
  misc_difference 153: note = a, c, g, u, unknown, other, or absent
  misc_difference 154: note = a, c, g, u, unknown, other, or absent
  misc_difference 155: note = a, c, g, u, unknown, other, or absent
  misc_difference 156: note = a, c, g, u, unknown, other, or absent
  misc_difference 157: note = a, c, g, u, unknown, other, or absent
  misc_difference 158: note = a, c, g, u, unknown, other, or absent
  misc_difference 159: note = a, c, g, u, unknown, other, or absent
  misc_difference 160: note = a, c, g, u, unknown, other, or absent
  misc_difference 161: note = a, c, g, u, unknown, other, or absent
  misc_difference 162: note = a, c, g, u, unknown, other, or absent
  misc_difference 163: note = a, c, g, u, unknown, other, or absent
  misc_difference 164: note = a, c, g, u, unknown, other, or absent
  misc_difference 165: note = a, c, g, u, unknown, other, or absent
  misc_difference 166: note = a, c, g, u, unknown, other, or absent
  misc_difference 167: note = a, c, g, u, unknown, other, or absent
  misc_difference 168: note = a, c, g, u, unknown, other, or absent
  misc_difference 169: note = a, c, g, u, unknown, other, or absent
  misc_difference 170: note = a, c, g, u, unknown, other, or absent
  misc_difference 171: note = a, c, g, u, unknown, other, or absent
  misc_difference 172: note = a, c, g, u, unknown, other, or absent
  misc_difference 173: note = a, c, g, u, unknown, other, or absent
  misc_difference 174: note = a, c, g, u, unknown, other, or absent
  misc_difference 175: note = a, c, g, u, unknown, other, or absent
  misc_difference 176: note = a, c, g, u, unknown, other, or absent
  misc_difference 177: note = a, c, g, u, unknown, other, or absent
  misc_difference 178: note = a, c, g, u, unknown, other, or absent
  misc_difference 179: note = a, c, g, u, unknown, other, or absent
  misc_difference 180: note = a, c, g, u, unknown, other, or absent
  misc_difference 181: note = a, c, g, u, unknown, other, or absent
  misc_difference 182: note = a, c, g, u, unknown, other, or absent
  misc_difference 183: note = a, c, g, u, unknown, other, or absent
  misc_difference 184: note = a, c, g, u, unknown, other, or absent
  misc_difference 185: note = a, c, g, u, unknown, other, or absent
  misc_difference 186: note = a, c, g, u, unknown, other, or absent
  misc_difference 187: note = a, c, g, u, unknown, other, or absent
  misc_difference 188: note = a, c, g, u, unknown, other, or absent
  misc_difference 189: note = a, c, g, u, unknown, other, or absent
  misc_difference 190: note = a, c, g, u, unknown, other, or absent
  misc_difference 191: note = a, c, g, u, unknown, other, or absent
  misc_difference 192: note = a, c, g, u, unknown, other, or absent
  misc_difference 193: note = a, c, g, u, unknown, other, or absent
  misc_difference 194: note = a, c, g, u, unknown, other, or absent
  misc_difference 195: note = a, c, g, u, unknown, other, or absent
  misc_difference 196: note = a, c, g, u, unknown, other, or absent
  misc_difference 197: note = a, c, g, u, unknown, other, or absent
  misc_difference 198: note = a, c, g, u, unknown, other, or absent
  misc_difference 199: note = a, c, g, u, unknown, other, or absent
  misc_difference 200: note = a, c, g, u, unknown, other, or absent
  misc_difference 201: note = a, c, g, u, unknown, other, or absent
  misc_difference 202: note = a, c, g, u, unknown, other, or absent
  misc_difference 203: note = a, c, g, u, unknown, other, or absent
  misc_difference 204: note = a, c, g, u, unknown, other, or absent
  misc_difference 205: note = a, c, g, u, unknown, other, or absent
  misc_difference 206: note = a, c, g, u, unknown, other, or absent
  misc_difference 207: note = a, c, g, u, unknown, other, or absent
  misc_difference 208: note = a, c, g, u, unknown, other, or absent
  misc_difference 209: note = a, c, g, u, unknown, other, or absent
  misc_difference 210: note = a, c, g, u, unknown, other, or absent
  misc_difference 211: note = a, c, g, u, unknown, other, or absent
  misc_difference 212: note = a, c, g, u, unknown, other, or absent
  misc_difference 213: note = a, c, g, u, unknown, other, or absent
  misc_difference 214: note = a, c, g, u, unknown, other, or absent
  misc_difference 215: note = a, c, g, u, unknown, other, or absent
  misc_difference 216: note = a, c, g, u, unknown, other, or absent
  misc_difference 217: note = a, c, g, u, unknown, other, or absent
  misc_difference 218: note = a, c, g, u, unknown, other, or absent
  misc_difference 219: note = a, c, g, u, unknown, other, or absent
  misc_difference 220: note = a, c, g, u, unknown, other, or absent
  misc_difference 221: note = a, c, g, u, unknown, other, or absent
  misc_difference 222: note = a, c, g, u, unknown, other, or absent
  misc_difference 223: note = a, c, g, u, unknown, other, or absent
  misc_difference 224: note = a, c, g, u, unknown, other, or absent
  misc_difference 225: note = a, c, g, u, unknown, other, or absent
  misc_difference 226: note = a, c, g, u, unknown, other, or absent
  misc_difference 227: note = a, c, g, u, unknown, other, or absent
  misc_difference 228: note = a, c, g, u, unknown, other, or absent
  misc_difference 229: note = a, c, g, u, unknown, other, or absent
  misc_difference 230: note = a, c, g, u, unknown, other, or absent
  misc_difference 231: note = a, c, g, u, unknown, other, or absent
  misc_difference 232: note = a, c, g, u, unknown, other, or absent
  misc_difference 233: note = a, c, g, u, unknown, other, or absent
  misc_difference 234: note = a, c, g, u, unknown, other, or absent
  misc_difference 235: note = a, c, g, u, unknown, other, or absent
  misc_difference 236: note = a, c, g, u, unknown, other, or absent
  misc_difference 237: note = a, c, g, u, unknown, other, or absent
  misc_difference 238: note = a, c, g, u, unknown, other, or absent
  misc_difference 239: note = a, c, g, u, unknown, other, or absent
  misc_difference 240: note = a, c, g, u, unknown, other, or absent
  misc_difference 241: note = a, c, g, u, unknown, other, or absent
  misc_difference 242: note = a, c, g, u, unknown, other, or absent
  misc_difference 243: note = a, c, g, u, unknown, other, or absent
  misc_difference 244: note = a, c, g, u, unknown, other, or absent
  misc_difference 245: note = a, c, g, u, unknown, other, or absent
  misc_difference 246: note = a, c, g, u, unknown, other, or absent
  misc_difference 247: note = a, c, g, u, unknown, other, or absent
  misc_difference 248: note = a, c, g, u, unknown, other, or absent
  misc_difference 249: note = a, c, g, u, unknown, other, or absent
  misc_difference 250: note = a, c, g, u, unknown, other, or absent
  misc_difference 251: note = a, c, g, u, unknown, other, or absent
  misc_difference 252: note = a, c, g, u, unknown, other, or absent
  misc_difference 253: note = a, c, g, u, unknown, other, or absent
  misc_difference 254: note = a, c, g, u, unknown, other, or absent
  misc_difference 255: note = a, c, g, u, unknown, other, or absent
  misc_difference 256: note = a, c, g, u, unknown, other, or absent
  misc_difference 257: note = a, c, g, u, unknown, other, or absent
  misc_difference 258: note = a, c, g, u, unknown, other, or absent
  misc_difference 259: note = a, c, g, u, unknown, other, or absent
  misc_difference 260: note = a, c, g, u, unknown, other, or absent
  misc_difference 261: note = a, c, g, u, unknown, other, or absent
  misc_difference 262: note = a, c, g, u, unknown, other, or absent
  misc_difference 263: note = a, c, g, u, unknown, other, or absent
  misc_difference 264: note = a, c, g, u, unknown, other, or absent
  misc_difference 265: note = a, c, g, u, unknown, other, or absent
  misc_difference 266: note = a, c, g, u, unknown, other, or absent
  misc_difference 267: note = a, c, g, u, unknown, other, or absent
  misc_difference 268: note = a, c, g, u, unknown, other, or absent
  misc_difference 269: note = a, c, g, u, unknown, other, or absent
  misc_difference 270: note = a, c, g, u, unknown, other, or absent
  misc_difference 271: note = a, c, g, u, unknown, other, or absent
  misc_difference 272: note = a, c, g, u, unknown, other, or absent
  misc_difference 273: note = a, c, g, u, unknown, other, or absent
  misc_difference 274: note = a, c, g, u, unknown, other, or absent
  misc_difference 275: note = a, c, g, u, unknown, other, or absent
  misc_difference 276: note = a, c, g, u, unknown, other, or absent
  misc_difference 277: note = a, c, g, u, unknown, other, or absent
  misc_difference 278: note = a, c, g, u, unknown, other, or absent
  misc_difference 279: note = a, c, g, u, unknown, other, or absent
  misc_difference 280: note = a, c, g, u, unknown, other, or absent
  misc_difference 281: note = a, c, g, u, unknown, other, or absent
  misc_difference 282: note = a, c, g, u, unknown, other, or absent
  misc_difference 283: note = a, c, g, u, unknown, other, or absent
  misc_difference 284: note = a, c, g, u, unknown, other, or absent
  misc_difference 285: note = a, c, g, u, unknown, other, or absent
  misc_difference 286: note = a, c, g, u, unknown, other, or absent
  misc_difference 287: note = a, c, g, u, unknown, other, or absent
  misc_difference 288: note = a, c, g, u, unknown, other, or absent
  misc_difference 289: note = a, c, g, u, unknown, other, or absent
  misc_difference 290: note = a, c, g, u, unknown, other, or absent
  misc_difference 291: note = a, c, g, u, unknown, other, or absent
  misc_difference 292: note = a, c, g, u, unknown, other, or absent
  misc_difference 293: note = a, c, g, u, unknown, other, or absent
  misc_difference 294: note = a, c, g, u, unknown, other, or absent
  misc_difference 295: note = a, c, g, u, unknown, other, or absent
  misc_difference 296: note = a, c, g, u, unknown, other, or absent
  misc_difference 297: note = a, c, g, u, unknown, other, or absent
  misc_difference 298: note = a, c, g, u, unknown, other, or absent
  misc_difference 299: note = a, c, g, u, unknown, other, or absent
  misc_difference 300: note = a, c, g, u, unknown, other, or absent
  misc_difference 301: note = a, c, g, u, unknown, other, or absent
  misc_difference 302: note = a, c, g, u, unknown, other, or absent
  misc_difference 303: note = a, c, g, u, unknown, other, or absent
  misc_difference 304: note = a, c, g, u, unknown, other, or absent
  misc_difference 305: note = a, c, g, u, unknown, other, or absent
  misc_difference 306: note = a, c, g, u, unknown, other, or absent
  misc_difference 307: note = a, c, g, u, unknown, other, or absent
  misc_difference 308: note = a, c, g, u, unknown, other, or absent
  misc_difference 309: note = a, c, g, u, unknown, other, or absent
  misc_difference 310: note = a, c, g, u, unknown, other, or absent
  misc_difference 311: note = a, c, g, u, unknown, other, or absent
  misc_difference 312: note = a, c, g, u, unknown, other, or absent
  misc_difference 313: note = a, c, g, u, unknown, other, or absent
  misc_difference 314: note = a, c, g, u, unknown, other, or absent
  misc_difference 315: note = a, c, g, u, unknown, other, or absent
  misc_difference 316: note = a, c, g, u, unknown, other, or absent
  misc_difference 317: note = May be absent
  misc_difference 318: note = May be absent
  misc_difference 319: note = May be absent
  misc_difference 320: note = May be absent
  misc_difference 321: note = May be absent
  misc_difference 322: note = May be absent
  misc_difference 323: note = May be absent
  misc_difference 324: note = May be absent
  misc_difference 325: note = May be absent
  misc_difference 326: note = May be absent
  misc_difference 327: note = May be absent
  misc_difference 328: note = May be absent
  misc_difference 329: note = May be absent
  misc_difference 330: note = May be absent
  misc_difference 331: note = May be absent
  misc_difference 332: note = May be absent
  misc_difference 333: note = May be absent
  misc_difference 334: note = May be absent
  misc_difference 335: note = May be absent
  misc_difference 336: note = May be absent
  misc_difference 337: note = May be absent
  misc_difference 338: note = May be absent
  misc_difference 339: note = May be absent
  misc_difference 340: note = May be absent
  misc_difference 341: note = May be absent
  misc_difference 46..317: note = This region may encompass 1-271 nucleotides
rtytcygtrghryvrtbggbytaghgcbttysryyrttaahyddannnnnnnnnnnnnnnnnnnnnnnnnnnnnnnnnnnnnnnnnnnnnnnnnnnnnnnnnnnnnnnnnnnnnnnnnnnnnnnnnnnnnnnnnnnnnnnnnnnnnnnnnnnnnnnnnnnnnnnnnnnnnnnnnnnnnnnnnnnnnnnnnnnnnnnnnnnnnnnnnnnnnnnnnnnnnnnnnnnnnnnnnnnnnnnnnnnnnnnnnnnnnnnnnnnnnnnnnnnnnnnnnnnnnnnnnnnnnnnnnnnnnnnnnnnnnnnnnnnnnnnnnnnnnnnrgtrgtkhvwdmcyayysvrrrryg

SEQ ID NO: 571 - RNA, 342 nt, synthetic construct
  source 1..342: mol_type = other RNA
  misc_difference 1: note = May be absent
  misc_difference 2: note = a, c, g, u, unknown, other, or absent
  misc_difference 3: note = a, c, g, u, unknown, other, or absent
  misc_difference 4: note = a, c, g, u, unknown, other, or absent
  misc_difference 5: note = a, c, g, u, unknown, other, or absent
  misc_difference 6: note = a, c, g, u, unknown, other, or absent
  misc_difference 7: note = May be absent
  misc_difference 8: note = May be absent
  misc_difference 9: note = May be absent
  misc_difference 10: note = May be absent
  misc_difference 11: note = May be absent
  misc_difference 12: note = a, c, g, u, unknown, other, or absent
  misc_difference 13: note = May be absent
  misc_difference 14: note = May be absent
  misc_difference 15: note = May be absent
  misc_difference 16: note = a, c, g, u, unknown, other, or absent
  misc_difference 17: note = May be absent
  misc_difference 18: note = May be absent
  misc_difference 19: note = May be absent
  misc_difference 20: note = May be absent
  misc_difference 21: note = May be absent
  misc_difference 22: note = a, c, g, u, unknown, other, or absent
  misc_difference 23: note = May be absent
  misc_difference 24: note = May be absent
  misc_difference 25: note = May be absent
  misc_difference 26: note = a, c, g, u, unknown, other, or absent
  misc_difference 27: note = May be absent
  misc_difference 28: note = May be absent
  misc_difference 29: note = a, c, g, u, unknown, other, or absent
  misc_difference 30: note = May be absent
  misc_difference 31: note = a, c, g, u, unknown, other, or absent
  misc_difference 32: note = a, c, g, u, unknown, other, or absent
  misc_difference 33: note = May be absent
  misc_difference 34: note = May be absent
  misc_difference 35: note = May be absent
  misc_difference 36: note = May be absent
  misc_difference 37: note = May be absent
  misc_difference 38: note = May be absent
  misc_difference 39: note = May be absent
  misc_difference 40: note = May be absent
  misc_difference 41: note = May be absent
  misc_difference 42: note = May be absent
  misc_difference 43: note = May be absent
  misc_difference 44: note = a, c, g, u, unknown, other, or absent
  misc_difference 45: note = May be absent
  misc_difference 46: note = May be absent
  misc_difference 47: note = a, c, g, u, unknown, other, or absent
  misc_difference 48: note = a, c, g, u, unknown, other, or absent
  misc_difference 49: note = a, c, g, u, unknown, other, or absent
  misc_difference 50: note = a, c, g, u, unknown, other, or absent
  misc_difference 51: note = a, c, g, u, unknown, other, or absent
  misc_difference 52: note = a, c, g, u, unknown, other, or absent
  misc_difference 53: note = a, c, g, u, unknown, other, or absent
  misc_difference 54: note = a, c, g, u, unknown, other, or absent
  misc_difference 55: note = a, c, g, u, unknown, other, or absent
  misc_difference 56: note = a, c, g, u, unknown, other, or absent
  misc_difference 57: note = a, c, g, u, unknown, other, or absent
  misc_difference 58: note = a, c, g, u, unknown, other, or absent
  misc_difference 59: note = a, c, g, u, unknown, other, or absent
  misc_difference 60: note = a, c, g, u, unknown, other, or absent
  misc_difference 61: note = a, c, g, u, unknown, other, or absent
  misc_difference 62: note = a, c, g, u, unknown, other, or absent
  misc_difference 63: note = a, c, g, u, unknown, other, or absent
  misc_difference 64: note = a, c, g, u, unknown, other, or absent
  misc_difference 65: note = a, c, g, u, unknown, other, or absent
  misc_difference 66: note = a, c, g, u, unknown, other, or absent
  misc_difference 67: note = a, c, g, u, unknown, other, or absent
  misc_difference 68: note = a, c, g, u, unknown, other, or absent
  misc_difference 69: note = a, c, g, u, unknown, other, or absent
  misc_difference 70: note = a, c, g, u, unknown, other, or absent
  misc_difference 71: note = a, c, g, u, unknown, other, or absent
  misc_difference 72: note = a, c, g, u, unknown, other, or absent
  misc_difference 73: note = a, c, g, u, unknown, other, or absent
  misc_difference 74: note = a, c, g, u, unknown, other, or absent
  misc_difference 75: note = a, c, g, u, unknown, other, or absent
  misc_difference 76: note = a, c, g, u, unknown, other, or absent
  misc_difference 77: note = a, c, g, u, unknown, other, or absent
  misc_difference 78: note = a, c, g, u, unknown, other, or absent
  misc_difference 79: note = a, c, g, u, unknown, other, or absent
  misc_difference 80: note = a, c, g, u, unknown, other, or absent
  misc_difference 81: note = a, c, g, u, unknown, other, or absent
  misc_difference 82: note = a, c, g, u, unknown, other, or absent
  misc_difference 83: note = a, c, g, u, unknown, other, or absent
  misc_difference 84: note = a, c, g, u, unknown, other, or absent
  misc_difference 85: note = a, c, g, u, unknown, other, or absent
  misc_difference 86: note = a, c, g, u, unknown, other, or absent
  misc_difference 87: note = a, c, g, u, unknown, other, or absent
  misc_difference 88: note = a, c, g, u, unknown, other, or absent
  misc_difference 89: note = a, c, g, u, unknown, other, or absent
  misc_difference 90: note = a, c, g, u, unknown, other, or absent
  misc_difference 91: note = a, c, g, u, unknown, other, or absent
  misc_difference 92: note = a, c, g, u, unknown, other, or absent
  misc_difference 93: note = a, c, g, u, unknown, other, or absent
  misc_difference 94: note = a, c, g, u, unknown, other, or absent
  misc_difference 95: note = a, c, g, u, unknown, other, or absent
  misc_difference 96: note = a, c, g, u, unknown, other, or absent
  misc_difference 97: note = a, c, g, u, unknown, other, or absent
  misc_difference 98: note = a, c, g, u, unknown, other, or absent
  misc_difference 99: note = a, c, g, u, unknown, other, or absent
  misc_difference 100: note = a, c, g, u, unknown, other, or absent
  misc_difference 101: note = a, c, g, u, unknown, other, or absent
  misc_difference 102: note = a, c, g, u, unknown, other, or absent
  misc_difference 103: note = a, c, g, u, unknown, other, or absent
  misc_difference 104: note = a, c, g, u, unknown, other, or absent
  misc_difference 105: note = a, c, g, u, unknown, other, or absent
  misc_difference 106: note = a, c, g, u, unknown, other, or absent
  misc_difference 107: note = a, c, g, u, unknown, other, or absent
  misc_difference 108: note = a, c, g, u, unknown, other, or absent
  misc_difference 109: note = a, c, g, u, unknown, other, or absent
  misc_difference 110: note = a, c, g, u, unknown, other, or absent
  misc_difference 111: note = a, c, g, u, unknown, other, or absent
  misc_difference 112: note = a, c, g, u, unknown, other, or absent
  misc_difference 113: note = a, c, g, u, unknown, other, or absent
  misc_difference 114: note = a, c, g, u, unknown, other, or absent
  misc_difference 115: note = a, c, g, u, unknown, other, or absent
  misc_difference 116: note = a, c, g, u, unknown, other, or absent
  misc_difference 117: note = a, c, g, u, unknown, other, or absent
  misc_difference 118: note = a, c, g, u, unknown, other, or absent
  misc_difference 119: note = a, c, g, u, unknown, other, or absent
  misc_difference 120: note = a, c, g, u, unknown, other, or absent
  misc_difference 121: note = a, c, g, u, unknown, other, or absent
  misc_difference 122: note = a, c, g, u, unknown, other, or absent
  misc_difference 123: note = a, c, g, u, unknown, other, or absent
  misc_difference 124: note = a, c, g, u, unknown, other, or absent
  misc_difference 125: note = a, c, g, u, unknown, other, or absent
  misc_difference 126: note = a, c, g, u, unknown, other, or absent
  misc_difference 127: note = a, c, g, u, unknown, other, or absent
  misc_difference 128: note = a, c, g, u, unknown, other, or absent
  misc_difference 129: note = a, c, g, u, unknown, other, or absent
  misc_difference 130: note = a, c, g, u, unknown, other, or absent
  misc_difference 131: note = a, c, g, u, unknown, other, or absent
  misc_difference 132: note = a, c, g, u, unknown, other, or absent
  misc_difference 133: note = a, c, g, u, unknown, other, or absent
  misc_difference 134: note = a, c, g, u, unknown, other, or absent
  misc_difference 135: note = a, c, g, u, unknown, other, or absent
  misc_difference 136: note = a, c, g, u, unknown, other, or absent
  misc_difference 137: note = a, c, g, u, unknown, other, or absent
  misc_difference 138: note = a, c, g, u, unknown, other, or absent
  misc_difference 139: note = a, c, g, u, unknown, other, or absent
  misc_difference 140: note = a, c, g, u, unknown, other, or absent
  misc_difference 141: note = a, c, g, u, unknown, other, or absent
  misc_difference 142: note = a, c, g, u, unknown, other, or absent
  misc_difference 143: note = a, c, g, u, unknown, other, or absent
  misc_difference 144: note = a, c, g, u, unknown, other, or absent
  misc_difference 145: note = a, c, g, u, unknown, other, or absent
  misc_difference 146: note = a, c, g, u, unknown, other, or absent
  misc_difference 147: note = a, c, g, u, unknown, other, or absent
  misc_difference 148: note = a, c, g, u, unknown, other, or absent
  misc_difference 149: note = a, c, g, u, unknown, other, or absent
  misc_difference 150: note = a, c, g, u, unknown, other, or absent
  misc_difference 151: note = a, c, g, u, unknown, other, or absent
  misc_difference 152: note = a, c, g, u, unknown, other, or absent
  misc_difference 153: note = a, c, g, u, unknown, other, or absent
  misc_difference 154: note = a, c, g, u, unknown, other, or absent
  misc_difference 155: note = a, c, g, u, unknown, other, or absent
  misc_difference 156: note = a, c, g, u, unknown, other, or absent
  misc_difference 157: note = a, c, g, u, unknown, other, or absent
  misc_difference 158: note = a, c, g, u, unknown, other, or absent
  misc_difference 159: note = a, c, g, u, unknown, other, or absent
  misc_difference 160: note = a, c, g, u, unknown, other, or absent
  misc_difference 161: note = a, c, g, u, unknown, other, or absent
  misc_difference 162: note = a, c, g, u, unknown, other, or absent
  misc_difference 163: note = a, c, g, u, unknown, other, or absent
  misc_difference 164: note = a, c, g, u, unknown, other, or absent
  misc_difference 165: note = a, c, g, u, unknown, other, or absent
  misc_difference 166: note = a, c, g, u, unknown, other, or absent
  misc_difference 167: note = a, c, g, u, unknown, other, or absent
  misc_difference 168: note = a, c, g, u, unknown, other, or absent
  misc_difference 169: note = a, c, g, u, unknown, other, or absent
  misc_difference 170: note = a, c, g, u, unknown, other, or absent
  misc_difference 171: note = a, c, g, u, unknown, other, or absent
  misc_difference 172: note = a, c, g, u, unknown, other, or absent
  misc_difference 173: note = a, c, g, u, unknown, other, or absent
  misc_difference 174: note = a, c, g, u, unknown, other, or absent
  misc_difference 175: note = a, c, g, u, unknown, other, or absent
  misc_difference 176: note = a, c, g, u, unknown, other, or absent
  misc_difference 177: note = a, c, g, u, unknown, other, or absent
  misc_difference 178: note = a, c, g, u, unknown, other, or absent
  misc_difference 179: note = a, c, g, u, unknown, other, or absent
  misc_difference 180: note = a, c, g, u, unknown, other, or absent
  misc_difference 181: note = a, c, g, u, unknown, other, or absent
  misc_difference 182: note = a, c, g, u, unknown, other, or absent
  misc_difference 183: note = a, c, g, u, unknown, other, or absent
  misc_difference 184: note = a, c, g, u, unknown, other, or absent
  misc_difference 185: note = a, c, g, u, unknown, other, or absent
  misc_difference 186: note = a, c, g, u, unknown, other, or absent
  misc_difference 187: note = a, c, g, u, unknown, other, or absent
  misc_difference 188: note = a, c, g, u, unknown, other, or absent
  misc_difference 189: note = a, c, g, u, unknown, other, or absent
  misc_difference 190: note = a, c, g, u, unknown, other, or absent
  misc_difference 191: note = a, c, g, u, unknown, other, or absent
  misc_difference 192: note = a, c, g, u, unknown, other, or absent
  misc_difference 193: note = a, c, g, u, unknown, other, or absent
  misc_difference 194: note = a, c, g, u, unknown, other, or absent
  misc_difference 195: note = a, c, g, u, unknown, other, or absent
  misc_difference 196: note = a, c, g, u, unknown, other, or absent
  misc_difference 197: note = a, c, g, u, unknown, other, or absent
  misc_difference 198: note = a, c, g, u, unknown, other, or absent
  misc_difference 199: note = a, c, g, u, unknown, other, or absent
  misc_difference 200: note = a, c, g, u, unknown, other, or absent
  misc_difference 201: note = a, c, g, u, unknown, other, or absent
  misc_difference 202: note = a, c, g, u, unknown, other, or absent
  misc_difference 203: note = a, c, g, u, unknown, other, or absent
  misc_difference 204: note = a, c, g, u, unknown, other, or absent
  misc_difference 205: note = a, c, g, u, unknown, other, or absent
  misc_difference 206: note = a, c, g, u, unknown, other, or absent
  misc_difference 207: note = a, c, g, u, unknown, other, or absent
  misc_difference 208: note = a, c, g, u, unknown, other, or absent
  misc_difference 209: note = a, c, g, u, unknown, other, or absent
  misc_difference 210: note = a, c, g, u, unknown, other, or absent
  misc_difference 211: note = a, c, g, u, unknown, other, or absent
  misc_difference 212: note = a, c, g, u, unknown, other, or absent
  misc_difference 213: note = a, c, g, u, unknown, other, or absent
  misc_difference 214: note = a, c, g, u, unknown, other, or absent
  misc_difference 215: note = a, c, g, u, unknown, other, or absent
  misc_difference 216: note = a, c, g, u, unknown, other, or absent
  misc_difference 217: note = a, c, g, u, unknown, other, or absent
  misc_difference 218: note = a, c, g, u, unknown, other, or absent
  misc_difference 219: note = a, c, g, u, unknown, other, or absent
  misc_difference 220: note = a, c, g, u, unknown, other, or absent
  misc_difference 221: note = a, c, g, u, unknown, other, or absent
  misc_difference 222: note = a, c, g, u, unknown, other, or absent
  misc_difference 223: note = a, c, g, u, unknown, other, or absent
  misc_difference 224: note = a, c, g, u, unknown, other, or absent
  misc_difference 225: note = a, c, g, u, unknown, other, or absent
  misc_difference 226: note = a, c, g, u, unknown, other, or absent
  misc_difference 227: note = a, c, g, u, unknown, other, or absent
  misc_difference 228: note = a, c, g, u, unknown, other, or absent
  misc_difference 229: note = a, c, g, u, unknown, other, or absent
  misc_difference 230: note = a, c, g, u, unknown, other, or absent
  misc_difference 231: note = a, c, g, u, unknown, other, or absent
  misc_difference 232: note = a, c, g, u, unknown, other, or absent
  misc_difference 233: note = a, c, g, u, unknown, other, or absent
  misc_difference 234: note = a, c, g, u, unknown, other, or absent
  misc_difference 235: note = a, c, g, u, unknown, other, or absent
  misc_difference 236: note = a, c, g, u, unknown, other, or absent
  misc_difference 237: note = a, c, g, u, unknown, other, or absent
  misc_difference 238: note = a, c, g, u, unknown, other, or absent
  misc_difference 239: note = a, c, g, u, unknown, other, or absent
  misc_difference 240: note = a, c, g, u, unknown, other, or absent
  misc_difference 241: note = a, c, g, u, unknown, other, or absent
  misc_difference 242: note = a, c, g, u, unknown, other, or absent
  misc_difference 243: note = a, c, g, u, unknown, other, or absent
  misc_difference 244: note = a, c, g, u, unknown, other, or absent
  misc_difference 245: note = a, c, g, u, unknown, other, or absent
  misc_difference 246: note = a, c, g, u, unknown, other, or absent
  misc_difference 247: note = a, c, g, u, unknown, other, or absent
  misc_difference 248: note = a, c, g, u, unknown, other, or absent
  misc_difference 249: note = a, c, g, u, unknown, other, or absent
  misc_difference 250: note = a, c, g, u, unknown, other, or absent
  misc_difference 251: note = a, c, g, u, unknown, other, or absent
  misc_difference 252: note = a, c, g, u, unknown, other, or absent
  misc_difference 253: note = a, c, g, u, unknown, other, or absent
  misc_difference 254: note = a, c, g, u, unknown, other, or absent
  misc_difference 255: note = a, c, g, u, unknown, other, or absent
  misc_difference 256: note = a, c, g, u, unknown, other, or absent
  misc_difference 257: note = a, c, g, u, unknown, other, or absent
  misc_difference 258: note = a, c, g, u, unknown, other, or absent
  misc_difference 259: note = a, c, g, u, unknown, other, or absent
  misc_difference 260: note = a, c, g, u, unknown, other, or absent
  misc_difference 261: note = a, c, g, u, unknown, other, or absent
  misc_difference 262: note = a, c, g, u, unknown, other, or absent
  misc_difference 263: note = a, c, g, u, unknown, other, or absent
  misc_difference 264: note = a, c, g, u, unknown, other, or absent
  misc_difference 265: note = a, c, g, u, unknown, other, or absent
  misc_difference 266: note = a, c, g, u, unknown, other, or absent
  misc_difference 267: note = a, c, g, u, unknown, other, or absent
  misc_difference 268: note = a, c, g, u, unknown, other, or absent
  misc_difference 269: note = a, c, g, u, unknown, other, or absent
  misc_difference 270: note = a, c, g, u, unknown, other, or absent
  misc_difference 271: note = a, c, g, u, unknown, other, or absent
  misc_difference 272: note = a, c, g, u, unknown, other, or absent
  misc_difference 273: note = a, c, g, u, unknown, other, or absent
  misc_difference 274: note = a, c, g, u, unknown, other, or absent
  misc_difference 275: note = a, c, g, u, unknown, other, or absent
  misc_difference 276: note = a, c, g, u, unknown, other, or absent
  misc_difference 277: note = a, c, g, u, unknown, other, or absent
  misc_difference 278: note = a, c, g, u, unknown, other, or absent
  misc_difference 279: note = a, c, g, u, unknown, other, or absent
  misc_difference 280: note = a, c, g, u, unknown, other, or absent
  misc_difference 281: note = a, c, g, u, unknown, other, or absent
  misc_difference 282: note = a, c, g, u, unknown, other, or absent
  misc_difference 283: note = a, c, g, u, unknown, other, or absent
  misc_difference 284: note = a, c, g, u, unknown, other, or absent
  misc_difference 285: note = a, c, g, u, unknown, other, or absent
  misc_difference 286: note = a, c, g, u, unknown, other, or absent
  misc_difference 287: note = a, c, g, u, unknown, other, or absent
  misc_difference 288: note = a, c, g, u, unknown, other, or absent
  misc_difference 289: note = a, c, g, u, unknown, other, or absent
  misc_difference 290: note = a, c, g, u, unknown, other, or absent
  misc_difference 291: note = a, c, g, u, unknown, other, or absent
  misc_difference 292: note = a, c, g, u, unknown, other, or absent
  misc_difference 293: note = a, c, g, u, unknown, other, or absent
  misc_difference 294: note = a, c, g, u, unknown, other, or absent
  misc_difference 295: note = a, c, g, u, unknown, other, or absent
  misc_difference 296: note = a, c, g, u, unknown, other, or absent
  misc_difference 297: note = a, c, g, u, unknown, other, or absent
  misc_difference 298: note = a, c, g, u, unknown, other, or absent
  misc_difference 299: note = a, c, g, u, unknown, other, or absent
  misc_difference 300: note = a, c, g, u, unknown, other, or absent
  misc_difference 301: note = a, c, g, u, unknown, other, or absent
  misc_difference 302: note = a, c, g, u, unknown, other, or absent
  misc_difference 303: note = a, c, g, u, unknown, other, or absent
  misc_difference 304: note = a, c, g, u, unknown, other, or absent
  misc_difference 305: note = a, c, g, u, unknown, other, or absent
  misc_difference 306: note = a, c, g, u, unknown, other, or absent
  misc_difference 307: note = a, c, g, u, unknown, other, or absent
  misc_difference 308: note = a, c, g, u, unknown, other, or absent
  misc_difference 309: note = a, c, g, u, unknown, other, or absent
  misc_difference 310: note = a, c, g, u, unknown, other, or absent
  misc_difference 311: note = a, c, g, u, unknown, other, or absent
  misc_difference 312: note = a, c, g, u, unknown, other, or absent
  misc_difference 313: note = a, c, g, u, unknown, other, or absent
  misc_difference 314: note = a, c, g, u, unknown, other, or absent
  misc_difference 315: note = a, c, g, u, unknown, other, or absent
  misc_difference 316: note = a, c, g, u, unknown, other, or absent
  misc_difference 317: note = a, c, g, u, unknown, other, or absent
  misc_difference 318: note = a, c, g, u, unknown, other, or absent
  misc_difference 319: note = a, c, g, u, unknown, other, or absent
  misc_difference 320: note = May be absent
  misc_difference 321: note = May be absent
  misc_difference 322: note = May be absent
  misc_difference 323: note = May be absent
  misc_difference 324: note = May be absent
  misc_difference 325: note = May be absent
  misc_difference 326: note = May be absent
  misc_difference 327: note = May be absent
  misc_difference 328: note = a, c, g, u, unknown, other, or absent
  misc_difference 329: note = May be absent
  misc_difference 330: note = May be absent
  misc_difference 331: note = May be absent
  misc_difference 332: note = May be absent
  misc_difference 333: note = a, c, g, u, unknown, other, or absent
  misc_difference 334: note = a, c, g, u, unknown, other, or absent
  misc_difference 335: note = May be absent
  misc_difference 336: note = a, c, g, u, unknown, other, or absent
  misc_difference 337: note = a, c, g, u, unknown, other, or absent
  misc_difference 338: note = a, c, g, u, unknown, other, or absent
  misc_difference 339: note = a, c, g, u, unknown, other, or absent
  misc_difference 340: note = May be absent
  misc_difference 341: note = May be absent
  misc_difference 342: note = May be absent
  misc_difference 47..318: note = This region may encompass 1-271 nucleotides
knnnnndyrrynhrrnyygrhntmdnrynbnnvhytrtcrhdbnbvnnnnnnnnnnnnnnnnnnnnnnnnnnnnnnnnnnnnnnnnnnnnnnnnnnnnnnnnnnnnnnnnnnnnnnnnnnnnnnnnnnnnnnnnnnnnnnnnnnnnnnnnnnnnnnnnnnnnnnnnnnnnnnnnnnnnnnnnnnnnnnnnnnnnnnnnnnnnnnnnnnnnnnnnnnnnnnnnnnnnnnnnnnnnnnnnnnnnnnnnnnnnnnnnnnnnnnnnnnnnnnnnnnnnnnnnnnnnnnnnnnnnnnnnnnnnnnnnnnnnnnnnnnnnnnnnnsrgytbrhnyyysnnhnnnnbmr

SEQ ID NO: 572 - RNA, 339 nt, synthetic construct
  source 1..339: mol_type = other RNA
  misc_difference 1: note = May be absent
  misc_difference 2: note = a, c, g, u, unknown, other, or absent
  misc_difference 3: note = May be absent
  misc_difference 4: note = May be absent
  misc_difference 5: note = May be absent
  misc_difference 6: note = a, c, g, u, unknown, other, or absent
  misc_difference 7: note = May be absent
  misc_difference 8: note = May be absent
  misc_difference 9: note = May be absent
  misc_difference 10: note = May be absent
  misc_difference 11: note = May be absent
  misc_difference 12: note = May be absent
  misc_difference 13: note = May be absent
  misc_difference 14: note = May be absent
  misc_difference 15: note = May be absent
  misc_difference 16: note = May be absent
  misc_difference 17: note = May be absent
  misc_difference 18: note = May be absent
  misc_difference 19: note = May be absent
  misc_difference 20: note = May be absent
  misc_difference 21: note = May be absent
  misc_difference 22: note = May be absent
  misc_difference 23: note = May be absent
  misc_difference 24: note = May be absent
  misc_difference 25: note = May be absent
  misc_difference 26: note = May be absent
  misc_difference 27: note = May be absent
  misc_difference 28: note = May be absent
  misc_difference 29: note = May be absent
  misc_difference 30: note = May be absent
  misc_difference 31: note = May be absent
  misc_difference 32: note = May be absent
  misc_difference 33: note = May be absent
  misc_difference 34: note = May be absent
  misc_difference 35: note = May be absent
  misc_difference 36: note = May be absent
  misc_difference 37: note = May be absent
  misc_difference 38: note = May be absent
  misc_difference 39: note = May be absent
  misc_difference 40: note = May be absent
  misc_difference 41: note = May be absent
  misc_difference 42: note = May be absent
  misc_difference 43: note = May be absent
  misc_difference 44: note = a, c, g, u, unknown, other, or absent
  misc_difference 45: note = a, c, g, u, unknown, other, or absent
  misc_difference 46: note = a, c, g, u, unknown, other, or absent
  misc_difference 47: note = a, c, g, u, unknown, other, or absent
  misc_difference 48: note = a, c, g, u, unknown, other, or absent
  misc_difference 49: note = a, c, g, u, unknown, other, or absent
  misc_difference 50: note = a, c, g, u, unknown, other, or absent
  misc_difference 51: note = a, c, g, u, unknown, other, or absent
  misc_difference 52: note = a, c, g, u, unknown, other, or absent
  misc_difference 53: note = a, c, g, u, unknown, other, or absent
  misc_difference 54: note = a, c, g, u, unknown, other, or absent
  misc_difference 55: note = a, c, g, u, unknown, other, or absent
  misc_difference 56: note = a, c, g, u, unknown, other, or absent
  misc_difference 57: note = a, c, g, u, unknown, other, or absent
  misc_difference 58: note = a, c, g, u, unknown, other, or absent
  misc_difference 59: note = a, c, g, u, unknown, other, or absent
  misc_difference 60: note = a, c, g, u, unknown, other, or absent
  misc_difference 61: note = a, c, g, u, unknown, other, or absent
  misc_difference 62: note = a, c, g, u, unknown, other, or absent
  misc_difference 63: note = a, c, g, u, unknown, other, or absent
  misc_difference 64: note = a, c, g, u, unknown, other, or absent
  misc_difference 65: note = a, c, g, u, unknown, other, or absent
  misc_difference 66: note = a, c, g, u, unknown, other, or absent
  misc_difference 67: note = a, c, g, u, unknown, other, or absent
  misc_difference 68: note = a, c, g, u, unknown, other, or absent
  misc_difference 69: note = a, c, g, u, unknown, other, or absent
  misc_difference 70: note = a, c, g, u, unknown, other, or absent
  misc_difference 71: note = a, c, g, u, unknown, other, or absent
  misc_difference 72: note = a, c, g, u, unknown, other, or absent
  misc_difference 73: note = a, c, g, u, unknown, other, or absent
  misc_difference 74: note = a, c, g, u, unknown, other, or absent
  misc_difference 75: note = a, c, g, u, unknown, other, or absent
  misc_difference 76: note = a, c, g, u, unknown, other, or absent
  misc_difference 77: note = a, c, g, u, unknown, other, or absent
  misc_difference 78: note = a, c, g, u, unknown, other, or absent
  misc_difference 79: note = a, c, g, u, unknown, other, or absent
  misc_difference 80: note = a, c, g, u, unknown, other, or absent
  misc_difference 81: note = a, c, g, u, unknown, other, or absent
  misc_difference 82: note = a, c, g, u, unknown, other, or absent
  misc_difference 83: note = a, c, g, u, unknown, other, or absent
  misc_difference 84: note = a, c, g, u, unknown, other, or absent
  misc_difference 85: note = a, c, g, u, unknown, other, or absent
  misc_difference 86: note = a, c, g, u, unknown, other, or absent
  misc_difference 87: note = a, c, g, u, unknown, other, or absent
  misc_difference 88: note = a, c, g, u, unknown, other, or absent
  misc_difference 89: note = a, c, g, u, unknown, other, or absent
  misc_difference 90: note = a, c, g, u, unknown, other, or absent
  misc_difference 91: note = a, c, g, u, unknown, other, or absent
  misc_difference 92: note = a, c, g, u, unknown, other, or absent
  misc_difference 93: note = a, c, g, u, unknown, other, or absent
  misc_difference 94: note = a, c, g, u, unknown, other, or absent
  misc_difference 95: note = a, c, g, u, unknown, other, or absent
  misc_difference 96: note = a, c, g, u, unknown, other, or absent
  misc_difference 97: note = a, c, g, u, unknown, other, or absent
  misc_difference 98: note = a, c, g, u, unknown, other, or absent
  misc_difference 99: note = a, c, g, u, unknown, other, or absent
  misc_difference 100: note = a, c, g, u, unknown, other, or absent
  misc_difference 101: note = a, c, g, u, unknown, other, or absent
  misc_difference 102: note = a, c, g, u, unknown, other, or absent
  misc_difference 103: note = a, c, g, u, unknown, other, or absent
  misc_difference 104: note = a, c, g, u, unknown, other, or absent
  misc_difference 105: note = a, c, g, u, unknown, other, or absent
  misc_difference 106: note = a, c, g, u, unknown, other, or absent
  misc_difference 107: note = a, c, g, u, unknown, other, or absent
  misc_difference 108: note = a, c, g, u, unknown, other, or absent
  misc_difference 109: note = a, c, g, u, unknown, other, or absent
  misc_difference 110: note = a, c, g, u, unknown, other, or absent
  misc_difference 111: note = a, c, g, u, unknown, other, or absent
  misc_difference 112: note = a, c, g, u, unknown, other, or absent
  misc_difference 113: note = a, c, g, u, unknown, other, or absent
  misc_difference 114: note = a, c, g, u, unknown, other, or absent
  misc_difference 115: note = a, c, g, u, unknown, other, or absent
  misc_difference 116: note = a, c, g, u, unknown, other, or absent
  misc_difference 117: note = a, c, g, u, unknown, other, or absent
  misc_difference 118: note = a, c, g, u, unknown, other, or absent
  misc_difference 119: note = a, c, g, u, unknown, other, or absent
  misc_difference 120: note = a, c, g, u, unknown, other, or absent
  misc_difference 121: note = a, c, g, u, unknown, other, or absent
  misc_difference 122: note = a, c, g, u, unknown, other, or absent
  misc_difference 123: note = a, c, g, u, unknown, other, or absent
  misc_difference 124: note = a, c, g, u, unknown, other, or absent
  misc_difference 125: note = a, c, g, u, unknown, other, or absent
  misc_difference 126: note = a, c, g, u, unknown, other, or absent
  misc_difference 127: note = a, c, g, u, unknown, other, or absent
  misc_difference 128: note = a, c, g, u, unknown, other, or absent
  misc_difference 129: note = a, c, g, u, unknown, other, or absent
  misc_difference 130: note = a, c, g, u, unknown, other, or absent
  misc_difference 131: note = a, c, g, u, unknown, other, or absent
  misc_difference 132: note = a, c, g, u, unknown, other, or absent
  misc_difference 133: note = a, c, g, u, unknown, other, or absent
  misc_difference 134: note = a, c, g, u, unknown, other, or absent
  misc_difference 135: note = a, c, g, u, unknown, other, or absent
  misc_difference 136: note = a, c, g, u, unknown, other, or absent
  misc_difference 137: note = a, c, g, u, unknown, other, or absent
  misc_difference 138: note = a, c, g, u, unknown, other, or absent
  misc_difference 139: note = a, c, g, u, unknown, other, or absent
  misc_difference 140: note = a, c, g, u, unknown, other, or absent
  misc_difference 141: note = a, c, g, u, unknown, other, or absent
  misc_difference 142: note = a, c, g, u, unknown, other, or absent
  misc_difference 143: note = a, c, g, u, unknown, other, or absent
  misc_difference 144: note = a, c, g, u, unknown, other, or absent
  misc_difference 145: note = a, c, g, u, unknown, other, or absent
  misc_difference 146: note = a, c, g, u, unknown, other, or absent
  misc_difference 147: note = a, c, g, u, unknown, other, or absent
  misc_difference 148: note = a, c, g, u, unknown, other, or absent
  misc_difference 149: note = a, c, g, u, unknown, other, or absent
  misc_difference 150: note = a, c, g, u, unknown, other, or absent
  misc_difference 151: note = a, c, g, u, unknown, other, or absent
  misc_difference 152: note = a, c, g, u, unknown, other, or absent
  misc_difference 153: note = a, c, g, u, unknown, other, or absent
  misc_difference 154: note = a, c, g, u, unknown, other, or absent
  misc_difference 155: note = a, c, g, u, unknown, other, or absent
  misc_difference 156: note = a, c, g, u, unknown, other, or absent
  misc_difference 157: note = a, c, g, u, unknown, other, or absent
  misc_difference 158: note = a, c, g, u, unknown, other, or absent
  misc_difference 159: note = a, c, g, u, unknown, other, or absent
  misc_difference 160: note = a, c, g, u, unknown, other, or absent
  misc_difference 161: note = a, c, g, u, unknown, other, or absent
  misc_difference 162: note = a, c, g, u, unknown, other, or absent
  misc_difference 163: note = a, c, g, u, unknown, other, or absent
  misc_difference 164: note = a, c, g, u, unknown, other, or absent
  misc_difference 165: note = a, c, g, u, unknown, other, or absent
  misc_difference 166: note = a, c, g, u, unknown, other, or absent
  misc_difference 167: note = a, c, g, u, unknown, other, or absent
  misc_difference 168: note = a, c, g, u, unknown, other, or absent
  misc_difference 169: note = a, c, g, u, unknown, other, or absent
  misc_difference 170: note = a, c, g, u, unknown, other, or absent
  misc_difference 171: note = a, c, g, u, unknown, other, or absent
  misc_difference 172: note = a, c, g, u, unknown, other, or absent
  misc_difference 173: note = a, c, g, u, unknown, other, or absent
  misc_difference 174: note = a, c, g, u, unknown, other, or absent
  misc_difference 175: note = a, c, g, u, unknown, other, or absent
  misc_difference 176: note = a, c, g, u, unknown, other, or absent
  misc_difference 177: note = a, c, g, u, unknown, other, or absent
  misc_difference 178: note = a, c, g, u, unknown, other, or absent
  misc_difference 179: note = a, c, g, u, unknown, other, or absent
  misc_difference 180: note = a, c, g, u, unknown, other, or absent
  misc_difference 181: note = a, c, g, u, unknown, other, or absent
  misc_difference 182: note = a, c, g, u, unknown, other, or absent
  misc_difference 183: note = a, c, g, u, unknown, other, or absent
  misc_difference 184: note = a, c, g, u, unknown, other, or absent
  misc_difference 185: note = a, c, g, u, unknown, other, or absent
  misc_difference 186: note = a, c, g, u, unknown, other, or absent
  misc_difference 187: note = a, c, g, u, unknown, other, or absent
  misc_difference 188: note = a, c, g, u, unknown, other, or absent
  misc_difference 189: note = a, c, g, u, unknown, other, or absent
  misc_difference 190: note = a, c, g, u, unknown, other, or absent
  misc_difference 191: note = a, c, g, u, unknown, other, or absent
  misc_difference 192: note = a, c, g, u, unknown, other, or absent
  misc_difference 193: note = a, c, g, u, unknown, other, or absent
  misc_difference 194: note = a, c, g, u, unknown, other, or absent
  misc_difference 195: note = a, c, g, u, unknown, other, or absent
  misc_difference 196: note = a, c, g, u, unknown, other, or absent
  misc_difference 197: note = a, c, g, u, unknown, other, or absent
  misc_difference 198: note = a, c, g, u, unknown, other, or absent
  misc_difference 199: note = a, c, g, u, unknown, other, or absent
  misc_difference 200: note = a, c, g, u, unknown, other, or absent
  misc_difference 201: note = a, c, g, u, unknown, other, or absent
  misc_difference 202: note = a, c, g, u, unknown, other, or absent
  misc_difference 203: note = a, c, g, u, unknown, other, or absent
  misc_difference 204: note = a, c, g, u, unknown, other, or absent
  misc_difference 205: note = a, c, g, u, unknown, other, or absent
  misc_difference 206: note = a, c, g, u, unknown, other, or absent
  misc_difference 207: note = a, c, g, u, unknown, other, or absent
  misc_difference 208: note = a, c, g, u, unknown, other, or absent
  misc_difference 209: note = a, c, g, u, unknown, other, or absent
  misc_difference 210: note = a, c, g, u, unknown, other, or absent
  misc_difference 211: note = a, c, g, u, unknown, other, or absent
  misc_difference 212: note = a, c, g, u, unknown, other, or absent
  misc_difference 213: note = a, c, g, u, unknown, other, or absent
  misc_difference 214: note = a, c, g, u, unknown, other, or absent
  misc_difference 215: note = a, c, g, u, unknown, other, or absent
  misc_difference 216: note = a, c, g, u, unknown, other, or absent
  misc_difference 217: note = a, c, g, u, unknown, other, or absent
  misc_difference 218: note = a, c, g, u, unknown, other, or absent
  misc_difference 219: note = a, c, g, u, unknown, other, or absent
  misc_difference 220: note = a, c, g, u, unknown, other, or absent
  misc_difference 221: note = a, c, g, u, unknown, other, or absent
  misc_difference 222: note = a, c, g, u, unknown, other, or absent
  misc_difference 223: note = a, c, g, u, unknown, other, or absent
  misc_difference 224: note = a, c, g, u, unknown, other, or absent
  misc_difference 225: note = a, c, g, u, unknown, other, or absent
  misc_difference 226: note = a, c, g, u, unknown, other, or absent
  misc_difference 227: note = a, c, g, u, unknown, other, or absent
  misc_difference 228: note = a, c, g, u, unknown, other, or absent
  misc_difference 229: note = a, c, g, u, unknown, other, or absent
  misc_difference 230: note = a, c, g, u, unknown, other, or absent
  misc_difference 231: note = a, c, g, u, unknown, other, or absent
  misc_difference 232: note = a, c, g, u, unknown, other, or absent
  misc_difference 233: note = a, c, g, u, unknown, other, or absent
  misc_difference 234: note = a, c, g, u, unknown, other, or absent
  misc_difference 235: note = a, c, g, u, unknown, other, or absent
  misc_difference 236: note = a, c, g, u, unknown, other, or absent
  misc_difference 237: note = a, c, g, u, unknown, other, or absent
  misc_difference 238: note = a, c, g, u, unknown, other, or absent
  misc_difference 239: note = a, c, g, u, unknown, other, or absent
  misc_difference 240: note = a, c, g, u, unknown, other, or absent
  misc_difference 241: note = a, c, g, u, unknown, other, or absent
  misc_difference 242: note = a, c, g, u, unknown, other, or absent
  misc_difference 243: note = a, c, g, u, unknown, other, or absent
  misc_difference 244: note = a, c, g, u, unknown, other, or absent
  misc_difference 245: note = a, c, g, u, unknown, other, or absent
  misc_difference 246: note = a, c, g, u, unknown, other, or absent
  misc_difference 247: note = a, c, g, u, unknown, other, or absent
  misc_difference 248: note = a, c, g, u, unknown, other, or absent
  misc_difference 249: note = a, c, g, u, unknown, other, or absent
  misc_difference 250: note = a, c, g, u, unknown, other, or absent
  misc_difference 251: note = a, c, g, u, unknown, other, or absent
  misc_difference 252: note = a, c, g, u, unknown, other, or absent
  misc_difference 253: note = a, c, g, u, unknown, other, or absent
  misc_difference 254: note = a, c, g, u, unknown, other, or absent
  misc_difference 255: note = a, c, g, u, unknown, other, or absent
  misc_difference 256: note = a, c, g, u, unknown, other, or absent
  misc_difference 257: note = a, c, g, u, unknown, other, or absent
  misc_difference 258: note = a, c, g, u, unknown, other, or absent
  misc_difference 259: note = a, c, g, u, unknown, other, or absent
  misc_difference 260: note = a, c, g, u, unknown, other, or absent
  misc_difference 261: note = a, c, g, u, unknown, other, or absent
  misc_difference 262: note = a, c, g, u, unknown, other, or absent
  misc_difference 263: note = a, c, g, u, unknown, other, or absent
  misc_difference 264: note = a, c, g, u, unknown, other, or absent
  misc_difference 265: note = a, c, g, u, unknown, other, or absent
  misc_difference 266: note = a, c, g, u, unknown, other, or absent
  misc_difference 267: note = a, c, g, u, unknown, other, or absent
  misc_difference 268: note = a, c, g, u, unknown, other, or absent
  misc_difference 269: note = a, c, g, u, unknown, other, or absent
  misc_difference 270: note = a, c, g, u, unknown, other, or absent
  misc_difference 271: note = a, c, g, u, unknown, other, or absent
  misc_difference 272: note = a, c, g, u, unknown, other, or absent
  misc_difference 273: note = a, c, g, u, unknown, other, or absent
  misc_difference 274: note = a, c, g, u, unknown, other, or absent
  misc_difference 275: note = a, c, g, u, unknown, other, or absent
  misc_difference 276: note = a, c, g, u, unknown, other, or absent
  misc_difference 277: note = a, c, g, u, unknown, other, or absent
  misc_difference 278: note = a, c, g, u, unknown, other, or absent
  misc_difference 279: note = a, c, g, u, unknown, other, or absent
  misc_difference 280: note = a, c, g, u, unknown, other, or absent
  misc_difference 281: note = a, c, g, u, unknown, other, or absent
  misc_difference 282: note = a, c, g, u, unknown, other, or absent
  misc_difference 283: note = a, c, g, u, unknown, other, or absent
  misc_difference 284: note = a, c, g, u, unknown, other, or absent
  misc_difference 285: note = a, c, g, u, unknown, other, or absent
  misc_difference 286: note = a, c, g, u, unknown, other, or absent
  misc_difference 287: note = a, c, g, u, unknown, other, or absent
  misc_difference 288: note = a, c, g, u, unknown, other, or absent
  misc_difference 289: note = a, c, g, u, unknown, other, or absent
  misc_difference 290: note = a, c, g, u, unknown, other, or absent
  misc_difference 291: note = a, c, g, u, unknown, other, or absent
  misc_difference 292: note = a, c, g, u, unknown, other, or absent
  misc_difference 293: note = a, c, g, u, unknown, other, or absent
  misc_difference 294: note = a, c, g, u, unknown, other, or absent
  misc_difference 295: note = a, c, g, u, unknown, other, or absent
  misc_difference 296: note = a, c, g, u, unknown, other, or absent
  misc_difference 297: note = a, c, g, u, unknown, other, or absent
  misc_difference 298: note = a, c, g, u, unknown, other, or absent
  misc_difference 299: note = a, c, g, u, unknown, other, or absent
  misc_difference 300: note = a, c, g, u, unknown, other, or absent
  misc_difference 301: note = a, c, g, u, unknown, other, or absent
  misc_difference 302: note = a, c, g, u, unknown, other, or absent
  misc_difference 303: note = a, c, g, u, unknown, other, or absent
  misc_difference 304: note = a, c, g, u, unknown, other, or absent
  misc_difference 305: note = a, c, g, u, unknown, other, or absent
  misc_difference 306: note = a, c, g, u, unknown, other, or absent
  misc_difference 307: note = a, c, g, u, unknown, other, or absent
  misc_difference 308: note = a, c, g, u, unknown, other, or absent
  misc_difference 309: note = a, c, g, u, unknown, other, or absent
  misc_difference 310: note = a, c, g, u, unknown, other, or absent
  misc_difference 311: note = a, c, g, u, unknown, other, or absent
  misc_difference 312: note = a, c, g, u, unknown, other, or absent
  misc_difference 313: note = a, c, g, u, unknown, other, or absent
  misc_difference 314: note = a, c, g, u, unknown, other, or absent
  misc_difference 315: note = May be absent
  misc_difference 316: note = May be absent
  misc_difference 317: note = May be absent
  misc_difference 318: note = May be absent
  misc_difference 319: note = May be absent
  misc_difference 320: note = May be absent
  misc_difference 321: note = May be absent
  misc_difference 322: note = May be absent
  misc_difference 323: note = May be absent
  misc_difference 324: note = May be absent
  misc_difference 325: note = May be absent
  misc_difference 326: note = May be absent
  misc_difference 327: note = May be absent
  misc_difference 328: note = May be absent
  misc_difference 329: note = May be absent
  misc_difference 330: note = May be absent
  misc_difference 331: note = May be absent
  misc_difference 332: note = May be absent
  misc_difference 333: note = a, c, g, u, unknown, other, or absent
  misc_difference 334: note = May be absent
  misc_difference 335: note = May be absent
  misc_difference 336: note = May be absent
  misc_difference 337: note = May be absent
  misc_difference 338: note = May be absent
  misc_difference 339: note = May be absent
  misc_difference 44..315: note = This region may encompass 1-271 nucleotides
knsbbnwyarywyrgtggtkmgwrtbysyryytrtcaygbrsrnnnnnnnnnnnnnnnnnnnnnnnnnnnnnnnnnnnnnnnnnnnnnnnnnnnnnnnnnnnnnnnnnnnnnnnnnnnnnnnnnnnnnnnnnnnnnnnnnnnnnnnnnnnnnnnnnnnnnnnnnnnnnnnnnnnnnnnnnnnnnnnnnnnnnnnnnnnnnnnnnnnnnnnnnnnnnnnnnnnnnnnnnnnnnnnnnnnnnnnnnnnnnnnnnnnnnnnnnnnnnnnnnnnnnnnnnnnnnnnnnnnnnnnnnnnnnnnnnnnnnnnnnnnnnnnykgrgytbrhkyycchrwnvvksmr

SEQ ID NO: 573 - RNA, 339 nt, synthetic construct
  source 1..339: mol_type = other RNA
  misc_difference 1: note = May be absent
  misc_difference 2: note = May be absent
  misc_difference 3: note = May be absent
  misc_difference 4: note = May be absent
  misc_difference 5: note = May be absent
  misc_difference 6: note = May be absent
  misc_difference 7: note = May be absent
  misc_difference 8: note = May be absent
  misc_difference 9: note = May be absent
  misc_difference 10: note = May be absent
  misc_difference 11: note = May be absent
  misc_difference 12: note = May be absent
  misc_difference 13: note = May be absent
  misc_difference 14: note = May be absent
  misc_difference 15: note = May be absent
  misc_difference 16: note = May be absent
  misc_difference 17: note = May be absent
  misc_difference 18: note = May be absent
  misc_difference 19: note = May be absent
  misc_difference 20: note = May be absent
  misc_difference 21: note = May be absent
  misc_difference 22: note = May be absent
  misc_difference 23: note = May be absent
  misc_difference 24: note = May be absent
  misc_difference 25: note = May be absent
  misc_difference 26: note = May be absent
  misc_difference 27: note = May be absent
  misc_difference 28: note = May be absent
  misc_difference 29: note = May be absent
  misc_difference 30: note = May be absent
  misc_difference 31: note = May be absent
  misc_difference 32: note = May be absent
  misc_difference 33: note = May be absent
  misc_difference 34: note = May be absent
  misc_difference 35: note = May be absent
  misc_difference 36: note = May be absent
  misc_difference 37: note = May be absent
  misc_difference 38: note = May be absent
  misc_difference 39: note = May be absent
  misc_difference 40: note = May be absent
  misc_difference 41: note = May be absent
  misc_difference 42: note = May be absent
  misc_difference 43: note = May be absent
  misc_difference 44: note = a, c, g, u, unknown, other, or absent
  misc_difference 45: note = a, c, g, u, unknown, other, or absent
  misc_difference 46: note = a, c, g, u, unknown, other, or absent
  misc_difference 47: note = a, c, g, u, unknown, other, or absent
  misc_difference 48: note = a, c, g, u, unknown, other, or absent
  misc_difference 49: note = a, c, g, u, unknown, other, or absent
  misc_difference 50: note = a, c, g, u, unknown, other, or absent
  misc_difference 51: note = a, c, g, u, unknown, other, or absent
  misc_difference 52: note = a, c, g, u, unknown, other, or absent
  misc_difference 53: note = a, c, g, u, unknown, other, or absent
  misc_difference 54: note = a, c, g, u, unknown, other, or absent
  misc_difference 55: note = a, c, g, u, unknown, other, or absent
  misc_difference 56: note = a, c, g, u, unknown, other, or absent
  misc_difference 57: note = a, c, g, u, unknown, other, or absent
  misc_difference 58: note = a, c, g, u, unknown, other, or absent
  misc_difference 59: note = a, c, g, u, unknown, other, or absent
  misc_difference 60: note = a, c, g, u, unknown, other, or absent
  misc_difference 61: note = a, c, g, u, unknown, other, or absent
  misc_difference 62: note = a, c, g, u, unknown, other, or absent
  misc_difference 63: note = a, c, g, u, unknown, other, or absent
  misc_difference 64: note = a, c, g, u, unknown, other, or absent
  misc_difference 65: note = a, c, g, u, unknown, other, or absent
  misc_difference 66: note = a, c, g, u, unknown, other, or absent
  misc_difference 67: note = a, c, g, u, unknown, other, or absent
  misc_difference 68: note = a, c, g, u, unknown, other, or absent
  misc_difference 69: note = a, c, g, u, unknown, other, or absent
  misc_difference 70: note = a, c, g, u, unknown, other, or absent
  misc_difference 71: note = a, c, g, u, unknown, other, or absent
  misc_difference 72: note = a, c, g, u, unknown, other, or absent
  misc_difference 73: note = a, c, g, u, unknown, other, or absent
  misc_difference 74: note = a, c, g, u, unknown, other, or absent
  misc_difference 75: note = a, c, g, u, unknown, other, or absent
  misc_difference 76: note = a, c, g, u, unknown, other, or absent
  misc_difference 77: note = a, c, g, u, unknown, other, or absent
  misc_difference 78: note = a, c, g, u, unknown, other, or absent
  misc_difference 79: note = a, c, g, u, unknown, other, or absent
  misc_difference 80: note = a, c, g, u, unknown, other, or absent
  misc_difference 81: note = a, c, g, u, unknown, other, or absent
  misc_difference 82: note = a, c, g, u, unknown, other, or absent
  misc_difference 83: note = a, c, g, u, unknown, other, or absent
  misc_difference 84: note = a, c, g, u, unknown, other, or absent
  misc_difference 85: note = a, c, g, u, unknown, other, or absent
  misc_difference 86: note = a, c, g, u, unknown, other, or absent
  misc_difference 87: note = a, c, g, u, unknown, other, or absent
  misc_difference 88: note = a, c, g, u, unknown, other, or absent
  misc_difference 89: note = a, c, g, u, unknown, other, or absent
  misc_difference 90: note = a, c, g, u, unknown, other, or absent
  misc_difference 91: note = a, c, g, u, unknown, other, or absent
  misc_difference 92: note = a, c, g, u, unknown, other, or absent
  misc_difference 93: note = a, c, g, u, unknown, other, or absent
  misc_difference 94: note = a, c, g, u, unknown, other, or absent
  misc_difference 95: note = a, c, g, u, unknown, other, or absent
  misc_difference 96: note = a, c, g, u, unknown, other, or absent
  misc_difference 97: note = a, c, g, u, unknown, other, or absent
  misc_difference 98: note = a, c, g, u, unknown, other, or absent
  misc_difference 99: note = a, c, g, u, unknown, other, or absent
  misc_difference 100: note = a, c, g, u, unknown, other, or absent
  misc_difference 101: note = a, c, g, u, unknown, other, or absent
  misc_difference 102: note = a, c, g, u, unknown, other, or absent
  misc_difference 103: note = a, c, g, u, unknown, other, or absent
  misc_difference 104: note = a, c, g, u, unknown, other, or absent
  misc_difference 105: note = a, c, g, u, unknown, other, or absent
  misc_difference 106: note = a, c, g, u, unknown, other, or absent
  misc_difference 107: note = a, c, g, u, unknown, other, or absent
  misc_difference 108: note = a, c, g, u, unknown, other, or absent
  misc_difference 109: note = a, c, g, u, unknown, other, or absent
  misc_difference 110: note = a, c, g, u, unknown, other, or absent
  misc_difference 111: note = a, c, g, u, unknown, other, or absent
  misc_difference 112: note = a, c, g, u, unknown, other, or absent
  misc_difference 113: note = a, c, g, u, unknown, other, or absent
  misc_difference 114: note = a, c, g, u, unknown, other, or absent
  misc_difference 115: note = a, c, g, u, unknown, other, or absent
  misc_difference 116: note = a, c, g, u, unknown, other, or absent
  misc_difference 117: note = a, c, g, u, unknown, other, or absent
  misc_difference 118: note = a, c, g, u, unknown, other, or absent
  misc_difference 119: note = a, c, g, u, unknown, other, or absent
  misc_difference 120: note = a, c, g, u, unknown, other, or absent
  misc_difference 121: note = a, c, g, u, unknown, other, or absent
  misc_difference 122: note = a, c, g, u, unknown, other, or absent
  misc_difference 123: note = a, c, g, u, unknown, other, or absent
  misc_difference 124: note = a, c, g, u, unknown, other, or absent
  misc_difference 125: note = a, c, g, u, unknown, other, or absent
  misc_difference 126: note = a, c, g, u, unknown, other, or absent
  misc_difference 127: note = a, c, g, u, unknown, other, or absent
  misc_difference 128: note = a, c, g, u, unknown, other, or absent
  misc_difference 129: note = a, c, g, u, unknown, other, or absent
  misc_difference 130: note = a, c, g, u, unknown, other, or absent
  misc_difference 131: note = a, c, g, u, unknown, other, or absent
  misc_difference 132: note = a, c, g, u, unknown, other, or absent
  misc_difference 133: note = a, c, g, u, unknown, other, or absent
  misc_difference 134: note = a, c, g, u, unknown, other, or absent
  misc_difference 135: note = a, c, g, u, unknown, other, or absent
  misc_difference 136: note = a, c, g, u, unknown, other, or absent
  misc_difference 137: note = a, c, g, u, unknown, other, or absent
  misc_difference 138: note = a, c, g, u, unknown, other, or absent
  misc_difference 139: note = a, c, g, u, unknown, other, or absent
  misc_difference 140: note = a, c, g, u, unknown, other, or absent
  misc_difference 141: note = a, c, g, u, unknown, other, or absent
  misc_difference 142: note = a, c, g, u, unknown, other, or absent
  misc_difference 143: note = a, c, g, u, unknown, other, or absent
  misc_difference 144: note = a, c, g, u, unknown, other, or absent
  misc_difference 145: note = a, c, g, u, unknown, other, or absent
  misc_difference 146: note = a, c, g, u, unknown, other, or absent
  misc_difference 147: note = a, c, g, u, unknown, other, or absent
  misc_difference 148: note = a, c, g, u, unknown, other, or absent
  misc_difference 149: note = a, c, g, u, unknown, other, or absent
  misc_difference 150: note = a, c, g, u, unknown, other, or absent
  misc_difference 151: note = a, c, g, u, unknown, other, or absent
  misc_difference 152: note = a, c, g, u, unknown, other, or absent
  misc_difference 153: note = a, c, g, u, unknown, other, or absent
  misc_difference 154: note = a, c, g, u, unknown, other, or absent
  misc_difference 155: note = a, c, g, u, unknown, other, or absent
  misc_difference 156: note = a, c, g, u, unknown, other, or absent
  misc_difference 157: note = a, c, g, u, unknown, other, or absent
  misc_difference 158: note = a, c, g, u, unknown, other, or absent
  misc_difference 159: note = a, c, g, u, unknown, other, or absent
  misc_difference 160: note = a, c, g, u, unknown, other, or absent
  misc_difference 161: note = a, c, g, u, unknown, other, or absent
  misc_difference 162: note = a, c, g, u, unknown, other, or absent
  misc_difference 163: note = a, c, g, u, unknown, other, or absent
  misc_difference 164: note = a, c, g, u, unknown, other, or absent
  misc_difference 165: note = a, c, g, u, unknown, other, or absent
  misc_difference 166: note = a, c, g, u, unknown, other, or absent
  misc_difference 167: note = a, c, g, u, unknown, other, or absent
  misc_difference 168: note = a, c, g, u, unknown, other, or absent
  misc_difference 169: note = a, c, g, u, unknown, other, or absent
  misc_difference 170: note = a, c, g, u, unknown, other, or absent
  misc_difference 171: note = a, c, g, u, unknown, other, or absent
  misc_difference 172: note = a, c, g, u, unknown, other, or absent
  misc_difference 173: note = a, c, g, u, unknown, other, or absent
  misc_difference 174: note = a, c, g, u, unknown, other, or absent
  misc_difference 175: note = a, c, g, u, unknown, other, or absent
  misc_difference 176: note = a, c, g, u, unknown, other, or absent
  misc_difference 177: note = a, c, g, u, unknown, other, or absent
  misc_difference 178: note = a, c, g, u, unknown, other, or absent
  misc_difference 179: note = a, c, g, u, unknown, other, or absent
  misc_difference 180: note = a, c, g, u, unknown, other, or absent
  misc_difference 181: note = a, c, g, u, unknown, other, or absent
  misc_difference 182: note = a, c, g, u, unknown, other, or absent
  misc_difference 183: note = a, c, g, u, unknown, other, or absent
  misc_difference 184: note = a, c, g, u, unknown, other, or absent
  misc_difference 185: note = a, c, g, u, unknown, other, or absent
  misc_difference 186: note = a, c, g, u, unknown, other, or absent
  misc_difference 187: note = a, c, g, u, unknown, other, or absent
  misc_difference 188: note = a, c, g, u, unknown, other, or absent
  misc_difference 189: note = a, c, g, u, unknown, other, or absent
  misc_difference 190: note = a, c, g, u, unknown, other, or absent
  misc_difference 191: note = a, c, g, u, unknown, other, or absent
  misc_difference 192: note = a, c, g, u, unknown, other, or absent
  misc_difference 193: note = a, c, g, u, unknown, other, or absent
  misc_difference 194: note = a, c, g, u, unknown, other, or absent
  misc_difference 195: note = a, c, g, u, unknown, other, or absent
  misc_difference 196: note = a, c, g, u, unknown, other, or absent
  misc_difference 197: note = a, c, g, u, unknown, other, or absent
  misc_difference 198: note = a, c, g, u, unknown, other, or absent
  misc_difference 199: note = a, c, g, u, unknown, other, or absent
  misc_difference 200: note = a, c, g, u, unknown, other, or absent
  misc_difference 201: note = a, c, g, u, unknown, other, or absent
  misc_difference 202: note = a, c, g, u, unknown, other, or absent
  misc_difference 203: note = a, c, g, u, unknown, other, or absent
  misc_difference 204: note = a, c, g, u, unknown, other, or absent
  misc_difference 205: note = a, c, g, u, unknown, other, or absent
  misc_difference 206: note = a, c, g, u, unknown, other, or absent
  misc_difference 207: note = a, c, g, u, unknown, other, or absent
  misc_difference 208: note = a, c, g, u, unknown, other, or absent
  misc_difference 209: note = a, c, g, u, unknown, other, or absent
  misc_difference 210: note = a, c, g, u, unknown, other, or absent
  misc_difference 211: note = a, c, g, u, unknown, other, or absent
  misc_difference 212: note = a, c, g, u, unknown, other, or absent
  misc_difference 213: note = a, c, g, u, unknown, other, or absent
  misc_difference 214: note = a, c, g, u, unknown, other, or absent
  misc_difference 215: note = a, c, g, u, unknown, other, or absent
  misc_difference 216: note = a, c, g, u, unknown, other, or absent
  misc_difference 217: note = a, c, g, u, unknown, other, or absent
  misc_difference 218: note = a, c, g, u, unknown, other, or absent
  misc_difference 219: note = a, c, g, u, unknown, other, or absent
  misc_difference 220: note = a, c, g, u, unknown, other, or absent
  misc_difference 221: note = a, c, g, u, unknown, other, or absent
  misc_difference 222: note = a, c, g, u, unknown, other, or absent
  misc_difference 223: note = a, c, g, u, unknown, other, or absent
  misc_difference 224: note = a, c, g, u, unknown, other, or absent
  misc_difference 225: note = a, c, g, u, unknown, other, or absent
  misc_difference 226: note = a, c, g, u, unknown, other, or absent
  misc_difference 227: note = a, c, g, u, unknown, other, or absent
  misc_difference 228: note = a, c, g, u, unknown, other, or absent
  misc_difference 229: note = a, c, g, u, unknown, other, or absent
  misc_difference 230: note = a, c, g, u, unknown, other, or absent
  misc_difference 231: note = a, c, g, u, unknown, other, or absent
  misc_difference 232: note = a, c, g, u, unknown, other, or absent
  misc_difference 233: note = a, c, g, u, unknown, other, or absent
  misc_difference 234: note = a, c, g, u, unknown, other, or absent
  misc_difference 235: note = a, c, g, u, unknown, other, or absent
  misc_difference 236: note = a, c, g, u, unknown, other, or absent
  misc_difference 237: note = a, c, g, u, unknown, other, or absent
  misc_difference 238: note = a, c, g, u, unknown, other, or absent
  misc_difference 239: note = a, c, g, u, unknown, other, or absent
  misc_difference 240: note = a, c, g, u, unknown, other, or absent
  misc_difference 241: note = a, c, g, u, unknown, other, or absent
  misc_difference 242: note = a, c, g, u, unknown, other, or absent
  misc_difference 243: note = a, c, g, u, unknown, other, or absent
  misc_difference 244: note = a, c, g, u, unknown, other, or absent
  misc_difference 245: note = a, c, g, u, unknown, other, or absent
  misc_difference 246: note = a, c, g, u, unknown, other, or absent
  misc_difference 247: note = a, c, g, u, unknown, other, or absent
  misc_difference 248: note = a, c, g, u, unknown, other, or absent
  misc_difference 249: note = a, c, g, u, unknown, other, or absent
  misc_difference 250: note = a, c, g, u, unknown, other, or absent
  misc_difference 251: note = a, c, g, u, unknown, other, or absent
  misc_difference 252: note = a, c, g, u, unknown, other, or absent
  misc_difference 253: note = a, c, g, u, unknown, other, or absent
  misc_difference 254: note = a, c, g, u, unknown, other, or absent
  misc_difference 255: note = a, c, g, u, unknown, other, or absent
  misc_difference 256: note = a, c, g, u, unknown, other, or absent
  misc_difference 257: note = a, c, g, u, unknown, other, or absent
  misc_difference 258: note = a, c, g, u, unknown, other, or absent
  misc_difference 259: note = a, c, g, u, unknown, other, or absent
  misc_difference 260: note = a, c, g, u, unknown, other, or absent
  misc_difference 261: note = a, c, g, u, unknown, other, or absent
  misc_difference 262: note = a, c, g, u, unknown, other, or absent
  misc_difference 263: note = a, c, g, u, unknown, other, or absent
  misc_difference 264: note = a, c, g, u, unknown, other, or absent
  misc_difference 265: note = a, c, g, u, unknown, other, or absent
  misc_difference 266: note = a, c, g, u, unknown, other, or absent
  misc_difference 267: note = a, c, g, u, unknown, other, or absent
  misc_difference 268: note = a, c, g, u, unknown, other, or absent
  misc_difference 269: note = a, c, g, u, unknown, other, or absent
  misc_difference 270: note = a, c, g, u, unknown, other, or absent
  misc_difference 271: note = a, c, g, u, unknown, other, or absent
  misc_difference 272: note = a, c, g, u, unknown, other, or absent
  misc_difference 273: note = a, c, g, u, unknown, other, or absent
  misc_difference 274: note = a, c, g, u, unknown, other, or absent
  misc_difference 275: note = a, c, g, u, unknown, other, or absent
  misc_difference 276: note = a, c, g, u, unknown, other, or absent
  misc_difference 277: note = a, c, g, u, unknown, other, or absent
  misc_difference 278: note = a, c, g, u, unknown, other, or absent
  misc_difference 279: note = a, c, g, u, unknown, other, or absent
  misc_difference 280: note = a, c, g, u, unknown, other, or absent
  misc_difference 281: note = a, c, g, u, unknown, other, or absent
  misc_difference 282: note = a, c, g, u, unknown, other, or absent
  misc_difference 283: note = a, c, g, u, unknown, other, or absent
  misc_difference 284: note = a, c, g, u, unknown, other, or absent
  misc_difference 285: note = a, c, g, u, unknown, other, or absent
  misc_difference 286: note = a, c, g, u, unknown, other, or absent
  misc_difference 287: note = a, c, g, u, unknown, other, or absent
  misc_difference 288: note = a, c, g, u, unknown, other, or absent
  misc_difference 289: note = a, c, g, u, unknown, other, or absent
  misc_difference 290: note = a, c, g, u, unknown, other, or absent
  misc_difference 291: note = a, c, g, u, unknown, other, or absent
  misc_difference 292: note = a, c, g, u, unknown, other, or absent
  misc_difference 293: note = a, c, g, u, unknown, other, or absent
  misc_difference 294: note = a, c, g, u, unknown, other, or absent
  misc_difference 295: note = a, c, g, u, unknown, other, or absent
  misc_difference 296: note = a, c, g, u, unknown, other, or absent
  misc_difference 297: note = a, c, g, u, unknown, other, or absent
  misc_difference 298: note = a, c, g, u, unknown, other, or absent
  misc_difference 299: note = a, c, g, u, unknown, other, or absent
  misc_difference 300: note = a, c, g, u, unknown, other, or absent
  misc_difference 301: note = a, c, g, u, unknown, other, or absent
  misc_difference 302: note = a, c, g, u, unknown, other, or absent
  misc_difference 303: note = a, c, g, u, unknown, other, or absent
  misc_difference 304: note = a, c, g, u, unknown, other, or absent
  misc_difference 305: note = a, c, g, u, unknown, other, or absent
  misc_difference 306: note = a, c, g, u, unknown, other, or absent
  misc_difference 307: note = a, c, g, u, unknown, other, or absent
  misc_difference 308: note = a, c, g, u, unknown, other, or absent
  misc_difference 309: note = a, c, g, u, unknown, other, or absent
  misc_difference 310: note = a, c, g, u, unknown, other, or absent
  misc_difference 311: note = a, c, g, u, unknown, other, or absent
  misc_difference 312: note = a, c, g, u, unknown, other, or absent
  misc_difference 313: note = a, c, g, u, unknown, other, or absent
  misc_difference 314: note = a, c, g, u, unknown, other, or absent
  misc_difference 315: note = May be absent
  misc_difference 316: note = May be absent
  misc_difference 317: note = May be absent
  misc_difference 318: note = May be absent
  misc_difference 319: note = May be absent
  misc_difference 320: note = May be absent
  misc_difference 321: note = May be absent
  misc_difference 322: note = May be absent
  misc_difference 323: note = May be absent
  misc_difference 324: note = May be absent
  misc_difference 325: note = May be absent
  misc_difference 326: note = May be absent
  misc_difference 327: note = May be absent
  misc_difference 328: note = May be absent
  misc_difference 329: note = May be absent
  misc_difference 330: note = May be absent
  misc_difference 331: note = May be absent
  misc_difference 332: note = May be absent
  misc_difference 333: note = May be absent
  misc_difference 334: note = May be absent
  misc_difference 335: note = May be absent
  misc_difference 336: note = May be absent
  misc_difference 337: note = May be absent
  misc_difference 338: note = May be absent
  misc_difference 339: note = May be absent
  misc_difference 44..315: note = This region may encompass 1-271 nucleotides
tmctyrtyagtatrgtggtkmgtrtyycygyctgtcaygyggrnnnnnnnnnnnnnnnnnnnnnnnnnnnnnnnnnnnnnnnnnnnnnnnnnnnnnnnnnnnnnnnnnnnnnnnnnnnnnnnnnnnnnnnnnnnnnnnnnnnnnnnnnnnnnnnnnnnnnnnnnnnnnnnnnnnnnnnnnnnnnnnnnnnnnnnnnnnnnnnnnnnnnnnnnnnnnnnnnnnnnnnnnnnnnnnnnnnnnnnnnnnnnnnnnnnnnnnnnnnnnnnnnnnnnnnnnnnnnnnnnnnnnnnnnnnnnnnnnnnnnnnnnnnnnnnyggrgttyrmkyyccyrasrrggag

SEQ ID NO: 574 - RNA, 342 nt, synthetic construct
  source 1..342: mol_type = other RNA
  misc_difference 1: note = May be absent
  misc_difference 2: note = May be absent
  misc_difference 3: note = a, c, g, u, unknown, other, or absent
  misc_difference 4: note = a, c, g, u, unknown, other, or absent
  misc_difference 5: note = a, c, g, u, unknown, other, or absent
  misc_difference 6: note = a, c, g, u, unknown, other, or absent
  misc_difference 7: note = May be absent
  misc_difference 8: note = May be absent
  misc_difference 9: note = May be absent
  misc_difference 10: note = May be absent
  misc_difference 11: note = May be absent
  misc_difference 12: note = a, c, g, u, unknown, other, or absent
  misc_difference 13: note = a, c, g, u, unknown, other, or absent
  misc_difference 14: note = May be absent
  misc_difference 15: note = May be absent
  misc_difference 16: note = a, c, g, u, unknown, other, or absent
  misc_difference 17: note = May be absent
  misc_difference 18: note = May be absent
  misc_difference 19: note = May be absent
  misc_difference 20: note = May be absent
  misc_difference 21: note = May be absent
  misc_difference 22: note = May be absent
  misc_difference 23: note = May be absent
  misc_difference 24: note = a, c, g, u, unknown, other, or absent
  misc_difference 25: note = May be absent
  misc_difference 26: note = a, c, g, u, unknown, other, or absent
  misc_difference 27: note = May be absent
  misc_difference 28: note = May be absent
  misc_difference 29: note = a, c, g, u, unknown, other, or absent
  misc_difference 30: note = a, c, g, u, unknown, other, or absent
  misc_difference 31: note = a, c, g, u, unknown, other, or absent
  misc_difference 32: note = a, c, g, u, unknown, other, or absent
  misc_difference 33: note = May be absent
  misc_difference 34: note = a, c, g, u, unknown, other, or absent
  misc_difference 35: note = May be absent
  misc_difference 36: note = May be absent
  misc_difference 37: note = May be absent
  misc_difference 38: note = May be absent
  misc_difference 39: note = May be absent
  misc_difference 40: note = May be absent
  misc_difference 41: note = May be absent
  misc_difference 42: note = a, c, g, u, unknown, other, or absent
  misc_difference 43: note = May be absent
  misc_difference 44: note = a, c, g, u, unknown, other, or absent
  misc_difference 45: note = a, c, g, u, unknown, other, or absent
  misc_difference 46: note = a, c, g, u, unknown, other, or absent
  misc_difference 47: note = a, c, g, u, unknown, other, or absent
  misc_difference 48: note = a, c, g, u, unknown, other, or absent
  misc_difference 49: note = a, c, g, u, unknown, other, or absent
  misc_difference 50: note = a, c, g, u, unknown, other, or absent
  misc_difference 51: note = a, c, g, u, unknown, other, or absent
  misc_difference 52: note = a, c, g, u, unknown, other, or absent
  misc_difference 53: note = a, c, g, u, unknown, other, or absent
  misc_difference 54: note = a, c, g, u, unknown, other, or absent
  misc_difference 55: note = a, c, g, u, unknown, other, or absent
  misc_difference 56: note = a, c, g, u, unknown, other, or absent
  misc_difference 57: note = a, c, g, u, unknown, other, or absent
  misc_difference 58: note = a, c, g, u, unknown, other, or absent
  misc_difference 59: note = a, c, g, u, unknown, other, or absent
  misc_difference 60: note = a, c, g, u, unknown, other, or absent
  misc_difference 61: note = a, c, g, u, unknown, other, or absent
  misc_difference 62: note = a, c, g, u, unknown, other, or absent
  misc_difference 63: note = a, c, g, u, unknown, other, or absent
  misc_difference 64: note = a, c, g, u, unknown, other, or absent
  misc_difference 65: note = a, c, g, u, unknown, other, or absent
  misc_difference 66: note = a, c, g, u, unknown, other, or absent
  misc_difference 67: note = a, c, g, u, unknown, other, or absent
  misc_difference 68: note = a, c, g, u, unknown, other, or absent
  misc_difference 69: note = a, c, g, u, unknown, other, or absent
  misc_difference 70: note = a, c, g, u, unknown, other, or absent
  misc_difference 71: note = a, c, g, u, unknown, other, or absent
  misc_difference 72: note = a, c, g, u, unknown, other, or absent
  misc_difference 73: note = a, c, g, u, unknown, other, or absent
  misc_difference 74: note = a, c, g, u, unknown, other, or absent
  misc_difference 75: note = a, c, g, u, unknown, other, or absent
  misc_difference 76: note = a, c, g, u, unknown, other, or absent
  misc_difference 77: note = a, c, g, u, unknown, other, or absent
  misc_difference 78: note = a, c, g, u, unknown, other, or absent
  misc_difference 79: note = a, c, g, u, unknown, other, or absent
  misc_difference 80: note = a, c, g, u, unknown, other, or absent
  misc_difference 81: note = a, c, g, u, unknown, other, or absent
  misc_difference 82: note = a, c, g, u, unknown, other, or absent
  misc_difference 83: note = a, c, g, u, unknown, other, or absent
  misc_difference 84: note = a, c, g, u, unknown, other, or absent
  misc_difference 85: note = a, c, g, u, unknown, other, or absent
  misc_difference 86: note = a, c, g, u, unknown, other, or absent
  misc_difference 87: note = a, c, g, u, unknown, other, or absent
  misc_difference 88: note = a, c, g, u, unknown, other, or absent
  misc_difference 89: note = a, c, g, u, unknown, other, or absent
  misc_difference 90: note = a, c, g, u, unknown, other, or absent
  misc_difference 91: note = a, c, g, u, unknown, other, or absent
  misc_difference 92: note = a, c, g, u, unknown, other, or absent
  misc_difference 93: note = a, c, g, u, unknown, other, or absent
  misc_difference 94: note = a, c, g, u, unknown, other, or absent
  misc_difference 95: note = a, c, g, u, unknown, other, or absent
  misc_difference 96: note = a, c, g, u, unknown, other, or absent
  misc_difference 97: note = a, c, g, u, unknown, other, or absent
  misc_difference 98: note = a, c, g, u, unknown, other, or absent
  misc_difference 99: note = a, c, g, u, unknown, other, or absent
  misc_difference 100: note = a, c, g, u, unknown, other, or absent
  misc_difference 101: note = a, c, g, u, unknown, other, or absent
  misc_difference 102: note = a, c, g, u, unknown, other, or absent
  misc_difference 103: note = a, c, g, u, unknown, other, or absent
  misc_difference 104: note = a, c, g, u, unknown, other, or absent
  misc_difference 105: note = a, c, g, u, unknown, other, or absent
  misc_difference 106: note = a, c, g, u, unknown, other, or absent
  misc_difference 107: note = a, c, g, u, unknown, other, or absent
  misc_difference 108: note = a, c, g, u, unknown, other, or absent
  misc_difference 109: note = a, c, g, u, unknown, other, or absent
  misc_difference 110: note = a, c, g, u, unknown, other, or absent
  misc_difference 111: note = a, c, g, u, unknown, other, or absent
  misc_difference 112: note = a, c, g, u, unknown, other, or absent
  misc_difference 113: note = a, c, g, u, unknown, other, or absent
  misc_difference 114: note = a, c, g, u, unknown, other, or absent
  misc_difference 115: note = a, c, g, u, unknown, other, or absent
  misc_difference 116: note = a, c, g, u, unknown, other, or absent
  misc_difference 117: note = a, c, g, u, unknown, other, or absent
  misc_difference 118: note = a, c, g, u, unknown, other, or absent
  misc_difference 119: note = a, c, g, u, unknown, other, or absent
  misc_difference 120: note = a, c, g, u, unknown, other, or absent
  misc_difference 121: note = a, c, g, u, unknown, other, or absent
  misc_difference 122: note = a, c, g, u, unknown, other, or absent
  misc_difference 123: note = a, c, g, u, unknown, other, or absent
  misc_difference 124: note = a, c, g, u, unknown, other, or absent
  misc_difference 125: note = a, c, g, u, unknown, other, or absent
  misc_difference 126: note = a, c, g, u, unknown, other, or absent
  misc_difference 127: note = a, c, g, u, unknown, other, or absent
  misc_difference 128: note = a, c, g, u, unknown, other, or absent
  misc_difference 129: note = a, c, g, u, unknown, other, or absent
  misc_difference 130: note = a, c, g, u, unknown, other, or absent
  misc_difference 131: note = a, c, g, u, unknown, other, or absent
  misc_difference 132: note = a, c, g, u, unknown, other, or absent
  misc_difference 133: note = a, c, g, u, unknown, other, or absent
  misc_difference 134: note = a, c, g, u, unknown, other, or absent
  misc_difference 135: note = a, c, g, u, unknown, other, or absent
  misc_difference 136: note = a, c, g, u, unknown, other, or absent
  misc_difference 137: note = a, c, g, u, unknown, other, or absent
  misc_difference 138: note = a, c, g, u, unknown, other, or absent
  misc_difference 139: note = a, c, g, u, unknown, other, or absent
  misc_difference 140: note = a, c, g, u, unknown, other, or absent
  misc_difference 141: note = a, c, g, u, unknown, other, or absent
  misc_difference 142: note = a, c, g, u, unknown, other, or absent
  misc_difference 143: note = a, c, g, u, unknown, other, or absent
  misc_difference 144: note = a, c, g, u, unknown, other, or absent
  misc_difference 145: note = a, c, g, u, unknown, other, or absent
  misc_difference 146: note = a, c, g, u, unknown, other, or absent
  misc_difference 147: note = a, c, g, u, unknown, other, or absent
  misc_difference 148: note = a, c, g, u, unknown, other, or absent
  misc_difference 149: note = a, c, g, u, unknown, other, or absent
  misc_difference 150: note = a, c, g, u, unknown, other, or absent
  misc_difference 151: note = a, c, g, u, unknown, other, or absent
  misc_difference 152: note = a, c, g, u, unknown, other, or absent
  misc_difference 153: note = a, c, g, u, unknown, other, or absent
  misc_difference 154: note = a, c, g, u, unknown, other, or absent
  misc_difference 155: note = a, c, g, u, unknown, other, or absent
  misc_difference 156: note = a, c, g, u, unknown, other, or absent
  misc_difference 157: note = a, c, g, u, unknown, other, or absent
  misc_difference 158: note = a, c, g, u, unknown, other, or absent
  misc_difference 159: note = a, c, g, u, unknown, other, or absent
  misc_difference 160: note = a, c, g, u, unknown, other, or absent
  misc_difference 161: note = a, c, g, u, unknown, other, or absent
  misc_difference 162: note = a, c, g, u, unknown, other, or absent
  misc_difference 163: note = a, c, g, u, unknown, other, or absent
  misc_difference 164: note = a, c, g, u, unknown, other, or absent
  misc_difference 165: note = a, c, g, u, unknown, other, or absent
  misc_difference 166: note = a, c, g, u, unknown, other, or absent
  misc_difference 167: note = a, c, g, u, unknown, other, or absent
  misc_difference 168: note = a, c, g, u, unknown, other, or absent
  misc_difference 169: note = a, c, g, u, unknown, other, or absent
  misc_difference 170: note = a, c, g, u, unknown, other, or absent
  misc_difference 171: note = a, c, g, u, unknown, other, or absent
  misc_difference 172: note = a, c, g, u, unknown, other, or absent
  misc_difference 173: note = a, c, g, u, unknown, other, or absent
  misc_difference 174: note = a, c, g, u, unknown, other, or absent
  misc_difference 175: note = a, c, g, u, unknown, other, or absent
  misc_difference 176: note = a, c, g, u, unknown, other, or absent
  misc_difference 177: note = a, c, g, u, unknown, other, or absent
  misc_difference 178: note = a, c, g, u, unknown, other, or absent
  misc_difference 179: note = a, c, g, u, unknown, other, or absent
  misc_difference 180: note = a, c, g, u, unknown, other, or absent
  misc_difference 181: note = a, c, g, u, unknown, other, or absent
  misc_difference 182: note = a, c, g, u, unknown, other, or absent
  misc_difference 183: note = a, c, g, u, unknown, other, or absent
  misc_difference 184: note = a, c, g, u, unknown, other, or absent
  misc_difference 185: note = a, c, g, u, unknown, other, or absent
  misc_difference 186: note = a, c, g, u, unknown, other, or absent
  misc_difference 187: note = a, c, g, u, unknown, other, or absent
  misc_difference 188: note = a, c, g, u, unknown, other, or absent
  misc_difference 189: note = a, c, g, u, unknown, other, or absent
  misc_difference 190: note = a, c, g, u, unknown, other, or absent
  misc_difference 191: note = a, c, g, u, unknown, other, or absent
  misc_difference 192: note = a, c, g, u, unknown, other, or absent
  misc_difference 193: note = a, c, g, u, unknown, other, or absent
  misc_difference 194: note = a, c, g, u, unknown, other, or absent
  misc_difference 195: note = a, c, g, u, unknown, other, or absent
  misc_difference 196: note = a, c, g, u, unknown, other, or absent
  misc_difference 197: note = a, c, g, u, unknown, other, or absent
  misc_difference 198: note = a, c, g, u, unknown, other, or absent
  misc_difference 199: note = a, c, g, u, unknown, other, or absent
  misc_difference 200: note = a, c, g, u, unknown, other, or absent
  misc_difference 201: note = a, c, g, u, unknown, other, or absent
  misc_difference 202: note = a, c, g, u, unknown, other, or absent
  misc_difference 203: note = a, c, g, u, unknown, other, or absent
  misc_difference 204: note = a, c, g, u, unknown, other, or absent
  misc_difference 205: note = a, c, g, u, unknown, other, or absent
  misc_difference 206: note = a, c, g, u, unknown, other, or absent
  misc_difference 207: note = a, c, g, u, unknown, other, or absent
  misc_difference 208: note = a, c, g, u, unknown, other, or absent
  misc_difference 209: note = a, c, g, u, unknown, other, or absent
  misc_difference 210: note = a, c, g, u, unknown, other, or absent
  misc_difference 211: note = a, c, g, u, unknown, other, or absent
  misc_difference 212: note = a, c, g, u, unknown, other, or absent
  misc_difference 213: note = a, c, g, u, unknown, other, or absent
  misc_difference 214: note = a, c, g, u, unknown, other, or absent
  misc_difference 215: note = a, c, g, u, unknown, other, or absent
  misc_difference 216: note = a, c, g, u, unknown, other, or absent
  misc_difference 217: note = a, c, g, u, unknown, other, or absent
  misc_difference 218: note = a, c, g, u, unknown, other, or absent
  misc_difference 219: note = a, c, g, u, unknown, other, or absent
  misc_difference 220: note = a, c, g, u, unknown, other, or absent
  misc_difference 221: note = a, c, g, u, unknown, other, or absent
  misc_difference 222: note = a, c, g, u, unknown, other, or absent
  misc_difference 223: note = a, c, g, u, unknown, other, or absent
  misc_difference 224: note = a, c, g, u, unknown, other, or absent
  misc_difference 225: note = a, c, g, u, unknown, other, or absent
  misc_difference 226: note = a, c, g, u, unknown, other, or absent
  misc_difference 227: note = a, c, g, u, unknown, other, or absent
  misc_difference 228: note = a, c, g, u, unknown, other, or absent
  misc_difference 229: note = a, c, g, u, unknown, other, or absent
  misc_difference 230: note = a, c, g, u, unknown, other, or absent
  misc_difference 231: note = a, c, g, u, unknown, other, or absent
  misc_difference 232: note = a, c, g, u, unknown, other, or absent
  misc_difference 233: note = a, c, g, u, unknown, other, or absent
  misc_difference 234: note = a, c, g, u, unknown, other, or absent
  misc_difference 235: note = a, c, g, u, unknown, other, or absent
  misc_difference 236: note = a, c, g, u, unknown, other, or absent
  misc_difference 237: note = a, c, g, u, unknown, other, or absent
  misc_difference 238: note = a, c, g, u, unknown, other, or absent
  misc_difference 239: note = a, c, g, u, unknown, other, or absent
  misc_difference 240: note = a, c, g, u, unknown, other, or absent
  misc_difference 241: note = a, c, g, u, unknown, other, or absent
  misc_difference 242: note = a, c, g, u, unknown, other, or absent
  misc_difference 243: note = a, c, g, u, unknown, other, or absent
  misc_difference 244: note = a, c, g, u, unknown, other, or absent
  misc_difference 245: note = a, c, g, u, unknown, other, or absent
  misc_difference 246: note = a, c, g, u, unknown, other, or absent
  misc_difference 247: note = a, c, g, u, unknown, other, or absent
  misc_difference 248: note = a, c, g, u, unknown, other, or absent
  misc_difference 249: note = a, c, g, u, unknown, other, or absent
  misc_difference 250: note = a, c, g, u, unknown, other, or absent
  misc_difference 251: note = a, c, g, u, unknown, other, or absent
  misc_difference 252: note = a, c, g, u, unknown, other, or absent
  misc_difference 253: note = a, c, g, u, unknown, other, or absent
  misc_difference 254: note = a, c, g, u, unknown, other, or absent
  misc_difference 255: note = a, c, g, u, unknown, other, or absent
  misc_difference 256: note = a, c, g, u, unknown, other, or absent
  misc_difference 257: note = a, c, g, u, unknown, other, or absent
  misc_difference 258: note = a, c, g, u, unknown, other, or absent
  misc_difference 259: note = a, c, g, u, unknown, other, or absent
  misc_difference 260: note = a, c, g, u, unknown, other, or absent
  misc_difference 261: note = a, c, g, u, unknown, other, or absent
  misc_difference 262: note = a, c, g, u, unknown, other, or absent
  misc_difference 263: note = a, c, g, u, unknown, other, or absent
  misc_difference 264: note = a, c, g, u, unknown, other, or absent
  misc_difference 265: note = a, c, g, u, unknown, other, or absent
  misc_difference 266: note = a, c, g, u, unknown, other, or absent
  misc_difference 267: note = a, c, g, u, unknown, other, or absent
  misc_difference 268: note = a, c, g, u, unknown, other, or absent
  misc_difference 269: note = a, c, g, u, unknown, other, or absent
  misc_difference 270: note = a, c, g, u, unknown, other, or absent
  misc_difference 271: note = a, c, g, u, unknown, other, or absent
  misc_difference 272: note = a, c, g, u, unknown, other, or absent
  misc_difference 273: note = a, c, g, u, unknown, other, or absent
  misc_difference 274: note = a, c, g, u, unknown, other, or absent
  misc_difference 275: note = a, c, g, u, unknown, other, or absent
  misc_difference 276: note = a, c, g, u, unknown, other, or absent
  misc_difference 277: note = a, c, g, u, unknown, other, or absent
  misc_difference 278: note = a, c, g, u, unknown, other, or absent
  misc_difference 279: note = a, c, g, u, unknown, other, or absent
  misc_difference 280: note = a, c, g, u, unknown, other, or absent
  misc_difference 281: note = a, c, g, u, unknown, other, or absent
  misc_difference 282: note = a, c, g, u, unknown, other, or absent
  misc_difference 283: note = a, c, g, u, unknown, other, or absent
  misc_difference 284: note = a, c, g, u, unknown, other, or absent
  misc_difference 285: note = a, c, g, u, unknown, other, or absent
  misc_difference 286: note = a, c, g, u, unknown, other, or absent
  misc_difference 287: note = a, c, g, u, unknown, other, or absent
  misc_difference 288: note = a, c, g, u, unknown, other, or absent
  misc_difference 289: note = a, c, g, u, unknown, other, or absent
  misc_difference 290: note = a, c, g, u, unknown, other, or absent
  misc_difference 291: note = a, c, g, u, unknown, other, or absent
  misc_difference 292: note = a, c, g, u, unknown, other, or absent
  misc_difference 293: note = a, c, g, u, unknown, other, or absent
  misc_difference 294: note = a, c, g, u, unknown, other, or absent
  misc_difference 295: note = a, c, g, u, unknown, other, or absent
  misc_difference 296: note = a, c, g, u, unknown, other, or absent
  misc_difference 297: note = a, c, g, u, unknown, other, or absent
  misc_difference 298: note = a, c, g, u, unknown, other, or absent
  misc_difference 299: note = a, c, g, u, unknown, other, or absent
  misc_difference 300: note = a, c, g, u, unknown, other, or absent
  misc_difference 301: note = a, c, g, u, unknown, other, or absent
  misc_difference 302: note = a, c, g, u, unknown, other, or absent
  misc_difference 303: note = a, c, g, u, unknown, other, or absent
  misc_difference 304: note = a, c, g, u, unknown, other, or absent
  misc_difference 305: note = a, c, g, u, unknown, other, or absent
  misc_difference 306: note = a, c, g, u, unknown, other, or absent
  misc_difference 307: note = a, c, g, u, unknown, other, or absent
  misc_difference 308: note = a, c, g, u, unknown, other, or absent
  misc_difference 309: note = a, c, g, u, unknown, other, or absent
  misc_difference 310: note = a, c, g, u, unknown, other, or absent
  misc_difference 311: note = a, c, g, u, unknown, other, or absent
  misc_difference 312: note = a, c, g, u, unknown, other, or absent
  misc_difference 313: note = a, c, g, u, unknown, other, or absent
  misc_difference 314: note = a, c, g, u, unknown, other, or absent
  misc_difference 315: note = a, c, g, u, unknown, other, or absent
  misc_difference 316: note = a, c, g, u, unknown, other, or absent
  misc_difference 317: note = a, c, g, u, unknown, other, or absent
  misc_difference 318: note = a, c, g, u, unknown, other, or absent
  misc_difference 319: note = a, c, g, u, unknown, other, or absent
  misc_difference 320: note = May be absent
  misc_difference 321: note = May be absent
  misc_difference 322: note = May be absent
  misc_difference 323: note = May be absent
  misc_difference 324: note = May be absent
  misc_difference 325: note = May be absent
  misc_difference 326: note = May be absent
  misc_difference 327: note = May be absent
  misc_difference 328: note = a, c, g, u, unknown, other, or absent
  misc_difference 329: note = May be absent
  misc_difference 330: note = May be absent
  misc_difference 331: note = May be absent
  misc_difference 332: note = May be absent
  misc_difference 333: note = a, c, g, u, unknown, other, or absent
  misc_difference 334: note = a, c, g, u, unknown, other, or absent
  misc_difference 335: note = May be absent
  misc_difference 336: note = a, c, g, u, unknown, other, or absent
  misc_difference 337: note = a, c, g, u, unknown, other, or absent
  misc_difference 338: note = a, c, g, u, unknown, other, or absent
  misc_difference 339: note = a, c, g, u, unknown, other, or absent
  misc_difference 340: note = a, c, g, u, unknown, other, or absent
  misc_difference 341: note = May be absent
  misc_difference 342: note = May be absent
  misc_difference 44..315: note = This region may encompass 1-271 nucleotides
gsnnnndtrvynnavnkcgdbyynrnvbnnnnvnyyrcarmnbnnnnnnnnnnnnnnnnnnnnnnnnnnnnnnnnnnnnnnnnnnnnnnnnnnnnnnnnnnnnnnnnnnnnnnnnnnnnnnnnnnnnnnnnnnnnnnnnnnnnnnnnnnnnnnnnnnnnnnnnnnnnnnnnnnnnnnnnnnnnnnnnnnnnnnnnnnnnnnnnnnnnnnnnnnnnnnnnnnnnnnnnnnnnnnnnnnnnnnnnnnnnnnnnnnnnnnnnnnnnnnnnnnnnnnnnnnnnnnnnnnnnnnnnnnnnnnnnnnnnnnnnnnnnnnnnnnnnbdrttcranyyyvnnhnnnnnyy

SEQ ID NO: 575 - RNA, 340 nt, synthetic construct
  source 1..340: mol_type = other RNA
  misc_difference 1: note = May be absent
  misc_difference 2: note = May be absent
  misc_difference 3: note = May be absent
  misc_difference 4: note = May be absent
  misc_difference 5: note = May be absent
  misc_difference 6: note = May be absent
  misc_difference 7: note = May be absent
  misc_difference 8: note = May be absent
  misc_difference 9: note = May be absent
  misc_difference 10: note = May be absent
  misc_difference 11: note = May be absent
  misc_difference 12: note = May be absent
  misc_difference 13: note = May be absent
  misc_difference 14: note = May be absent
  misc_difference 15: note = May be absent
  misc_difference 16: note = a, c, g, u, unknown, other, or absent
  misc_difference 17: note = May be absent
  misc_difference 18: note = May be absent
  misc_difference 19: note = May be absent
  misc_difference 20: note = May be absent
  misc_difference 21: note = May be absent
  misc_difference 22: note = May be absent
  misc_difference 23: note = May be absent
  misc_difference 24: note = May be absent
  misc_difference 25: note = May be absent
  misc_difference 26: note = May be absent
  misc_difference 27: note = May be absent
  misc_difference 28: note = May be absent
  misc_difference 29: note = May be absent
  misc_difference 30: note = May be absent
  misc_difference 31: note = May be absent
  misc_difference 32: note = May be absent
  misc_difference 33: note = May be absent
  misc_difference 34: note = May be absent
  misc_difference 35: note = May be absent
  misc_difference 36: note = May be absent
  misc_difference 37: note = May be absent
  misc_difference 38: note = May be absent
  misc_difference 39: note = May be absent
  misc_difference 40: note = May be absent
  misc_difference 41: note = May be absent
  misc_difference 42: note = May be absent
  misc_difference 43: note = May be absent
  misc_difference 44: note = May be absent
  misc_difference 45: note = a, c, g, u, unknown, other, or absent
  misc_difference 46: note = a, c, g, u, unknown, other, or absent
  misc_difference 47: note = a, c, g, u, unknown, other, or absent
  misc_difference 48: note = a, c, g, u, unknown, other, or absent
  misc_difference 49: note = a, c, g, u, unknown, other, or absent
  misc_difference 50: note = a, c, g, u, unknown, other, or absent
  misc_difference 51: note = a, c, g, u, unknown, other, or absent
  misc_difference 52: note = a, c, g, u, unknown, other, or absent
  misc_difference 53: note = a, c, g, u, unknown, other, or absent
  misc_difference 54: note = a, c, g, u, unknown, other, or absent
  misc_difference 55: note = a, c, g, u, unknown, other, or absent
  misc_difference 56: note = a, c, g, u, unknown, other, or absent
  misc_difference 57: note = a, c, g, u, unknown, other, or absent
  misc_difference 58: note = a, c, g, u, unknown, other, or absent
  misc_difference 59: note = a, c, g, u, unknown, other, or absent
  misc_difference 60: note = a, c, g, u, unknown, other, or absent
  misc_difference 61: note = a, c, g, u, unknown, other, or absent
  misc_difference 62: note = a, c, g, u, unknown, other, or absent
  misc_difference 63: note = a, c, g, u, unknown, other, or absent
  misc_difference 64: note = a, c, g, u, unknown, other, or absent
  misc_difference 65: note = a, c, g, u, unknown, other, or absent
  misc_difference 66: note = a, c, g, u, unknown, other, or absent
  misc_difference 67: note = a, c, g, u, unknown, other, or absent
  misc_difference 68: note = a, c, g, u, unknown, other, or absent
  misc_difference 69: note = a, c, g, u, unknown, other, or absent
  misc_difference 70: note = a, c, g, u, unknown, other, or absent
  misc_difference 71: note = a, c, g, u, unknown, other, or absent
  misc_difference 72: note = a, c, g, u, unknown, other, or absent
  misc_difference 73: note = a, c, g, u, unknown, other, or absent
  misc_difference 74: note = a, c, g, u, unknown, other, or absent
  misc_difference 75: note = a, c, g, u, unknown, other, or absent
  misc_difference 76: note = a, c, g, u, unknown, other, or absent
  misc_difference 77: note = a, c, g, u, unknown, other, or absent
  misc_difference 78: note = a, c, g, u, unknown, other, or absent
  misc_difference 79: note = a, c, g, u, unknown, other, or absent
  misc_difference 80: note = a, c, g, u, unknown, other, or absent
  misc_difference 81: note = a, c, g, u, unknown, other, or absent
  misc_difference 82: note = a, c, g, u, unknown, other, or absent
  misc_difference 83: note = a, c, g, u, unknown, other, or absent
  misc_difference 84: note = a, c, g, u, unknown, other, or absent
  misc_difference 85: note = a, c, g, u, unknown, other, or absent
  misc_difference 86: note = a, c, g, u, unknown, other, or absent
  misc_difference 87: note = a, c, g, u, unknown, other, or absent
  misc_difference 88: note = a, c, g, u, unknown, other, or absent
  misc_difference 89: note = a, c, g, u, unknown, other, or absent
  misc_difference 90: note = a, c, g, u, unknown, other, or absent
  misc_difference 91: note = a, c, g, u, unknown, other, or absent
  misc_difference 92: note = a, c, g, u, unknown, other, or absent
  misc_difference 93: note = a, c, g, u, unknown, other, or absent
  misc_difference 94: note = a, c, g, u, unknown, other, or absent
  misc_difference 95: note = a, c, g, u, unknown, other, or absent
  misc_difference 96: note = a, c, g, u, unknown, other, or absent
  misc_difference 97: note = a, c, g, u, unknown, other, or absent
  misc_difference 98: note = a, c, g, u, unknown, other, or absent
  misc_difference 99: note = a, c, g, u, unknown, other, or absent
  misc_difference 100: note = a, c, g, u, unknown, other, or absent
  misc_difference 101: note = a, c, g, u, unknown, other, or absent
  misc_difference 102: note = a, c, g, u, unknown, other, or absent
  misc_difference 103: note = a, c, g, u, unknown, other, or absent
  misc_difference 104: note = a, c, g, u, unknown, other, or absent
  misc_difference 105: note = a, c, g, u, unknown, other, or absent
  misc_difference 106: note = a, c, g, u, unknown, other, or absent
  misc_difference 107: note = a, c, g, u, unknown, other, or absent
  misc_difference 108: note = a, c, g, u, unknown, other, or absent
  misc_difference 109: note = a, c, g, u, unknown, other, or absent
  misc_difference 110: note = a, c, g, u, unknown, other, or absent
  misc_difference 111: note = a, c, g, u, unknown, other, or absent
  misc_difference 112: note = a, c, g, u, unknown, other, or absent
  misc_difference 113: note = a, c, g, u, unknown, other, or absent
  misc_difference 114: note = a, c, g, u, unknown, other, or absent
  misc_difference 115: note = a, c, g, u, unknown, other, or absent
  misc_difference 116: note = a, c, g, u, unknown, other, or absent
  misc_difference 117: note = a, c, g, u, unknown, other, or absent
  misc_difference 118: note = a, c, g, u, unknown, other, or absent
  misc_difference 119: note = a, c, g, u, unknown, other, or absent
  misc_difference 120: note = a, c, g, u, unknown, other, or absent
  misc_difference 121: note = a, c, g, u, unknown, other, or absent
  misc_difference 122: note = a, c, g, u, unknown, other, or absent
  misc_difference 123: note = a, c, g, u, unknown, other, or absent
  misc_difference 124: note = a, c, g, u, unknown, other, or absent
  misc_difference 125: note = a, c, g, u, unknown, other, or absent
  misc_difference 126: note = a, c, g, u, unknown, other, or absent
  misc_difference 127: note = a, c, g, u, unknown, other, or absent
  misc_difference 128: note = a, c, g, u, unknown, other, or absent
  misc_difference 129: note = a, c, g, u, unknown, other, or absent
  misc_difference 130: note = a, c, g, u, unknown, other, or absent
  misc_difference 131: note = a, c, g, u, unknown, other, or absent
  misc_difference 132: note = a, c, g, u, unknown, other, or absent
  misc_difference 133: note = a, c, g, u, unknown, other, or absent
  misc_difference 134: note = a, c, g, u, unknown, other, or absent
  misc_difference 135: note = a, c, g, u, unknown, other, or absent
  misc_difference 136: note = a, c, g, u, unknown, other, or absent
  misc_difference 137: note = a, c, g, u, unknown, other, or absent
  misc_difference 138: note = a, c, g, u, unknown, other, or absent
  misc_difference 139: note = a, c, g, u, unknown, other, or absent
  misc_difference 140: note = a, c, g, u, unknown, other, or absent
  misc_difference 141: note = a, c, g, u, unknown, other, or absent
  misc_difference 142: note = a, c, g, u, unknown, other, or absent
  misc_difference 143: note = a, c, g, u, unknown, other, or absent
  misc_difference 144: note = a, c, g, u, unknown, other, or absent
  misc_difference 145: note = a, c, g, u, unknown, other, or absent
  misc_difference 146: note = a, c, g, u, unknown, other, or absent
  misc_difference 147: note = a, c, g, u, unknown, other, or absent
  misc_difference 148: note = a, c, g, u, unknown, other, or absent
  misc_difference 149: note = a, c, g, u, unknown, other, or absent
  misc_difference 150: note = a, c, g, u, unknown, other, or absent
  misc_difference 151: note = a, c, g, u, unknown, other, or absent
  misc_difference 152: note = a, c, g, u, unknown, other, or absent
  misc_difference 153: note = a, c, g, u, unknown, other, or absent
  misc_difference 154: note = a, c, g, u, unknown, other, or absent
  misc_difference 155: note = a, c, g, u, unknown, other, or absent
  misc_difference 156: note = a, c, g, u, unknown, other, or absent
  misc_difference 157: note = a, c, g, u, unknown, other, or absent
  misc_difference 158: note = a, c, g, u, unknown, other, or absent
  misc_difference 159: note = a, c, g, u, unknown, other, or absent
  misc_difference 160: note = a, c, g, u, unknown, other, or absent
  misc_difference 161: note = a, c, g, u, unknown, other, or absent
  misc_difference 162: note = a, c, g, u, unknown, other, or absent
  misc_difference 163: note = a, c, g, u, unknown, other, or absent
  misc_difference 164: note = a, c, g, u, unknown, other, or absent
  misc_difference 165: note = a, c, g, u, unknown, other, or absent
  misc_difference 166: note = a, c, g, u, unknown, other, or absent
  misc_difference 167: note = a, c, g, u, unknown, other, or absent
  misc_difference 168: note = a, c, g, u, unknown, other, or absent
  misc_difference 169: note = a, c, g, u, unknown, other, or absent
  misc_difference 170: note = a, c, g, u, unknown, other, or absent
  misc_difference 171: note = a, c, g, u, unknown, other, or absent
  misc_difference 172: note = a, c, g, u, unknown, other, or absent
  misc_difference 173: note = a, c, g, u, unknown, other, or absent
  misc_difference 174: note = a, c, g, u, unknown, other, or absent
  misc_difference 175: note = a, c, g, u, unknown, other, or absent
  misc_difference 176: note = a, c, g, u, unknown, other, or absent
  misc_difference 177: note = a, c, g, u, unknown, other, or absent
  misc_difference 178: note = a, c, g, u, unknown, other, or absent
  misc_difference 179: note = a, c, g, u, unknown, other, or absent
  misc_difference 180: note = a, c, g, u, unknown, other, or absent
  misc_difference 181: note = a, c, g, u, unknown, other, or absent
  misc_difference 182: note = a, c, g, u, unknown, other, or absent
  misc_difference 183: note = a, c, g, u, unknown, other, or absent
  misc_difference 184: note = a, c, g, u, unknown, other, or absent
  misc_difference 185: note = a, c, g, u, unknown, other, or absent
  misc_difference 186: note = a, c, g, u, unknown, other, or absent
  misc_difference 187: note = a, c, g, u, unknown, other, or absent
  misc_difference 188: note = a, c, g, u, unknown, other, or absent
  misc_difference 189: note = a, c, g, u, unknown, other, or absent
  misc_difference 190: note = a, c, g, u, unknown, other, or absent
  misc_difference 191: note = a, c, g, u, unknown, other, or absent
  misc_difference 192: note = a, c, g, u, unknown, other, or absent
  misc_difference 193: note = a, c, g, u, unknown, other, or absent
  misc_difference 194: note = a, c, g, u, unknown, other, or absent
  misc_difference 195: note = a, c, g, u, unknown, other, or absent
  misc_difference 196: note = a, c, g, u, unknown, other, or absent
  misc_difference 197: note = a, c, g, u, unknown, other, or absent
  misc_difference 198: note = a, c, g, u, unknown, other, or absent
  misc_difference 199: note = a, c, g, u, unknown, other, or absent
  misc_difference 200: note = a, c, g, u, unknown, other, or absent
  misc_difference 201: note = a, c, g, u, unknown, other, or absent
  misc_difference 202: note = a, c, g, u, unknown, other, or absent
  misc_difference 203: note = a, c, g, u, unknown, other, or absent
  misc_difference 204: note = a, c, g, u, unknown, other, or absent
  misc_difference 205: note = a, c, g, u, unknown, other, or absent
  misc_difference 206: note = a, c, g, u, unknown, other, or absent
  misc_difference 207: note = a, c, g, u, unknown, other, or absent
  misc_difference 208: note = a, c, g, u, unknown, other, or absent
  misc_difference 209: note = a, c, g, u, unknown, other, or absent
  misc_difference 210: note = a, c, g, u, unknown, other, or absent
  misc_difference 211: note = a, c, g, u, unknown, other, or absent
  misc_difference 212: note = a, c, g, u, unknown, other, or absent
  misc_difference 213: note = a, c, g, u, unknown, other, or absent
  misc_difference 214: note = a, c, g, u, unknown, other, or absent
  misc_difference 215: note = a, c, g, u, unknown, other, or absent
  misc_difference 216: note = a, c, g, u, unknown, other, or absent
  misc_difference 217: note = a, c, g, u, unknown, other, or absent
  misc_difference 218: note = a, c, g, u, unknown, other, or absent
  misc_difference 219: note = a, c, g, u, unknown, other, or absent
  misc_difference 220: note = a, c, g, u, unknown, other, or absent
  misc_difference 221: note = a, c, g, u, unknown, other, or absent
  misc_difference 222: note = a, c, g, u, unknown, other, or absent
  misc_difference 223: note = a, c, g, u, unknown, other, or absent
  misc_difference 224: note = a, c, g, u, unknown, other, or absent
  misc_difference 225: note = a, c, g, u, unknown, other, or absent
  misc_difference 226: note = a, c, g, u, unknown, other, or absent
  misc_difference 227: note = a, c, g, u, unknown, other, or absent
  misc_difference 228: note = a, c, g, u, unknown, other, or absent
  misc_difference 229: note = a, c, g, u, unknown, other, or absent
  misc_difference 230: note = a, c, g, u, unknown, other, or absent
  misc_difference 231: note = a, c, g, u, unknown, other, or absent
  misc_difference 232: note = a, c, g, u, unknown, other, or absent
  misc_difference 233: note = a, c, g, u, unknown, other, or absent
  misc_difference 234: note = a, c, g, u, unknown, other, or absent
  misc_difference 235: note = a, c, g, u, unknown, other, or absent
  misc_difference 236: note = a, c, g, u, unknown, other, or absent
  misc_difference 237: note = a, c, g, u, unknown, other, or absent
  misc_difference 238: note = a, c, g, u, unknown, other, or absent
  misc_difference 239: note = a, c, g, u, unknown, other, or absent
  misc_difference 240: note = a, c, g, u, unknown, other, or absent
  misc_difference 241: note = a, c, g, u, unknown, other, or absent
  misc_difference 242: note = a, c, g, u, unknown, other, or absent
  misc_difference 243: note = a, c, g, u, unknown, other, or absent
  misc_difference 244: note = a, c, g, u, unknown, other, or absent
  misc_difference 245: note = a, c, g, u, unknown, other, or absent
  misc_difference 246: note = a, c, g, u, unknown, other, or absent
  misc_difference 247: note = a, c, g, u, unknown, other, or absent
  misc_difference 248: note = a, c, g, u, unknown, other, or absent
  misc_difference 249: note = a, c, g, u, unknown, other, or absent
  misc_difference 250: note = a, c, g, u, unknown, other, or absent
  misc_difference 251: note = a, c, g, u, unknown, other, or absent
  misc_difference 252: note = a, c, g, u, unknown, other, or absent
  misc_difference 253: note = a, c, g, u, unknown, other, or absent
  misc_difference 254: note = a, c, g, u, unknown, other, or absent
  misc_difference 255: note = a, c, g, u, unknown, other, or absent
  misc_difference 256: note = a, c, g, u, unknown, other, or absent
  misc_difference 257: note = a, c, g, u, unknown, other, or absent
  misc_difference 258: note = a, c, g, u, unknown, other, or absent
  misc_difference 259: note = a, c, g, u, unknown, other, or absent
  misc_difference 260: note = a, c, g, u, unknown, other, or absent
  misc_difference 261: note = a, c, g, u, unknown, other, or absent
  misc_difference 262: note = a, c, g, u, unknown, other, or absent
  misc_difference 263: note = a, c, g, u, unknown, other, or absent
  misc_difference 264: note = a, c, g, u, unknown, other, or absent
  misc_difference 265: note = a, c, g, u, unknown, other, or absent
  misc_difference 266: note = a, c, g, u, unknown, other, or absent
  misc_difference 267: note = a, c, g, u, unknown, other, or absent
  misc_difference 268: note = a, c, g, u, unknown, other, or absent
  misc_difference 269: note = a, c, g, u, unknown, other, or absent
  misc_difference 270: note = a, c, g, u, unknown, other, or absent
  misc_difference 271: note = a, c, g, u, unknown, other, or absent
  misc_difference 272: note = a, c, g, u, unknown, other, or absent
  misc_difference 273: note = a, c, g, u, unknown, other, or absent
  misc_difference 274: note = a, c, g, u, unknown, other, or absent
  misc_difference 275: note = a, c, g, u, unknown, other, or absent
  misc_difference 276: note = a, c, g, u, unknown, other, or absent
  misc_difference 277: note = a, c, g, u, unknown, other, or absent
  misc_difference 278: note = a, c, g, u, unknown, other, or absent
  misc_difference 279: note = a, c, g, u, unknown, other, or absent
  misc_difference 280: note = a, c, g, u, unknown, other, or absent
  misc_difference 281: note = a, c, g, u, unknown, other, or absent
  misc_difference 282: note = a, c, g, u, unknown, other, or absent
  misc_difference 283: note = a, c, g, u, unknown, other, or absent
  misc_difference 284: note = a, c, g, u, unknown, other, or absent
  misc_difference 285: note = a, c, g, u, unknown, other, or absent
  misc_difference 286: note = a, c, g, u, unknown, other, or absent
  misc_difference 287: note = a, c, g, u, unknown, other, or absent
  misc_difference 288: note = a, c, g, u, unknown, other, or absent
  misc_difference 289: note = a, c, g, u, unknown, other, or absent
  misc_difference 290: note = a, c, g, u, unknown, other, or absent
  misc_difference 291: note = a, c, g, u, unknown, other, or absent
  misc_difference 292: note = a, c, g, u, unknown, other, or absent
  misc_difference 293: note = a, c, g, u, unknown, other, or absent
  misc_difference 294: note = a, c, g, u, unknown, other, or absent
  misc_difference 295: note = a, c, g, u, unknown, other, or absent
  misc_difference 296: note = a, c, g, u, unknown, other, or absent
  misc_difference 297: note = a, c, g, u, unknown, other, or absent
  misc_difference 298: note = a, c, g, u, unknown, other, or absent
  misc_difference 299: note = a, c, g, u, unknown, other, or absent
  misc_difference 300: note = a, c, g, u, unknown, other, or absent
  misc_difference 301: note = a, c, g, u, unknown, other, or absent
  misc_difference 302: note = a, c, g, u, unknown, other, or absent
  misc_difference 303: note = a, c, g, u, unknown, other, or absent
  misc_difference 304: note = a, c, g, u, unknown, other, or absent
  misc_difference 305: note = a, c, g, u, unknown, other, or absent
  misc_difference 306: note = a, c, g, u, unknown, other, or absent
  misc_difference 307: note = a, c, g, u, unknown, other, or absent
  misc_difference 308: note = a, c, g, u, unknown, other, or absent
  misc_difference 309: note = a, c, g, u, unknown, other, or absent
  misc_difference 310: note = a, c, g, u, unknown, other, or absent
  misc_difference 311: note = a, c, g, u, unknown, other, or absent
  misc_difference 312: note = a, c, g, u, unknown, other, or absent
  misc_difference 313: note = a, c, g, u, unknown, other, or absent
  misc_difference 314: note = a, c, g, u, unknown, other, or absent
  misc_difference 315: note = a, c, g, u, unknown, other, or absent
  misc_difference 316: note = May be absent
  misc_difference 317: note = May be absent
  misc_difference 318: note = May be absent
  misc_difference 319: note = May be absent
  misc_difference 320: note = May be absent
  misc_difference 321: note = May be absent
  misc_difference 322: note = May be absent
  misc_difference 323: note = May be absent
  misc_difference 324: note = May be absent
  misc_difference 325: note = May be absent
  misc_difference 326: note = May be absent
  misc_difference 327: note = May be absent
  misc_difference 328: note = May be absent
  misc_difference 329: note = May be absent
  misc_difference 330: note = May be absent
  misc_difference 331: note = May be absent
  misc_difference 332: note = May be absent
  misc_difference 333: note = May be absent
  misc_difference 334: note = May be absent
  misc_difference 335: note = May be absent
  misc_difference 336: note = May be absent
  misc_difference 337: note = May be absent
  misc_difference 338: note = May be absent
  misc_difference 339: note = May be absent
  misc_difference 340: note = May be absent
  misc_difference 45..316: note = This region may encompass 1-271 nucleotides
gsgsryrkrgytbasnkgdktaravyahttgrcyrcaratcmarnnnnnnnnnnnnnnnnnnnnnnnnnnnnnnnnnnnnnnnnnnnnnnnnnnnnnnnnnnnnnnnnnnnnnnnnnnnnnnnnnnnnnnnnnnnnnnnnnnnnnnnnnnnnnnnnnnnnnnnnnnnnnnnnnnnnnnnnnnnnnnnnnnnnnnnnnnnnnnnnnnnnnnnnnnnnnnnnnnnnnnnnnnnnnnnnnnnnnnnnnnnnnnnnnnnnnnnnnnnnnnnnnnnnnnnnnnnnnnnnnnnnnnnnnnnnnnnnnnnnnnnnnnnnnnnyyydrttcrartyyvgktryychyy

SEQ ID NO: 576 - RNA, 340 nt, synthetic construct
  source 1..340: mol_type = other RNA
  misc_difference 1: note = May be absent
  misc_difference 2: note = May be absent
  misc_difference 3: note = May be absent
  misc_difference 4: note = May be absent
  misc_difference 5: note = May be absent
  misc_difference 6: note = May be absent
  misc_difference 7: note = May be absent
  misc_difference 8: note = May be absent
  misc_difference 9: note = May be absent
  misc_difference 10: note = May be absent
  misc_difference 11: note = May be absent
  misc_difference 12: note = May be absent
  misc_difference 13: note = May be absent
  misc_difference 14: note = May be absent
  misc_difference 15: note = May be absent
  misc_difference 16: note = a, c, g, u, unknown, other, or absent
  misc_difference 17: note = May be absent
  misc_difference 18: note = May be absent
  misc_difference 19: note = May be absent
  misc_difference 20: note = May be absent
  misc_difference 21: note = May be absent
  misc_difference 22: note = May be absent
  misc_difference 23: note = May be absent
  misc_difference 24: note = May be absent
  misc_difference 25: note = May be absent
  misc_difference 26: note = May be absent
  misc_difference 27: note = May be absent
  misc_difference 28: note = May be absent
  misc_difference 29: note = May be absent
  misc_difference 30: note = May be absent
  misc_difference 31: note = May be absent
  misc_difference 32: note = May be absent
  misc_difference 33: note = May be absent
  misc_difference 34: note = May be absent
  misc_difference 35: note = May be absent
  misc_difference 36: note = May be absent
  misc_difference 37: note = May be absent
  misc_difference 38: note = May be absent
  misc_difference 39: note = May be absent
  misc_difference 40: note = May be absent
  misc_difference 41: note = May be absent
  misc_difference 42: note = May be absent
  misc_difference 43: note = May be absent
  misc_difference 44: note = May be absent
  misc_difference 45: note = a, c, g, u, unknown, other, or absent
  misc_difference 46: note = a, c, g, u, unknown, other, or absent
  misc_difference 47: note = a, c, g, u, unknown, other, or absent
  misc_difference 48: note = a, c, g, u, unknown, other, or absent
  misc_difference 49: note = a, c, g, u, unknown, other, or absent
  misc_difference 50: note = a, c, g, u, unknown, other, or absent
  misc_difference 51: note = a, c, g, u, unknown, other, or absent
  misc_difference 52: note = a, c, g, u, unknown, other, or absent
  misc_difference 53: note = a, c, g, u, unknown, other, or absent
  misc_difference 54: note = a, c, g, u, unknown, other, or absent
  misc_difference 55: note = a, c, g, u, unknown, other, or absent
  misc_difference 56: note = a, c, g, u, unknown, other, or absent
  misc_difference 57: note = a, c, g, u, unknown, other, or absent
  misc_difference 58: note = a, c, g, u, unknown, other, or absent
  misc_difference 59: note = a, c, g, u, unknown, other, or absent
  misc_difference 60: note = a, c, g, u, unknown, other, or absent
  misc_difference 61: note = a, c, g, u, unknown, other, or absent
  misc_difference 62: note = a, c, g, u, unknown, other, or absent
  misc_difference 63: note = a, c, g, u, unknown, other, or absent
  misc_difference 64: note = a, c, g, u, unknown, other, or absent
  misc_difference 65: note = a, c, g, u, unknown, other, or absent
  misc_difference 66: note = a, c, g, u, unknown, other, or absent
  misc_difference 67: note = a, c, g, u, unknown, other, or absent
  misc_difference 68: note = a, c, g, u, unknown, other, or absent
  misc_difference 69: note = a, c, g, u, unknown, other, or absent
  misc_difference 70: note = a, c, g, u, unknown, other, or absent
  misc_difference 71: note = a, c, g, u, unknown, other, or absent
  misc_difference 72: note = a, c, g, u, unknown, other, or absent
  misc_difference 73: note = a, c, g, u, unknown, other, or absent
  misc_difference 74: note = a, c, g, u, unknown, other, or absent
  misc_difference 75: note = a, c, g, u, unknown, other, or absent
  misc_difference 76: note = a, c, g, u, unknown, other, or absent
  misc_difference 77: note = a, c, g, u, unknown, other, or absent
  misc_difference 78: note = a, c, g, u, unknown, other, or absent
  misc_difference 79: note = a, c, g, u, unknown, other, or absent
  misc_difference 80: note = a, c, g, u, unknown, other, or absent
  misc_difference 81: note = a, c, g, u, unknown, other, or absent
  misc_difference 82: note = a, c, g, u, unknown, other, or absent
  misc_difference 83: note = a, c, g, u, unknown, other, or absent
  misc_difference 84: note = a, c, g, u, unknown, other, or absent
  misc_difference 85: note = a, c, g, u, unknown, other, or absent
  misc_difference 86: note = a, c, g, u, unknown, other, or absent
  misc_difference 87: note = a, c, g, u, unknown, other, or absent
  misc_difference 88: note = a, c, g, u, unknown, other, or absent
  misc_difference 89: note = a, c, g, u, unknown, other, or absent
  misc_difference 90: note = a, c, g, u, unknown, other, or absent
  misc_difference 91: note = a, c, g, u, unknown, other, or absent
  misc_difference 92: note = a, c, g, u, unknown, other, or absent
  misc_difference 93: note = a, c, g, u, unknown, other, or absent
  misc_difference 94: note = a, c, g, u, unknown, other, or absent
  misc_difference 95: note = a, c, g, u, unknown, other, or absent
  misc_difference 96: note = a, c, g, u, unknown, other, or absent
  misc_difference 97: note = a, c, g, u, unknown, other, or absent
  misc_difference 98: note = a, c, g, u, unknown, other, or absent
  misc_difference 99: note = a, c, g, u, unknown, other, or absent
  misc_difference 100: note = a, c, g, u, unknown, other, or absent
  misc_difference 101: note = a, c, g, u, unknown, other, or absent
  misc_difference 102: note = a, c, g, u, unknown, other, or absent
  misc_difference 103: note = a, c, g, u, unknown, other, or absent
  misc_difference 104: note = a, c, g, u, unknown, other, or absent
  misc_difference 105: note = a, c, g, u, unknown, other, or absent
  misc_difference 106: note = a, c, g, u, unknown, other, or absent
  misc_difference 107: note = a, c, g, u, unknown, other, or absent
  misc_difference 108: note = a, c, g, u, unknown, other, or absent
  misc_difference 109: note = a, c, g, u, unknown, other, or absent
  misc_difference 110: note = a, c, g, u, unknown, other, or absent
  misc_difference 111: note = a, c, g, u, unknown, other, or absent
  misc_difference 112: note = a, c, g, u, unknown, other, or absent
  misc_difference 113: note = a, c, g, u, unknown, other, or absent
  misc_difference 114: note = a, c, g, u, unknown, other, or absent
  misc_difference 115: note = a, c, g, u, unknown, other, or absent
  misc_difference 116: note = a, c, g, u, unknown, other, or absent
  misc_difference 117: note = a, c, g, u, unknown, other, or absent
  misc_difference 118: note = a, c, g, u, unknown, other, or absent
  misc_difference 119: note = a, c, g, u, unknown, other, or absent
  misc_difference 120: note = a, c, g, u, unknown, other, or absent
  misc_difference 121: note = a, c, g, u, unknown, other, or absent
  misc_difference 122: note = a, c, g, u, unknown, other, or absent
  misc_difference 123: note = a, c, g, u, unknown, other, or absent
  misc_difference 124: note = a, c, g, u, unknown, other, or absent
  misc_difference 125: note = a, c, g, u, unknown, other, or absent
  misc_difference 126: note = a, c, g, u, unknown, other, or absent
  misc_difference 127: note = a, c, g, u, unknown, other, or absent
  misc_difference 128: note = a, c, g, u, unknown, other, or absent
  misc_difference 129: note = a, c, g, u, unknown, other, or absent
  misc_difference 130: note = a, c, g, u, unknown, other, or absent
  misc_difference 131: note = a, c, g, u, unknown, other, or absent
  misc_difference 132: note = a, c, g, u, unknown, other, or absent
  misc_difference 133: note = a, c, g, u, unknown, other, or absent
  misc_difference 134: note = a, c, g, u, unknown, other, or absent
  misc_difference 135: note = a, c, g, u, unknown, other, or absent
  misc_difference 136: note = a, c, g, u, unknown, other, or absent
  misc_difference 137: note = a, c, g, u, unknown, other, or absent
  misc_difference 138: note = a, c, g, u, unknown, other, or absent
  misc_difference 139: note = a, c, g, u, unknown, other, or absent
  misc_difference 140: note = a, c, g, u, unknown, other, or absent
  misc_difference 141: note = a, c, g, u, unknown, other, or absent
  misc_difference 142: note = a, c, g, u, unknown, other, or absent
  misc_difference 143: note = a, c, g, u, unknown, other, or absent
  misc_difference 144: note = a, c, g, u, unknown, other, or absent
  misc_difference 145: note = a, c, g, u, unknown, other, or absent
  misc_difference 146: note = a, c, g, u, unknown, other, or absent
  misc_difference 147: note = a, c, g, u, unknown, other, or absent
  misc_difference 148: note = a, c, g, u, unknown, other, or absent
  misc_difference 149: note = a, c, g, u, unknown, other, or absent
  misc_difference 150: note = a, c, g, u, unknown, other, or absent
  misc_difference 151: note = a, c, g, u, unknown, other, or absent
  misc_difference 152: note = a, c, g, u, unknown, other, or absent
  misc_difference 153: note = a, c, g, u, unknown, other, or absent
  misc_difference 154: note = a, c, g, u, unknown, other, or absent
  misc_difference 155: note = a, c, g, u, unknown, other, or absent
  misc_difference 156: note = a, c, g, u, unknown, other, or absent
  misc_difference 157: note = a, c, g, u, unknown, other, or absent
  misc_difference 158: note = a, c, g, u, unknown, other, or absent
  misc_difference 159: note = a, c, g, u, unknown, other, or absent
  misc_difference 160: note = a, c, g, u, unknown, other, or absent
  misc_difference 161: note = a, c, g, u, unknown, other, or absent
  misc_difference 162: note = a, c, g, u, unknown, other, or absent
  misc_difference 163: note = a, c, g, u, unknown, other, or absent
  misc_difference 164: note = a, c, g, u, unknown, other, or absent
  misc_difference 165: note = a, c, g, u, unknown, other, or absent
  misc_difference 166: note = a, c, g, u, unknown, other, or absent
  misc_difference 167: note = a, c, g, u, unknown, other, or absent
  misc_difference 168: note = a, c, g, u, unknown, other, or absent
  misc_difference 169: note = a, c, g, u, unknown, other, or absent
  misc_difference 170: note = a, c, g, u, unknown, other, or absent
  misc_difference 171: note = a, c, g, u, unknown, other, or absent
  misc_difference 172: note = a, c, g, u, unknown, other, or absent
  misc_difference 173: note = a, c, g, u, unknown, other, or absent
  misc_difference 174: note = a, c, g, u, unknown, other, or absent
  misc_difference 175: note = a, c, g, u, unknown, other, or absent
  misc_difference 176: note = a, c, g, u, unknown, other, or absent
  misc_difference 177: note = a, c, g, u, unknown, other, or absent
  misc_difference 178: note = a, c, g, u, unknown, other, or absent
  misc_difference 179: note = a, c, g, u, unknown, other, or absent
  misc_difference 180: note = a, c, g, u, unknown, other, or absent
  misc_difference 181: note = a, c, g, u, unknown, other, or absent
  misc_difference 182: note = a, c, g, u, unknown, other, or absent
  misc_difference 183: note = a, c, g, u, unknown, other, or absent
  misc_difference 184: note = a, c, g, u, unknown, other, or absent
  misc_difference 185: note = a, c, g, u, unknown, other, or absent
  misc_difference 186: note = a, c, g, u, unknown, other, or absent
  misc_difference 187: note = a, c, g, u, unknown, other, or absent
  misc_difference 188: note = a, c, g, u, unknown, other, or absent
  misc_difference 189: note = a, c, g, u, unknown, other, or absent
  misc_difference 190: note = a, c, g, u, unknown, other, or absent
  misc_difference 191: note = a, c, g, u, unknown, other, or absent
  misc_difference 192: note = a, c, g, u, unknown, other, or absent
  misc_difference 193: note = a, c, g, u, unknown, other, or absent
  misc_difference 194: note = a, c, g, u, unknown, other, or absent
  misc_difference 195: note = a, c, g, u, unknown, other, or absent
  misc_difference 196: note = a, c, g, u, unknown, other, or absent
  misc_difference 197: note = a, c, g, u, unknown, other, or absent
  misc_difference 198: note = a, c, g, u, unknown, other, or absent
  misc_difference 199: note = a, c, g, u, unknown, other, or absent
  misc_difference 200: note = a, c, g, u, unknown, other, or absent
  misc_difference 201: note = a, c, g, u, unknown, other, or absent
  misc_difference 202: note = a, c, g, u, unknown, other, or absent
  misc_difference 203: note = a, c, g, u, unknown, other, or absent
  misc_difference 204: note = a, c, g, u, unknown, other, or absent
  misc_difference 205: note = a, c, g, u, unknown, other, or absent
  misc_difference 206: note = a, c, g, u, unknown, other, or absent
  misc_difference 207: note = a, c, g, u, unknown, other, or absent
  misc_difference 208: note = a, c, g, u, unknown, other, or absent
  misc_difference 209: note = a, c, g, u, unknown, other, or absent
  misc_difference 210: note = a, c, g, u, unknown, other, or absent
  misc_difference 211: note = a, c, g, u, unknown, other, or absent
  misc_difference 212: note = a, c, g, u, unknown, other, or absent
  misc_difference 213: note = a, c, g, u, unknown, other, or absent
  misc_difference 214: note = a, c, g, u, unknown, other, or absent
  misc_difference 215: note = a, c, g, u, unknown, other, or absent
  misc_difference 216: note = a, c, g, u, unknown, other, or absent
  misc_difference 217: note = a, c, g, u, unknown, other, or absent
  misc_difference 218: note = a, c, g, u, unknown, other, or absent
  misc_difference 219: note = a, c, g, u, unknown, other, or absent
  misc_difference 220: note = a, c, g, u, unknown, other, or absent
  misc_difference 221: note = a, c, g, u, unknown, other, or absent
  misc_difference 222: note = a, c, g, u, unknown, other, or absent
  misc_difference 223: note = a, c, g, u, unknown, other, or absent
  misc_difference 224: note = a, c, g, u, unknown, other, or absent
  misc_difference 225: note = a, c, g, u, unknown, other, or absent
  misc_difference 226: note = a, c, g, u, unknown, other, or absent
  misc_difference 227: note = a, c, g, u, unknown, other, or absent
  misc_difference 228: note = a, c, g, u, unknown, other, or absent
  misc_difference 229: note = a, c, g, u, unknown, other, or absent
  misc_difference 230: note = a, c, g, u, unknown, other, or absent
  misc_difference 231: note = a, c, g, u, unknown, other, or absent
  misc_difference 232: note = a, c, g, u, unknown, other, or absent
  misc_difference 233: note = a, c, g, u, unknown, other, or absent
  misc_difference 234: note = a, c, g, u, unknown, other, or absent
  misc_difference 235: note = a, c, g, u, unknown, other, or absent
  misc_difference 236: note = a, c, g, u, unknown, other, or absent
  misc_difference 237: note = a, c, g, u, unknown, other, or absent
  misc_difference 238: note = a, c, g, u, unknown, other, or absent
  misc_difference 239: note = a, c, g, u, unknown, other, or absent
  misc_difference 240: note = a, c, g, u, unknown, other, or absent
  misc_difference 241: note = a, c, g, u, unknown, other, or absent
  misc_difference 242: note = a, c, g, u, unknown, other, or absent
  misc_difference 243: note = a, c, g, u, unknown, other, or absent
  misc_difference 244: note = a, c, g, u, unknown, other, or absent
  misc_difference 245: note = a, c, g, u, unknown, other, or absent
  misc_difference 246: note = a, c, g, u, unknown, other, or absent
  misc_difference 247: note = a, c, g, u, unknown, other, or absent
  misc_difference 248: note = a, c, g, u, unknown, other, or absent
  misc_difference 249: note = a, c, g, u, unknown, other, or absent
  misc_difference 250: note = a, c, g, u, unknown, other, or absent
  misc_difference 251: note = a, c, g, u, unknown, other, or absent
  misc_difference 252: note = a, c, g, u, unknown, other, or absent
  misc_difference 253: note = a, c, g, u, unknown, other, or absent
  misc_difference 254: note = a, c, g, u, unknown, other, or absent
  misc_difference 255: note = a, c, g, u, unknown, other, or absent
  misc_difference 256: note = a, c, g, u, unknown, other, or absent
  misc_difference 257: note = a, c, g, u, unknown, other, or absent
  misc_difference 258: note = a, c, g, u, unknown, other, or absent
  misc_difference 259: note = a, c, g, u, unknown, other, or absent
  misc_difference 260: note = a, c, g, u, unknown, other, or absent
  misc_difference 261: note = a, c, g, u, unknown, other, or absent
  misc_difference 262: note = a, c, g, u, unknown, other, or absent
  misc_difference 263: note = a, c, g, u, unknown, other, or absent
  misc_difference 264: note = a, c, g, u, unknown, other, or absent
  misc_difference 265: note = a, c, g, u, unknown, other, or absent
  misc_difference 266: note = a, c, g, u, unknown, other, or absent
  misc_difference 267: note = a, c, g, u, unknown, other, or absent
  misc_difference 268: note = a, c, g, u, unknown, other, or absent
  misc_difference 269: note = a, c, g, u, unknown, other, or absent
  misc_difference 270: note = a, c, g, u, unknown, other, or absent
  misc_difference 271: note = a, c, g, u, unknown, other, or absent
  misc_difference 272: note = a, c, g, u, unknown, other, or absent
  misc_difference 273: note = a, c, g, u, unknown, other, or absent
  misc_difference 274: note = a, c, g, u, unknown, other, or absent
  misc_difference 275: note = a, c, g, u, unknown, other, or absent
  misc_difference 276: note = a, c, g, u, unknown, other, or absent
  misc_difference 277: note = a, c, g, u, unknown, other, or absent
  misc_difference 278: note = a, c, g, u, unknown, other, or absent
  misc_difference 279: note = a, c, g, u, unknown, other, or absent
  misc_difference 280: note = a, c, g, u, unknown, other, or absent
  misc_difference 281: note = a, c, g, u, unknown, other, or absent
  misc_difference 282: note = a, c, g, u, unknown, other, or absent
  misc_difference 283: note = a, c, g, u, unknown, other, or absent
  misc_difference 284: note = a, c, g, u, unknown, other, or absent
  misc_difference 285: note = a, c, g, u, unknown, other, or absent
  misc_difference 286: note = a, c, g, u, unknown, other, or absent
  misc_difference 287: note = a, c, g, u, unknown, other, or absent
  misc_difference 288: note = a, c, g, u, unknown, other, or absent
  misc_difference 289: note = a, c, g, u, unknown, other, or absent
  misc_difference 290: note = a, c, g, u, unknown, other, or absent
  misc_difference 291: note = a, c, g, u, unknown, other, or absent
  misc_difference 292: note = a, c, g, u, unknown, other, or absent
  misc_difference 293: note = a, c, g, u, unknown, other, or absent
  misc_difference 294: note = a, c, g, u, unknown, other, or absent
  misc_difference 295: note = a, c, g, u, unknown, other, or absent
  misc_difference 296: note = a, c, g, u, unknown, other, or absent
  misc_difference 297: note = a, c, g, u, unknown, other, or absent
  misc_difference 298: note = a, c, g, u, unknown, other, or absent
  misc_difference 299: note = a, c, g, u, unknown, other, or absent
  misc_difference 300: note = a, c, g, u, unknown, other, or absent
  misc_difference 301: note = a, c, g, u, unknown, other, or absent
  misc_difference 302: note = a, c, g, u, unknown, other, or absent
  misc_difference 303: note = a, c, g, u, unknown, other, or absent
  misc_difference 304: note = a, c, g, u, unknown, other, or absent
  misc_difference 305: note = a, c, g, u, unknown, other, or absent
  misc_difference 306: note = a, c, g, u, unknown, other, or absent
  misc_difference 307: note = a, c, g, u, unknown, other, or absent
  misc_difference 308: note = a, c, g, u, unknown, other, or absent
  misc_difference 309: note = a, c, g, u, unknown, other, or absent
  misc_difference 310: note = a, c, g, u, unknown, other, or absent
  misc_difference 311: note = a, c, g, u, unknown, other, or absent
  misc_difference 312: note = a, c, g, u, unknown, other, or absent
  misc_difference 313: note = a, c, g, u, unknown, other, or absent
  misc_difference 314: note = a, c, g, u, unknown, other, or absent
  misc_difference 315: note = a, c, g, u, unknown, other, or absent
  misc_difference 316: note = May be absent
  misc_difference 317: note = May be absent
  misc_difference 318: note = May be absent
  misc_difference 319: note = May be absent
  misc_difference 320: note = May be absent
  misc_difference 321: note = May be absent
  misc_difference 322: note = May be absent
  misc_difference 323: note = May be absent
  misc_difference 324: note = May be absent
  misc_difference 325: note = May be absent
  misc_difference 326: note = May be absent
  misc_difference 327: note = May be absent
  misc_difference 328: note = May be absent
  misc_difference 329: note = May be absent
  misc_difference 330: note = May be absent
  misc_difference 331: note = May be absent
  misc_difference 332: note = May be absent
  misc_difference 333: note = May be absent
  misc_difference 334: note = May be absent
  misc_difference 335: note = May be absent
  misc_difference 336: note = May be absent
  misc_difference 337: note = May be absent
  misc_difference 338: note = May be absent
  misc_difference 339: note = May be absent
  misc_difference 340: note = May be absent
  misc_difference 45..316: note = This region may encompass 1-271 nucleotides
gggsryrkrgytyasntgrktagagcayttgactgcaratcmarnnnnnnnnnnnnnnnnnnnnnnnnnnnnnnnnnnnnnnnnnnnnnnnnnnnnnnnnnnnnnnnnnnnnnnnnnnnnnnnnnnnnnnnnnnnnnnnnnnnnnnnnnnnnnnnnnnnnnnnnnnnnnnnnnnnnnnnnnnnnnnnnnnnnnnnnnnnnnnnnnnnnnnnnnnnnnnnnnnnnnnnnnnnnnnnnnnnnnnnnnnnnnnnnnnnnnnnnnnnnnnnnnnnnnnnnnnnnnnnnnnnnnnnnnnnnnnnnnnnnnnnnnnnnnnnyyyrrttcraatyyvgktrcycmyy

SEQ ID NO: 577 - RNA, 341 nt, synthetic construct
  source 1..341: mol_type = other RNA
  misc_difference 1: note = May be absent
  misc_difference 2: note = a, c, g, u, unknown, other, or absent
  misc_difference 3: note = May be absent
  misc_difference 4: note = a, c, g, u, unknown, other, or absent
  misc_difference 5: note = a, c, g, u, unknown, other, or absent
  misc_difference 6: note = a, c, g, u, unknown, other, or absent
  misc_difference 7: note = May be absent
  misc_difference 8: note = May be absent
  misc_difference 9: note = May be absent
  misc_difference 10: note = May be absent
  misc_difference 11: note = May be absent
  misc_difference 12: note = a, c, g, u, unknown, other, or absent
  misc_difference 13: note = a, c, g, u, unknown, other, or absent
  misc_difference 14: note = May be absent
  misc_difference 15: note = May be absent
  misc_difference 16: note = a, c, g, u, unknown, other, or absent
  misc_difference 17: note = May be absent
  misc_difference 18: note = May be absent
  misc_difference 19: note = May be absent
  misc_difference 20: note = a, c, g, u, unknown, other, or absent
  misc_difference 21: note = a, c, g, u, unknown, other, or absent
  misc_difference 22: note = May be absent
  misc_difference 23: note = May be absent
  misc_difference 24: note = a, c, g, u, unknown, other, or absent
  misc_difference 25: note = May be absent
  misc_difference 26: note = May be absent
  misc_difference 27: note = May be absent
  misc_difference 28: note = a, c, g, u, unknown, other, or absent
  misc_difference 29: note = a, c, g, u, unknown, other, or absent
  misc_difference 30: note = a, c, g, u, unknown, other, or absent
  misc_difference 31: note = a, c, g, u, unknown, other, or absent
  misc_difference 32: note = May be absent
  misc_difference 33: note = a, c, g, u, unknown, other, or absent
  misc_difference 34: note = May be absent
  misc_difference 35: note = May be absent
  misc_difference 36: note = May be absent
  misc_difference 37: note = May be absent
  misc_difference 38: note = May be absent
  misc_difference 39: note = May be absent
  misc_difference 40: note = a, c, g, u, unknown, other, or absent
  misc_difference 41: note = a, c, g, u, unknown, other, or absent
  misc_difference 42: note = May be absent
  misc_difference 43: note = a, c, g, u, unknown, other, or absent
  misc_difference 44: note = a, c, g, u, unknown, other, or absent
  misc_difference 45: note = a, c, g, u, unknown, other, or absent
  misc_difference 46: note = a, c, g, u, unknown, other, or absent
  misc_difference 47: note = a, c, g, u, unknown, other, or absent
  misc_difference 48: note = a, c, g, u, unknown, other, or absent
  misc_difference 49: note = a, c, g, u, unknown, other, or absent
  misc_difference 50: note = a, c, g, u, unknown, other, or absent
  misc_difference 51: note = a, c, g, u, unknown, other, or absent
  misc_difference 52: note = a, c, g, u, unknown, other, or absent
  misc_difference 53: note = a, c, g, u, unknown, other, or absent
  misc_difference 54: note = a, c, g, u, unknown, other, or absent
  misc_difference 55: note = a, c, g, u, unknown, other, or absent
  misc_difference 56: note = a, c, g, u, unknown, other, or absent
  misc_difference 57: note = a, c, g, u, unknown, other, or absent
  misc_difference 58: note = a, c, g, u, unknown, other, or absent
  misc_difference 59: note = a, c, g, u, unknown, other, or absent
  misc_difference 60: note = a, c, g, u, unknown, other, or absent
  misc_difference 61: note = a, c, g, u, unknown, other, or absent
  misc_difference 62: note = a, c, g, u, unknown, other, or absent
  misc_difference 63: note = a, c, g, u, unknown, other, or absent
  misc_difference 64: note = a, c, g, u, unknown, other, or absent
  misc_difference 65: note = a, c, g, u, unknown, other, or absent
  misc_difference 66: note = a, c, g, u, unknown, other, or absent
  misc_difference 67: note = a, c, g, u, unknown, other, or absent
  misc_difference 68: note = a, c, g, u, unknown, other, or absent
  misc_difference 69: note = a, c, g, u, unknown, other, or absent
  misc_difference 70: note = a, c, g, u, unknown, other, or absent
  misc_difference 71: note = a, c, g, u, unknown, other, or absent
  misc_difference 72: note = a, c, g, u, unknown, other, or absent
  misc_difference 73: note = a, c, g, u, unknown, other, or absent
  misc_difference 74: note = a, c, g, u, unknown, other, or absent
  misc_difference 75: note = a, c, g, u, unknown, other, or absent
  misc_difference 76: note = a, c, g, u, unknown, other, or absent
  misc_difference 77: note = a, c, g, u, unknown, other, or absent
  misc_difference 78: note = a, c, g, u, unknown, other, or absent
  misc_difference 79: note = a, c, g, u, unknown, other, or absent
  misc_difference 80: note = a, c, g, u, unknown, other, or absent
  misc_difference 81: note = a, c, g, u, unknown, other, or absent
  misc_difference 82: note = a, c, g, u, unknown, other, or absent
  misc_difference 83: note = a, c, g, u, unknown, other, or absent
  misc_difference 84: note = a, c, g, u, unknown, other, or absent
  misc_difference 85: note = a, c, g, u, unknown, other, or absent
  misc_difference 86: note = a, c, g, u, unknown, other, or absent
  misc_difference 87: note = a, c, g, u, unknown, other, or absent
  misc_difference 88: note = a, c, g, u, unknown, other, or absent
  misc_difference 89: note = a, c, g, u, unknown, other, or absent
  misc_difference 90: note = a, c, g, u, unknown, other, or absent
  misc_difference 91: note = a, c, g, u, unknown, other, or absent
  misc_difference 92: note = a, c, g, u, unknown, other, or absent
  misc_difference 93: note = a, c, g, u, unknown, other, or absent
  misc_difference 94: note = a, c, g, u, unknown, other, or absent
  misc_difference 95: note = a, c, g, u, unknown, other, or absent
  misc_difference 96: note = a, c, g, u, unknown, other, or absent
  misc_difference 97: note = a, c, g, u, unknown, other, or absent
  misc_difference 98: note = a, c, g, u, unknown, other, or absent
  misc_difference 99: note = a, c, g, u, unknown, other, or absent
  misc_difference 100: note = a, c, g, u, unknown, other, or absent
  misc_difference 101: note = a, c, g, u, unknown, other, or absent
  misc_difference 102: note = a, c, g, u, unknown, other, or absent
  misc_difference 103: note = a, c, g, u, unknown, other, or absent
  misc_difference 104: note = a, c, g, u, unknown, other, or absent
  misc_difference 105: note = a, c, g, u, unknown, other, or absent
  misc_difference 106: note = a, c, g, u, unknown, other, or absent
  misc_difference 107: note = a, c, g, u, unknown, other, or absent
  misc_difference 108: note = a, c, g, u, unknown, other, or absent
  misc_difference 109: note = a, c, g, u, unknown, other, or absent
  misc_difference 110: note = a, c, g, u, unknown, other, or absent
  misc_difference 111: note = a, c, g, u, unknown, other, or absent
  misc_difference 112: note = a, c, g, u, unknown, other, or absent
  misc_difference 113: note = a, c, g, u, unknown, other, or absent
  misc_difference 114: note = a, c, g, u, unknown, other, or absent
  misc_difference 115: note = a, c, g, u, unknown, other, or absent
  misc_difference 116: note = a, c, g, u, unknown, other, or absent
  misc_difference 117: note = a, c, g, u, unknown, other, or absent
  misc_difference 118: note = a, c, g, u, unknown, other, or absent
  misc_difference 119: note = a, c, g, u, unknown, other, or absent
  misc_difference 120: note = a, c, g, u, unknown, other, or absent
  misc_difference 121: note = a, c, g, u, unknown, other, or absent
  misc_difference 122: note = a, c, g, u, unknown, other, or absent
  misc_difference 123: note = a, c, g, u, unknown, other, or absent
  misc_difference 124: note = a, c, g, u, unknown, other, or absent
  misc_difference 125: note = a, c, g, u, unknown, other, or absent
  misc_difference 126: note = a, c, g, u, unknown, other, or absent
  misc_difference 127: note = a, c, g, u, unknown, other, or absent
  misc_difference 128: note = a, c, g, u, unknown, other, or absent
  misc_difference 129: note = a, c, g, u, unknown, other, or absent
  misc_difference 130: note = a, c, g, u, unknown, other, or absent
  misc_difference 131: note = a, c, g, u, unknown, other, or absent
  misc_difference 132: note = a, c, g, u, unknown, other, or absent
  misc_difference 133: note = a, c, g, u, unknown, other, or absent
  misc_difference 134: note = a, c, g, u, unknown, other, or absent
  misc_difference 135: note = a, c, g, u, unknown, other, or absent
  misc_difference 136: note = a, c, g, u, unknown, other, or absent
  misc_difference 137: note = a, c, g, u, unknown, other, or absent
  misc_difference 138: note = a, c, g, u, unknown, other, or absent
  misc_difference 139: note = a, c, g, u, unknown, other, or absent
  misc_difference 140: note = a, c, g, u, unknown, other, or absent
  misc_difference 141: note = a, c, g, u, unknown, other, or absent
  misc_difference 142: note = a, c, g, u, unknown, other, or absent
  misc_difference 143: note = a, c, g, u, unknown, other, or absent
  misc_difference 144: note = a, c, g, u, unknown, other, or absent
  misc_difference 145: note = a, c, g, u, unknown, other, or absent
  misc_difference 146: note = a, c, g, u, unknown, other, or absent
  misc_difference 147: note = a, c, g, u, unknown, other, or absent
  misc_difference 148: note = a, c, g, u, unknown, other, or absent
  misc_difference 149: note = a, c, g, u, unknown, other, or absent
  misc_difference 150: note = a, c, g, u, unknown, other, or absent
  misc_difference 151: note = a, c, g, u, unknown, other, or absent
  misc_difference 152: note = a, c, g, u, unknown, other, or absent
  misc_difference 153: note = a, c, g, u, unknown, other, or absent
  misc_difference 154: note = a, c, g, u, unknown, other, or absent
  misc_difference 155: note = a, c, g, u, unknown, other, or absent
  misc_difference 156: note = a, c, g, u, unknown, other, or absent
  misc_difference 157: note = a, c, g, u, unknown, other, or absent
  misc_difference 158: note = a, c, g, u, unknown, other, or absent
  misc_difference 159: note = a, c, g, u, unknown, other, or absent
  misc_difference 160: note = a, c, g, u, unknown, other, or absent
  misc_difference 161: note = a, c, g, u, unknown, other, or absent
  misc_difference 162: note = a, c, g, u, unknown, other, or absent
  misc_difference 163: note = a, c, g, u, unknown, other, or absent
  misc_difference 164: note = a, c, g, u, unknown, other, or absent
  misc_difference 165: note = a, c, g, u, unknown, other, or absent
  misc_difference 166: note = a, c, g, u, unknown, other, or absent
  misc_difference 167: note = a, c, g, u, unknown, other, or absent
  misc_difference 168: note = a, c, g, u, unknown, other, or absent
  misc_difference 169: note = a, c, g, u, unknown, other, or absent
  misc_difference 170: note = a, c, g, u, unknown, other, or absent
  misc_difference 171: note = a, c, g, u, unknown, other, or absent
  misc_difference 172: note = a, c, g, u, unknown, other, or absent
  misc_difference 173: note = a, c, g, u, unknown, other, or absent
  misc_difference 174: note = a, c, g, u, unknown, other, or absent
  misc_difference 175: note = a, c, g, u, unknown, other, or absent
  misc_difference 176: note = a, c, g, u, unknown, other, or absent
  misc_difference 177: note = a, c, g, u, unknown, other, or absent
  misc_difference 178: note = a, c, g, u, unknown, other, or absent
  misc_difference 179: note = a, c, g, u, unknown, other, or absent
  misc_difference 180: note = a, c, g, u, unknown, other, or absent
  misc_difference 181: note = a, c, g, u, unknown, other, or absent
  misc_difference 182: note = a, c, g, u, unknown, other, or absent
  misc_difference 183: note = a, c, g, u, unknown, other, or absent
  misc_difference 184: note = a, c, g, u, unknown, other, or absent
  misc_difference 185: note = a, c, g, u, unknown, other, or absent
  misc_difference 186: note = a, c, g, u, unknown, other, or absent
  misc_difference 187: note = a, c, g, u, unknown, other, or absent
  misc_difference 188: note = a, c, g, u, unknown, other, or absent
  misc_difference 189: note = a, c, g, u, unknown, other, or absent
  misc_difference 190: note = a, c, g, u, unknown, other, or absent
  misc_difference 191: note = a, c, g, u, unknown, other, or absent
  misc_difference 192: note = a, c, g, u, unknown, other, or absent
  misc_difference 193: note = a, c, g, u, unknown, other, or absent
  misc_difference 194: note = a, c, g, u, unknown, other, or absent
  misc_difference 195: note = a, c, g, u, unknown, other, or absent
  misc_difference 196: note = a, c, g, u, unknown, other, or absent
  misc_difference 197: note = a, c, g, u, unknown, other, or absent
  misc_difference 198: note = a, c, g, u, unknown, other, or absent
  misc_difference 199: note = a, c, g, u, unknown, other, or absent
  misc_difference 200: note = a, c, g, u, unknown, other, or absent
  misc_difference 201: note = a, c, g, u, unknown, other, or absent
  misc_difference 202: note = a, c, g, u, unknown, other, or absent
  misc_difference 203: note = a, c, g, u, unknown, other, or absent
  misc_difference 204: note = a, c, g, u, unknown, other, or absent
  misc_difference 205: note = a, c, g, u, unknown, other, or absent
  misc_difference 206: note = a, c, g, u, unknown, other, or absent
  misc_difference 207: note = a, c, g, u, unknown, other, or absent
  misc_difference 208: note = a, c, g, u, unknown, other, or absent
  misc_difference 209: note = a, c, g, u, unknown, other, or absent
  misc_difference 210: note = a, c, g, u, unknown, other, or absent
  misc_difference 211: note = a, c, g, u, unknown, other, or absent
  misc_difference 212: note = a, c, g, u, unknown, other, or absent
  misc_difference 213: note = a, c, g, u, unknown, other, or absent
  misc_difference 214: note = a, c, g, u, unknown, other, or absent
  misc_difference 215: note = a, c, g, u, unknown, other, or absent
  misc_difference 216: note = a, c, g, u, unknown, other, or absent
  misc_difference 217: note = a, c, g, u, unknown, other, or absent
  misc_difference 218: note = a, c, g, u, unknown, other, or absent
  misc_difference 219: note = a, c, g, u, unknown, other, or absent
  misc_difference 220: note = a, c, g, u, unknown, other, or absent
  misc_difference 221: note = a, c, g, u, unknown, other, or absent
  misc_difference 222: note = a, c, g, u, unknown, other, or absent
  misc_difference 223: note = a, c, g, u, unknown, other, or absent
  misc_difference 224: note = a, c, g, u, unknown, other, or absent
  misc_difference 225: note = a, c, g, u, unknown, other, or absent
  misc_difference 226: note = a, c, g, u, unknown, other, or absent
  misc_difference 227: note = a, c, g, u, unknown, other, or absent
  misc_difference 228: note = a, c, g, u, unknown, other, or absent
  misc_difference 229: note = a, c, g, u, unknown, other, or absent
  misc_difference 230: note = a, c, g, u, unknown, other, or absent
  misc_difference 231: note = a, c, g, u, unknown, other, or absent
  misc_difference 232: note = a, c, g, u, unknown, other, or absent
  misc_difference 233: note = a, c, g, u, unknown, other, or absent
  misc_difference 234: note = a, c, g, u, unknown, other, or absent
  misc_difference 235: note = a, c, g, u, unknown, other, or absent
  misc_difference 236: note = a, c, g, u, unknown, other, or absent
  misc_difference 237: note = a, c, g, u, unknown, other, or absent
  misc_difference 238: note = a, c, g, u, unknown, other, or absent
  misc_difference 239: note = a, c, g, u, unknown, other, or absent
  misc_difference 240: note = a, c, g, u, unknown, other, or absent
  misc_difference 241: note = a, c, g, u, unknown, other, or absent
  misc_difference 242: note = a, c, g, u, unknown, other, or absent
  misc_difference 243: note = a, c, g, u, unknown, other, or absent
  misc_difference 244: note = a, c, g, u, unknown, other, or absent
  misc_difference 245: note = a, c, g, u, unknown, other, or absent
  misc_difference 246: note = a, c, g, u, unknown, other, or absent
  misc_difference 247: note = a, c, g, u, unknown, other, or absent
  misc_difference 248: note = a, c, g, u, unknown, other, or absent
  misc_difference 249: note = a, c, g, u, unknown, other, or absent
  misc_difference 250: note = a, c, g, u, unknown, other, or absent
  misc_difference 251: note = a, c, g, u, unknown, other, or absent
  misc_difference 252: note = a, c, g, u, unknown, other, or absent
  misc_difference 253: note = a, c, g, u, unknown, other, or absent
  misc_difference 254: note = a, c, g, u, unknown, other, or absent
  misc_difference 255: note = a, c, g, u, unknown, other, or absent
  misc_difference 256: note = a, c, g, u, unknown, other, or absent
  misc_difference 257: note = a, c, g, u, unknown, other, or absent
  misc_difference 258: note = a, c, g, u, unknown, other, or absent
  misc_difference 259: note = a, c, g, u, unknown, other, or absent
  misc_difference 260: note = a, c, g, u, unknown, other, or absent
  misc_difference 261: note = a, c, g, u, unknown, other, or absent
  misc_difference 262: note = a, c, g, u, unknown, other, or absent
  misc_difference 263: note = a, c, g, u, unknown, other, or absent
  misc_difference 264: note = a, c, g, u, unknown, other, or absent
  misc_difference 265: note = a, c, g, u, unknown, other, or absent
  misc_difference 266: note = a, c, g, u, unknown, other, or absent
  misc_difference 267: note = a, c, g, u, unknown, other, or absent
  misc_difference 268: note = a, c, g, u, unknown, other, or absent
  misc_difference 269: note = a, c, g, u, unknown, other, or absent
  misc_difference 270: note = a, c, g, u, unknown, other, or absent
  misc_difference 271: note = a, c, g, u, unknown, other, or absent
  misc_difference 272: note = a, c, g, u, unknown, other, or absent
  misc_difference 273: note = a, c, g, u, unknown, other, or absent
  misc_difference 274: note = a, c, g, u, unknown, other, or absent
  misc_difference 275: note = a, c, g, u, unknown, other, or absent
  misc_difference 276: note = a, c, g, u, unknown, other, or absent
  misc_difference 277: note = a, c, g, u, unknown, other, or absent
  misc_difference 278: note = a, c, g, u, unknown, other, or absent
  misc_difference 279: note = a, c, g, u, unknown, other, or absent
  misc_difference 280: note = a, c, g, u, unknown, other, or absent
  misc_difference 281: note = a, c, g, u, unknown, other, or absent
  misc_difference 282: note = a, c, g, u, unknown, other, or absent
  misc_difference 283: note = a, c, g, u, unknown, other, or absent
  misc_difference 284: note = a, c, g, u, unknown, other, or absent
  misc_difference 285: note = a, c, g, u, unknown, other, or absent
  misc_difference 286: note = a, c, g, u, unknown, other, or absent
  misc_difference 287: note = a, c, g, u, unknown, other, or absent
  misc_difference 288: note = a, c, g, u, unknown, other, or absent
  misc_difference 289: note = a, c, g, u, unknown, other, or absent
  misc_difference 290: note = a, c, g, u, unknown, other, or absent
  misc_difference 291: note = a, c, g, u, unknown, other, or absent
  misc_difference 292: note = a, c, g, u, unknown, other, or absent
  misc_difference 293: note = a, c, g, u, unknown, other, or absent
  misc_difference 294: note = a, c, g, u, unknown, other, or absent
  misc_difference 295: note = a, c, g, u, unknown, other, or absent
  misc_difference 296: note = a, c, g, u, unknown, other, or absent
  misc_difference 297: note = a, c, g, u, unknown, other, or absent
  misc_difference 298: note = a, c, g, u, unknown, other, or absent
  misc_difference 299: note = a, c, g, u, unknown, other, or absent
  misc_difference 300: note = a, c, g, u, unknown, other, or absent
  misc_difference 301: note = a, c, g, u, unknown, other, or absent
  misc_difference 302: note = a, c, g, u, unknown, other, or absent
  misc_difference 303: note = a, c, g, u, unknown, other, or absent
  misc_difference 304: note = a, c, g, u, unknown, other, or absent
  misc_difference 305: note = a, c, g, u, unknown, other, or absent
  misc_difference 306: note = a, c, g, u, unknown, other, or absent
  misc_difference 307: note = a, c, g, u, unknown, other, or absent
  misc_difference 308: note = a, c, g, u, unknown, other, or absent
  misc_difference 309: note = a, c, g, u, unknown, other, or absent
  misc_difference 310: note = a, c, g, u, unknown, other, or absent
  misc_difference 311: note = a, c, g, u, unknown, other, or absent
  misc_difference 312: note = a, c, g, u, unknown, other, or absent
  misc_difference 313: note = a, c, g, u, unknown, other, or absent
  misc_difference 314: note = a, c, g, u, unknown, other, or absent
  misc_difference 315: note = a, c, g, u, unknown, other, or absent
  misc_difference 316: note = a, c, g, u, unknown, other, or absent
  misc_difference 317: note = a, c, g, u, unknown, other, or absent
  misc_difference 318: note = a, c, g, u, unknown, other, or absent
  misc_difference 319: note = a, c, g, u, unknown, other, or absent
  misc_difference 320: note = May be absent
  misc_difference 321: note = May be absent
  misc_difference 322: note = May be absent
  misc_difference 323: note = May be absent
  misc_difference 324: note = May be absent
  misc_difference 325: note = May be absent
  misc_difference 326: note = May be absent
  misc_difference 327: note = a, c, g, u, unknown, other, or absent
  misc_difference 328: note = May be absent
  misc_difference 329: note = May be absent
  misc_difference 330: note = May be absent
  misc_difference 331: note = a, c, g, u, unknown, other, or absent
  misc_difference 332: note = a, c, g, u, unknown, other, or absent
  misc_difference 333: note = May be absent
  misc_difference 334: note = May be absent
  misc_difference 335: note = a, c, g, u, unknown, other, or absent
  misc_difference 336: note = a, c, g, u, unknown, other, or absent
  misc_difference 337: note = a, c, g, u, unknown, other, or absent
  misc_difference 338: note = a, c, g, u, unknown, other, or absent
  misc_difference 339: note = a, c, g, u, unknown, other, or absent
  misc_difference 340: note = May be absent
  misc_difference 341: note = May be absent
  misc_difference 43..314: note = This region may encompass 1-271 nucleotides
dnbnnndtvgbnnarnhggnnhanvvynnnnvnytbtkrnnhnnnnnnnnnnnnnnnnnnnnnnnnnnnnnnnnnnnnnnnnnnnnnnnnnnnnnnnnnnnnnnnnnnnnnnnnnnnnnnnnnnnnnnnnnnnnnnnnnnnnnnnnnnnnnnnnnnnnnnnnnnnnnnnnnnnnnnnnnnnnnnnnnnnnnnnnnnnnnnnnnnnnnnnnnnnnnnnnnnnnnnnnnnnnnnnnnnnnnnnnnnnnnnnnnnnnnnnnnnnnnnnnnnnnnnnnnnnnnnnnnnnnnnnnnnnnnnnnnnnnnnnnnnnnnnnnnnnnnrrttyvanybynnbhnnnnnhd

SEQ ID NO: 578 - RNA, 340 nt, synthetic construct
  source 1..340: mol_type = other RNA
  misc_difference 1: note = May be absent
  misc_difference 2: note = May be absent
  misc_difference 3: note = May be absent
  misc_difference 4: note = a, c, g, u, unknown, other, or absent
  misc_difference 5: note = a, c, g, u, unknown, other, or absent
  misc_difference 6: note = May be absent
  misc_difference 7: note = May be absent
  misc_difference 8: note = May be absent
  misc_difference 9: note = May be absent
  misc_difference 10: note = May be absent
  misc_difference 11: note = May be absent
  misc_difference 12: note = a, c, g, u, unknown, other, or absent
  misc_difference 13: note = May be absent
  misc_difference 14: note = May be absent
  misc_difference 15: note = May be absent
  misc_difference 16: note = May be absent
  misc_difference 17: note = May be absent
  misc_difference 18: note = May be absent
  misc_difference 19: note = May be absent
  misc_difference 20: note = May be absent
  misc_difference 21: note = a, c, g, u, unknown, other, or absent
  misc_difference 22: note = May be absent
  misc_difference 23: note = May be absent
  misc_difference 24: note = May be absent
  misc_difference 25: note = May be absent
  misc_difference 26: note = May be absent
  misc_difference 27: note = a, c, g, u, unknown, other, or absent
  misc_difference 28: note = a, c, g, u, unknown, other, or absent
  misc_difference 29: note = May be absent
  misc_difference 30: note = May be absent
  misc_difference 31: note = May be absent
  misc_difference 32: note = May be absent
  misc_difference 33: note = May be absent
  misc_difference 34: note = May be absent
  misc_difference 35: note = May be absent
  misc_difference 36: note = May be absent
  misc_difference 37: note = May be absent
  misc_difference 38: note = May be absent
  misc_difference 39: note = May be absent
  misc_difference 40: note = May be absent
  misc_difference 41: note = May be absent
  misc_difference 42: note = May be absent
  misc_difference 43: note = May be absent
  misc_difference 44: note = May be absent
  misc_difference 45: note = a, c, g, u, unknown, other, or absent
  misc_difference 46: note = a, c, g, u, unknown, other, or absent
  misc_difference 47: note = a, c, g, u, unknown, other, or absent
  misc_difference 48: note = a, c, g, u, unknown, other, or absent
  misc_difference 49: note = a, c, g, u, unknown, other, or absent
  misc_difference 50: note = a, c, g, u, unknown, other, or absent
  misc_difference 51: note = a, c, g, u, unknown, other, or absent
  misc_difference 52: note = a, c, g, u, unknown, other, or absent
  misc_difference 53: note = a, c, g, u, unknown, other, or absent
  misc_difference 54: note = a, c, g, u, unknown, other, or absent
  misc_difference 55: note = a, c, g, u, unknown, other, or absent
  misc_difference 56: note = a, c, g, u, unknown, other, or absent
  misc_difference 57: note = a, c, g, u, unknown, other, or absent
  misc_difference 58: note = a, c, g, u, unknown, other, or absent
  misc_difference 59: note = a, c, g, u, unknown, other, or absent
  misc_difference 60: note = a, c, g, u, unknown, other, or absent
  misc_difference 61: note = a, c, g, u, unknown, other, or absent
  misc_difference 62: note = a, c, g, u, unknown, other, or absent
  misc_difference 63: note = a, c, g, u, unknown, other, or absent
  misc_difference 64: note = a, c, g, u, unknown, other, or absent
  misc_difference 65: note = a, c, g, u, unknown, other, or absent
  misc_difference 66: note = a, c, g, u, unknown, other, or absent
  misc_difference 67: note = a, c, g, u, unknown, other, or absent
  misc_difference 68: note = a, c, g, u, unknown, other, or absent
  misc_difference 69: note = a, c, g, u, unknown, other, or absent
  misc_difference 70: note = a, c, g, u, unknown, other, or absent
  misc_difference 71: note = a, c, g, u, unknown, other, or absent
  misc_difference 72: note = a, c, g, u, unknown, other, or absent
  misc_difference 73: note = a, c, g, u, unknown, other, or absent
  misc_difference 74: note = a, c, g, u, unknown, other, or absent
  misc_difference 75: note = a, c, g, u, unknown, other, or absent
  misc_difference 76: note = a, c, g, u, unknown, other, or absent
  misc_difference 77: note = a, c, g, u, unknown, other, or absent
  misc_difference 78: note = a, c, g, u, unknown, other, or absent
  misc_difference 79: note = a, c, g, u, unknown, other, or absent
  misc_difference 80: note = a, c, g, u, unknown, other, or absent
  misc_difference 81: note = a, c, g, u, unknown, other, or absent
  misc_difference 82: note = a, c, g, u, unknown, other, or absent
  misc_difference 83: note = a, c, g, u, unknown, other, or absent
  misc_difference 84: note = a, c, g, u, unknown, other, or absent
  misc_difference 85: note = a, c, g, u, unknown, other, or absent
  misc_difference 86: note = a, c, g, u, unknown, other, or absent
  misc_difference 87: note = a, c, g, u, unknown, other, or absent
  misc_difference 88: note = a, c, g, u, unknown, other, or absent
  misc_difference 89: note = a, c, g, u, unknown, other, or absent
  misc_difference 90: note = a, c, g, u, unknown, other, or absent
  misc_difference 91: note = a, c, g, u, unknown, other, or absent
  misc_difference 92: note = a, c, g, u, unknown, other, or absent
  misc_difference 93: note = a, c, g, u, unknown, other, or absent
  misc_difference 94: note = a, c, g, u, unknown, other, or absent
  misc_difference 95: note = a, c, g, u, unknown, other, or absent
  misc_difference 96: note = a, c, g, u, unknown, other, or absent
  misc_difference 97: note = a, c, g, u, unknown, other, or absent
  misc_difference 98: note = a, c, g, u, unknown, other, or absent
  misc_difference 99: note = a, c, g, u, unknown, other, or absent
  misc_difference 100: note = a, c, g, u, unknown, other, or absent
  misc_difference 101: note = a, c, g, u, unknown, other, or absent
  misc_difference 102: note = a, c, g, u, unknown, other, or absent
  misc_difference 103: note = a, c, g, u, unknown, other, or absent
  misc_difference 104: note = a, c, g, u, unknown, other, or absent
  misc_difference 105: note = a, c, g, u, unknown, other, or absent
  misc_difference 106: note = a, c, g, u, unknown, other, or absent
  misc_difference 107: note = a, c, g, u, unknown, other, or absent
  misc_difference 108: note = a, c, g, u, unknown, other, or absent
  misc_difference 109: note = a, c, g, u, unknown, other, or absent
  misc_difference 110: note = a, c, g, u, unknown, other, or absent
  misc_difference 111: note = a, c, g, u, unknown, other, or absent
  misc_difference 112: note = a, c, g, u, unknown, other, or absent
  misc_difference 113: note = a, c, g, u, unknown, other, or absent
  misc_difference 114: note = a, c, g, u, unknown, other, or absent
  misc_difference 115: note = a, c, g, u, unknown, other, or absent
  misc_difference 116: note = a, c, g, u, unknown, other, or absent
  misc_difference 117: note = a, c, g, u, unknown, other, or absent
  misc_difference 118: note = a, c, g, u, unknown, other, or absent
  misc_difference 119: note = a, c, g, u, unknown, other, or absent
  misc_difference 120: note = a, c, g, u, unknown, other, or absent
  misc_difference 121: note = a, c, g, u, unknown, other, or absent
  misc_difference 122: note = a, c, g, u, unknown, other, or absent
  misc_difference 123: note = a, c, g, u, unknown, other, or absent
  misc_difference 124: note = a, c, g, u, unknown, other, or absent
  misc_difference 125: note = a, c, g, u, unknown, other, or absent
  misc_difference 126: note = a, c, g, u, unknown, other, or absent
  misc_difference 127: note = a, c, g, u, unknown, other, or absent
  misc_difference 128: note = a, c, g, u, unknown, other, or absent
  misc_difference 129: note = a, c, g, u, unknown, other, or absent
  misc_difference 130: note = a, c, g, u, unknown, other, or absent
  misc_difference 131: note = a, c, g, u, unknown, other, or absent
  misc_difference 132: note = a, c, g, u, unknown, other, or absent
  misc_difference 133: note = a, c, g, u, unknown, other, or absent
  misc_difference 134: note = a, c, g, u, unknown, other, or absent
  misc_difference 135: note = a, c, g, u, unknown, other, or absent
  misc_difference 136: note = a, c, g, u, unknown, other, or absent
  misc_difference 137: note = a, c, g, u, unknown, other, or absent
  misc_difference 138: note = a, c, g, u, unknown, other, or absent
  misc_difference 139: note = a, c, g, u, unknown, other, or absent
  misc_difference 140: note = a, c, g, u, unknown, other, or absent
  misc_difference 141: note = a, c, g, u, unknown, other, or absent
  misc_difference 142: note = a, c, g, u, unknown, other, or absent
  misc_difference 143: note = a, c, g, u, unknown, other, or absent
  misc_difference 144: note = a, c, g, u, unknown, other, or absent
  misc_difference 145: note = a, c, g, u, unknown, other, or absent
  misc_difference 146: note = a, c, g, u, unknown, other, or absent
  misc_difference 147: note = a, c, g, u, unknown, other, or absent
  misc_difference 148: note = a, c, g, u, unknown, other, or absent
  misc_difference 149: note = a, c, g, u, unknown, other, or absent
  misc_difference 150: note = a, c, g, u, unknown, other, or absent
  misc_difference 151: note = a, c, g, u, unknown, other, or absent
  misc_difference 152: note = a, c, g, u, unknown, other, or absent
  misc_difference 153: note = a, c, g, u, unknown, other, or absent
  misc_difference 154: note = a, c, g, u, unknown, other, or absent
  misc_difference 155: note = a, c, g, u, unknown, other, or absent
  misc_difference 156: note = a, c, g, u, unknown, other, or absent
  misc_difference 157: note = a, c, g, u, unknown, other, or absent
  misc_difference 158: note = a, c, g, u, unknown, other, or absent
  misc_difference 159: note = a, c, g, u, unknown, other, or absent
  misc_difference 160: note = a, c, g, u, unknown, other, or absent
  misc_difference 161: note = a, c, g, u, unknown, other, or absent
  misc_difference 162: note = a, c, g, u, unknown, other, or absent
  misc_difference 163: note = a, c, g, u, unknown, other, or absent
  misc_difference 164: note = a, c, g, u, unknown, other, or absent
  misc_difference 165: note = a, c, g, u, unknown, other, or absent
  misc_difference 166: note = a, c, g, u, unknown, other, or absent
  misc_difference 167: note = a, c, g, u, unknown, other, or absent
  misc_difference 168: note = a, c, g, u, unknown, other, or absent
  misc_difference 169: note = a, c, g, u, unknown, other, or absent
  misc_difference 170: note = a, c, g, u, unknown, other, or absent
  misc_difference 171: note = a, c, g, u, unknown, other, or absent
  misc_difference 172: note = a, c, g, u, unknown, other, or absent
  misc_difference 173: note = a, c, g, u, unknown, other, or absent
  misc_difference 174: note = a, c, g, u, unknown, other, or absent
  misc_difference 175: note = a, c, g, u, unknown, other, or absent
  misc_difference 176: note = a, c, g, u, unknown, other, or absent
  misc_difference 177: note = a, c, g, u, unknown, other, or absent
  misc_difference 178: note = a, c, g, u, unknown, other, or absent
  misc_difference 179: note = a, c, g, u, unknown, other, or absent
  misc_difference 180: note = a, c, g, u, unknown, other, or absent
  misc_difference 181: note = a, c, g, u, unknown, other, or absent
  misc_difference 182: note = a, c, g, u, unknown, other, or absent
  misc_difference 183: note = a, c, g, u, unknown, other, or absent
  misc_difference 184: note = a, c, g, u, unknown, other, or absent
  misc_difference 185: note = a, c, g, u, unknown, other, or absent
  misc_difference 186: note = a, c, g, u, unknown, other, or absent
  misc_difference 187: note = a, c, g, u, unknown, other, or absent
  misc_difference 188: note = a, c, g, u, unknown, other, or absent
  misc_difference 189: note = a, c, g, u, unknown, other, or absent
  misc_difference 190: note = a, c, g, u, unknown, other, or absent
  misc_difference 191: note = a, c, g, u, unknown, other, or absent
  misc_difference 192: note = a, c, g, u, unknown, other, or absent
  misc_difference 193: note = a, c, g, u, unknown, other, or absent
  misc_difference 194: note = a, c, g, u, unknown, other, or absent
  misc_difference 195: note = a, c, g, u, unknown, other, or absent
  misc_difference 196: note = a, c, g, u, unknown, other, or absent
  misc_difference 197: note = a, c, g, u, unknown, other, or absent
  misc_difference 198: note = a, c, g, u, unknown, other, or absent
  misc_difference 199: note = a, c, g, u, unknown, other, or absent
  misc_difference 200: note = a, c, g, u, unknown, other, or absent
  misc_difference 201: note = a, c, g, u, unknown, other, or absent
  misc_difference 202: note = a, c, g, u, unknown, other, or absent
  misc_difference 203: note = a, c, g, u, unknown, other, or absent
  misc_difference 204: note = a, c, g, u, unknown, other, or absent
  misc_difference 205: note = a, c, g, u, unknown, other, or absent
  misc_difference 206: note = a, c, g, u, unknown, other, or absent
  misc_difference 207: note = a, c, g, u, unknown, other, or absent
  misc_difference 208: note = a, c, g, u, unknown, other, or absent
  misc_difference 209: note = a, c, g, u, unknown, other, or absent
  misc_difference 210: note = a, c, g, u, unknown, other, or absent
  misc_difference 211: note = a, c, g, u, unknown, other, or absent
  misc_difference 212: note = a, c, g, u, unknown, other, or absent
  misc_difference 213: note = a, c, g, u, unknown, other, or absent
  misc_difference 214: note = a, c, g, u, unknown, other, or absent
  misc_difference 215: note = a, c, g, u, unknown, other, or absent
  misc_difference 216: note = a, c, g, u, unknown, other, or absent
  misc_difference 217: note = a, c, g, u, unknown, other, or absent
  misc_difference 218: note = a, c, g, u, unknown, other, or absent
  misc_difference 219: note = a, c, g, u, unknown, other, or absent
  misc_difference 220: note = a, c, g, u, unknown, other, or absent
  misc_difference 221: note = a, c, g, u, unknown, other, or absent
  misc_difference 222: note = a, c, g, u, unknown, other, or absent
  misc_difference 223: note = a, c, g, u, unknown, other, or absent
  misc_difference 224: note = a, c, g, u, unknown, other, or absent
  misc_difference 225: note = a, c, g, u, unknown, other, or absent
  misc_difference 226: note = a, c, g, u, unknown, other, or absent
  misc_difference 227: note = a, c, g, u, unknown, other, or absent
  misc_difference 228: note = a, c, g, u, unknown, other, or absent
  misc_difference 229: note = a, c, g, u, unknown, other, or absent
  misc_difference 230: note = a, c, g, u, unknown, other, or absent
  misc_difference 231: note = a, c, g, u, unknown, other, or absent
  misc_difference 232: note = a, c, g, u, unknown, other, or absent
  misc_difference 233: note = a, c, g, u, unknown, other, or absent
  misc_difference 234: note = a, c, g, u, unknown, other, or absent
  misc_difference 235: note = a, c, g, u, unknown, other, or absent
  misc_difference 236: note = a, c, g, u, unknown, other, or absent
  misc_difference 237: note = a, c, g, u, unknown, other, or absent
  misc_difference 238: note = a, c, g, u, unknown, other, or absent
  misc_difference 239: note = a, c, g, u, unknown, other, or absent
  misc_difference 240: note = a, c, g, u, unknown, other, or absent
  misc_difference 241: note = a, c, g, u, unknown, other, or absent
  misc_difference 242: note = a, c, g, u, unknown, other, or absent
  misc_difference 243: note = a, c, g, u, unknown, other, or absent
  misc_difference 244: note = a, c, g, u, unknown, other, or absent
  misc_difference 245: note = a, c, g, u, unknown, other, or absent
  misc_difference 246: note = a, c, g, u, unknown, other, or absent
  misc_difference 247: note = a, c, g, u, unknown, other, or absent
  misc_difference 248: note = a, c, g, u, unknown, other, or absent
  misc_difference 249: note = a, c, g, u, unknown, other, or absent
  misc_difference 250: note = a, c, g, u, unknown, other, or absent
  misc_difference 251: note = a, c, g, u, unknown, other, or absent
  misc_difference 252: note = a, c, g, u, unknown, other, or absent
  misc_difference 253: note = a, c, g, u, unknown, other, or absent
  misc_difference 254: note = a, c, g, u, unknown, other, or absent
  misc_difference 255: note = a, c, g, u, unknown, other, or absent
  misc_difference 256: note = a, c, g, u, unknown, other, or absent
  misc_difference 257: note = a, c, g, u, unknown, other, or absent
  misc_difference 258: note = a, c, g, u, unknown, other, or absent
  misc_difference 259: note = a, c, g, u, unknown, other, or absent
  misc_difference 260: note = a, c, g, u, unknown, other, or absent
  misc_difference 261: note = a, c, g, u, unknown, other, or absent
  misc_difference 262: note = a, c, g, u, unknown, other, or absent
  misc_difference 263: note = a, c, g, u, unknown, other, or absent
  misc_difference 264: note = a, c, g, u, unknown, other, or absent
  misc_difference 265: note = a, c, g, u, unknown, other, or absent
  misc_difference 266: note = a, c, g, u, unknown, other, or absent
  misc_difference 267: note = a, c, g, u, unknown, other, or absent
  misc_difference 268: note = a, c, g, u, unknown, other, or absent
  misc_difference 269: note = a, c, g, u, unknown, other, or absent
  misc_difference 270: note = a, c, g, u, unknown, other, or absent
  misc_difference 271: note = a, c, g, u, unknown, other, or absent
  misc_difference 272: note = a, c, g, u, unknown, other, or absent
  misc_difference 273: note = a, c, g, u, unknown, other, or absent
  misc_difference 274: note = a, c, g, u, unknown, other, or absent
  misc_difference 275: note = a, c, g, u, unknown, other, or absent
  misc_difference 276: note = a, c, g, u, unknown, other, or absent
  misc_difference 277: note = a, c, g, u, unknown, other, or absent
  misc_difference 278: note = a, c, g, u, unknown, other, or absent
  misc_difference 279: note = a, c, g, u, unknown, other, or absent
  misc_difference 280: note = a, c, g, u, unknown, other, or absent
  misc_difference 281: note = a, c, g, u, unknown, other, or absent
  misc_difference 282: note = a, c, g, u, unknown, other, or absent
  misc_difference 283: note = a, c, g, u, unknown, other, or absent
  misc_difference 284: note = a, c, g, u, unknown, other, or absent
  misc_difference 285: note = a, c, g, u, unknown, other, or absent
  misc_difference 286: note = a, c, g, u, unknown, other, or absent
  misc_difference 287: note = a, c, g, u, unknown, other, or absent
  misc_difference 288: note = a, c, g, u, unknown, other, or absent
  misc_difference 289: note = a, c, g, u, unknown, other, or absent
  misc_difference 290: note = a, c, g, u, unknown, other, or absent
  misc_difference 291: note = a, c, g, u, unknown, other, or absent
  misc_difference 292: note = a, c, g, u, unknown, other, or absent
  misc_difference 293: note = a, c, g, u, unknown, other, or absent
  misc_difference 294: note = a, c, g, u, unknown, other, or absent
  misc_difference 295: note = a, c, g, u, unknown, other, or absent
  misc_difference 296: note = a, c, g, u, unknown, other, or absent
  misc_difference 297: note = a, c, g, u, unknown, other, or absent
  misc_difference 298: note = a, c, g, u, unknown, other, or absent
  misc_difference 299: note = a, c, g, u, unknown, other, or absent
  misc_difference 300: note = a, c, g, u, unknown, other, or absent
  misc_difference 301: note = a, c, g, u, unknown, other, or absent
  misc_difference 302: note = a, c, g, u, unknown, other, or absent
  misc_difference 303: note = a, c, g, u, unknown, other, or absent
  misc_difference 304: note = a, c, g, u, unknown, other, or absent
  misc_difference 305: note = a, c, g, u, unknown, other, or absent
  misc_difference 306: note = a, c, g, u, unknown, other, or absent
  misc_difference 307: note = a, c, g, u, unknown, other, or absent
  misc_difference 308: note = a, c, g, u, unknown, other, or absent
  misc_difference 309: note = a, c, g, u, unknown, other, or absent
  misc_difference 310: note = a, c, g, u, unknown, other, or absent
  misc_difference 311: note = a, c, g, u, unknown, other, or absent
  misc_difference 312: note = a, c, g, u, unknown, other, or absent
  misc_difference 313: note = a, c, g, u, unknown, other, or absent
  misc_difference 314: note = a, c, g, u, unknown, other, or absent
  misc_difference 315: note = a, c, g, u, unknown, other, or absent
  misc_difference 316: note = a, c, g, u, unknown, other, or absent
  misc_difference 317: note = a, c, g, u, unknown, other, or absent
  misc_difference 318: note = May be absent
  misc_difference 319: note = May be absent
  misc_difference 320: note = May be absent
  misc_difference 321: note = May be absent
  misc_difference 322: note = May be absent
  misc_difference 323: note = May be absent
  misc_difference 324: note = May be absent
  misc_difference 325: note = May be absent
  misc_difference 326: note = May be absent
  misc_difference 327: note = May be absent
  misc_difference 328: note = May be absent
  misc_difference 329: note = May be absent
  misc_difference 330: note = May be absent
  misc_difference 331: note = a, c, g, u, unknown, other, or absent
  misc_difference 332: note = May be absent
  misc_difference 333: note = May be absent
  misc_difference 334: note = May be absent
  misc_difference 335: note = a, c, g, u, unknown, other, or absent
  misc_difference 336: note = a, c, g, u, unknown, other, or absent
  misc_difference 337: note = May be absent
  misc_difference 338: note = May be absent
  misc_difference 339: note = May be absent
  misc_difference 340: note = May be absent
  misc_difference 45..316: note = This region may encompass 1-271 nucleotides
kdbnnydtggynbarkmggdnavvrynnhbvrytbtkrrbhvdvnnnnnnnnnnnnnnnnnnnnnnnnnnnnnnnnnnnnnnnnnnnnnnnnnnnnnnnnnnnnnnnnnnnnnnnnnnnnnnnnnnnnnnnnnnnnnnnnnnnnnnnnnnnnnnnnnnnnnnnnnnnnnnnnnnnnnnnnnnnnnnnnnnnnnnnnnnnnnnnnnnnnnnnnnnnnnnnnnnnnnnnnnnnnnnnnnnnnnnnnnnnnnnnnnnnnnnnnnnnnnnnnnnnnnnnnnnnnnnnnnnnnnnnnnnnnnnnnnnnnnnnnnnnnnnnnndrrttyvadybyhnbhdnnvhmd

SEQ ID NO: 579 - RNA, 340 nt, synthetic construct
  source 1..340: mol_type = other RNA
  misc_difference 1: note = May be absent
  misc_difference 2: note = May be absent
  misc_difference 3: note = May be absent
  misc_difference 4: note = a, c, g, u, unknown, other, or absent
  misc_difference 5: note = May be absent
  misc_difference 6: note = May be absent
  misc_difference 7: note = May be absent
  misc_difference 8: note = May be absent
  misc_difference 9: note = May be absent
  misc_difference 10: note = May be absent
  misc_difference 11: note = May be absent
  misc_difference 12: note = May be absent
  misc_difference 13: note = May be absent
  misc_difference 14: note = May be absent
  misc_difference 15: note = May be absent
  misc_difference 16: note = May be absent
  misc_difference 17: note = May be absent
  misc_difference 18: note = May be absent
  misc_difference 19: note = May be absent
  misc_difference 20: note = May be absent
  misc_difference 21: note = a, c, g, u, unknown, other, or absent
  misc_difference 22: note = May be absent
  misc_difference 23: note = May be absent
  misc_difference 24: note = May be absent
  misc_difference 25: note = May be absent
  misc_difference 26: note = May be absent
  misc_difference 27: note = a, c, g, u, unknown, other, or absent
  misc_difference 28: note = a, c, g, u, unknown, other, or absent
  misc_difference 29: note = May be absent
  misc_difference 30: note = May be absent
  misc_difference 31: note = May be absent
  misc_difference 32: note = May be absent
  misc_difference 33: note = May be absent
  misc_difference 34: note = May be absent
  misc_difference 35: note = May be absent
  misc_difference 36: note = May be absent
  misc_difference 37: note = May be absent
  misc_difference 38: note = May be absent
  misc_difference 39: note = May be absent
  misc_difference 40: note = May be absent
  misc_difference 41: note = May be absent
  misc_difference 42: note = May be absent
  misc_difference 43: note = May be absent
  misc_difference 44: note = May be absent
  misc_difference 45: note = a, c, g, u, unknown, other, or absent
  misc_difference 46: note = a, c, g, u, unknown, other, or absent
  misc_difference 47: note = a, c, g, u, unknown, other, or absent
  misc_difference 48: note = a, c, g, u, unknown, other, or absent
  misc_difference 49: note = a, c, g, u, unknown, other, or absent
  misc_difference 50: note = a, c, g, u, unknown, other, or absent
  misc_difference 51: note = a, c, g, u, unknown, other, or absent
  misc_difference 52: note = a, c, g, u, unknown, other, or absent
  misc_difference 53: note = a, c, g, u, unknown, other, or absent
  misc_difference 54: note = a, c, g, u, unknown, other, or absent
  misc_difference 55: note = a, c, g, u, unknown, other, or absent
  misc_difference 56: note = a, c, g, u, unknown, other, or absent
  misc_difference 57: note = a, c, g, u, unknown, other, or absent
  misc_difference 58: note = a, c, g, u, unknown, other, or absent
  misc_difference 59: note = a, c, g, u, unknown, other, or absent
  misc_difference 60: note = a, c, g, u, unknown, other, or absent
  misc_difference 61: note = a, c, g, u, unknown, other, or absent
  misc_difference 62: note = a, c, g, u, unknown, other, or absent
  misc_difference 63: note = a, c, g, u, unknown, other, or absent
  misc_difference 64: note = a, c, g, u, unknown, other, or absent
  misc_difference 65: note = a, c, g, u, unknown, other, or absent
  misc_difference 66: note = a, c, g, u, unknown, other, or absent
  misc_difference 67: note = a, c, g, u, unknown, other, or absent
  misc_difference 68: note = a, c, g, u, unknown, other, or absent
  misc_difference 69: note = a, c, g, u, unknown, other, or absent
  misc_difference 70: note = a, c, g, u, unknown, other, or absent
  misc_difference 71: note = a, c, g, u, unknown, other, or absent
  misc_difference 72: note = a, c, g, u, unknown, other, or absent
  misc_difference 73: note = a, c, g, u, unknown, other, or absent
  misc_difference 74: note = a, c, g, u, unknown, other, or absent
  misc_difference 75: note = a, c, g, u, unknown, other, or absent
  misc_difference 76: note = a, c, g, u, unknown, other, or absent
  misc_difference 77: note = a, c, g, u, unknown, other, or absent
  misc_difference 78: note = a, c, g, u, unknown, other, or absent
  misc_difference 79: note = a, c, g, u, unknown, other, or absent
  misc_difference 80: note = a, c, g, u, unknown, other, or absent
  misc_difference 81: note = a, c, g, u, unknown, other, or absent
  misc_difference 82: note = a, c, g, u, unknown, other, or absent
  misc_difference 83: note = a, c, g, u, unknown, other, or absent
  misc_difference 84: note = a, c, g, u, unknown, other, or absent
  misc_difference 85: note = a, c, g, u, unknown, other, or absent
  misc_difference 86: note = a, c, g, u, unknown, other, or absent
  misc_difference 87: note = a, c, g, u, unknown, other, or absent
  misc_difference 88: note = a, c, g, u, unknown, other, or absent
  misc_difference 89: note = a, c, g, u, unknown, other, or absent
  misc_difference 90: note = a, c, g, u, unknown, other, or absent
  misc_difference 91: note = a, c, g, u, unknown, other, or absent
  misc_difference 92: note = a, c, g, u, unknown, other, or absent
  misc_difference 93: note = a, c, g, u, unknown, other, or absent
  misc_difference 94: note = a, c, g, u, unknown, other, or absent
  misc_difference 95: note = a, c, g, u, unknown, other, or absent
  misc_difference 96: note = a, c, g, u, unknown, other, or absent
  misc_difference 97: note = a, c, g, u, unknown, other, or absent
  misc_difference 98: note = a, c, g, u, unknown, other, or absent
  misc_difference 99: note = a, c, g, u, unknown, other, or absent
  misc_difference 100: note = a, c, g, u, unknown, other, or absent
  misc_difference 101: note = a, c, g, u, unknown, other, or absent
  misc_difference 102: note = a, c, g, u, unknown, other, or absent
  misc_difference 103: note = a, c, g, u, unknown, other, or absent
  misc_difference 104: note = a, c, g, u, unknown, other, or absent
  misc_difference 105: note = a, c, g, u, unknown, other, or absent
  misc_difference 106: note = a, c, g, u, unknown, other, or absent
  misc_difference 107: note = a, c, g, u, unknown, other, or absent
  misc_difference 108: note = a, c, g, u, unknown, other, or absent
  misc_difference 109: note = a, c, g, u, unknown, other, or absent
  misc_difference 110: note = a, c, g, u, unknown, other, or absent
  misc_difference 111: note = a, c, g, u, unknown, other, or absent
  misc_difference 112: note = a, c, g, u, unknown, other, or absent
  misc_difference 113: note = a, c, g, u, unknown, other, or absent
  misc_difference 114: note = a, c, g, u, unknown, other, or absent
  misc_difference 115: note = a, c, g, u, unknown, other, or absent
  misc_difference 116: note = a, c, g, u, unknown, other, or absent
  misc_difference 117: note = a, c, g, u, unknown, other, or absent
  misc_difference 118: note = a, c, g, u, unknown, other, or absent
  misc_difference 119: note = a, c, g, u, unknown, other, or absent
  misc_difference 120: note = a, c, g, u, unknown, other, or absent
  misc_difference 121: note = a, c, g, u, unknown, other, or absent
  misc_difference 122: note = a, c, g, u, unknown, other, or absent
  misc_difference 123: note = a, c, g, u, unknown, other, or absent
  misc_difference 124: note = a, c, g, u, unknown, other, or absent
  misc_difference 125: note = a, c, g, u, unknown, other, or absent
  misc_difference 126: note = a, c, g, u, unknown, other, or absent
  misc_difference 127: note = a, c, g, u, unknown, other, or absent
  misc_difference 128: note = a, c, g, u, unknown, other, or absent
  misc_difference 129: note = a, c, g, u, unknown, other, or absent
  misc_difference 130: note = a, c, g, u, unknown, other, or absent
  misc_difference 131: note = a, c, g, u, unknown, other, or absent
  misc_difference 132: note = a, c, g, u, unknown, other, or absent
  misc_difference 133: note = a, c, g, u, unknown, other, or absent
  misc_difference 134: note = a, c, g, u, unknown, other, or absent
  misc_difference 135: note = a, c, g, u, unknown, other, or absent
  misc_difference 136: note = a, c, g, u, unknown, other, or absent
  misc_difference 137: note = a, c, g, u, unknown, other, or absent
  misc_difference 138: note = a, c, g, u, unknown, other, or absent
  misc_difference 139: note = a, c, g, u, unknown, other, or absent
  misc_difference 140: note = a, c, g, u, unknown, other, or absent
  misc_difference 141: note = a, c, g, u, unknown, other, or absent
  misc_difference 142: note = a, c, g, u, unknown, other, or absent
  misc_difference 143: note = a, c, g, u, unknown, other, or absent
  misc_difference 144: note = a, c, g, u, unknown, other, or absent
  misc_difference 145: note = a, c, g, u, unknown, other, or absent
  misc_difference 146: note = a, c, g, u, unknown, other, or absent
  misc_difference 147: note = a, c, g, u, unknown, other, or absent
  misc_difference 148: note = a, c, g, u, unknown, other, or absent
  misc_difference 149: note = a, c, g, u, unknown, other, or absent
  misc_difference 150: note = a, c, g, u, unknown, other, or absent
  misc_difference 151: note = a, c, g, u, unknown, other, or absent
  misc_difference 152: note = a, c, g, u, unknown, other, or absent
  misc_difference 153: note = a, c, g, u, unknown, other, or absent
  misc_difference 154: note = a, c, g, u, unknown, other, or absent
  misc_difference 155: note = a, c, g, u, unknown, other, or absent
  misc_difference 156: note = a, c, g, u, unknown, other, or absent
  misc_difference 157: note = a, c, g, u, unknown, other, or absent
  misc_difference 158: note = a, c, g, u, unknown, other, or absent
  misc_difference 159: note = a, c, g, u, unknown, other, or absent
  misc_difference 160: note = a, c, g, u, unknown, other, or absent
  misc_difference 161: note = a, c, g, u, unknown, other, or absent
  misc_difference 162: note = a, c, g, u, unknown, other, or absent
  misc_difference 163: note = a, c, g, u, unknown, other, or absent
  misc_difference 164: note = a, c, g, u, unknown, other, or absent
  misc_difference 165: note = a, c, g, u, unknown, other, or absent
  misc_difference 166: note = a, c, g, u, unknown, other, or absent
  misc_difference 167: note = a, c, g, u, unknown, other, or absent
  misc_difference 168: note = a, c, g, u, unknown, other, or absent
  misc_difference 169: note = a, c, g, u, unknown, other, or absent
  misc_difference 170: note = a, c, g, u, unknown, other, or absent
  misc_difference 171: note = a, c, g, u, unknown, other, or absent
  misc_difference 172: note = a, c, g, u, unknown, other, or absent
  misc_difference 173: note = a, c, g, u, unknown, other, or absent
  misc_difference 174: note = a, c, g, u, unknown, other, or absent
  misc_difference 175: note = a, c, g, u, unknown, other, or absent
  misc_difference 176: note = a, c, g, u, unknown, other, or absent
  misc_difference 177: note = a, c, g, u, unknown, other, or absent
  misc_difference 178: note = a, c, g, u, unknown, other, or absent
  misc_difference 179: note = a, c, g, u, unknown, other, or absent
  misc_difference 180: note = a, c, g, u, unknown, other, or absent
  misc_difference 181: note = a, c, g, u, unknown, other, or absent
  misc_difference 182: note = a, c, g, u, unknown, other, or absent
  misc_difference 183: note = a, c, g, u, unknown, other, or absent
  misc_difference 184: note = a, c, g, u, unknown, other, or absent
  misc_difference 185: note = a, c, g, u, unknown, other, or absent
  misc_difference 186: note = a, c, g, u, unknown, other, or absent
  misc_difference 187: note = a, c, g, u, unknown, other, or absent
  misc_difference 188: note = a, c, g, u, unknown, other, or absent
  misc_difference 189: note = a, c, g, u, unknown, other, or absent
  misc_difference 190: note = a, c, g, u, unknown, other, or absent
  misc_difference 191: note = a, c, g, u, unknown, other, or absent
  misc_difference 192: note = a, c, g, u, unknown, other, or absent
  misc_difference 193: note = a, c, g, u, unknown, other, or absent
  misc_difference 194: note = a, c, g, u, unknown, other, or absent
  misc_difference 195: note = a, c, g, u, unknown, other, or absent
  misc_difference 196: note = a, c, g, u, unknown, other, or absent
  misc_difference 197: note = a, c, g, u, unknown, other, or absent
  misc_difference 198: note = a, c, g, u, unknown, other, or absent
  misc_difference 199: note = a, c, g, u, unknown, other, or absent
  misc_difference 200: note = a, c, g, u, unknown, other, or absent
  misc_difference 201: note = a, c, g, u, unknown, other, or absent
  misc_difference 202: note = a, c, g, u, unknown, other, or absent
  misc_difference 203: note = a, c, g, u, unknown, other, or absent
  misc_difference 204: note = a, c, g, u, unknown, other, or absent
  misc_difference 205: note = a, c, g, u, unknown, other, or absent
  misc_difference 206: note = a, c, g, u, unknown, other, or absent
  misc_difference 207: note = a, c, g, u, unknown, other, or absent
  misc_difference 208: note = a, c, g, u, unknown, other, or absent
  misc_difference 209: note = a, c, g, u, unknown, other, or absent
  misc_difference 210: note = a, c, g, u, unknown, other, or absent
  misc_difference 211: note = a, c, g, u, unknown, other, or absent
  misc_difference 212: note = a, c, g, u, unknown, other, or absent
  misc_difference 213: note = a, c, g, u, unknown, other, or absent
  misc_difference 214: note = a, c, g, u, unknown, other, or absent
  misc_difference 215: note = a, c, g, u, unknown, other, or absent
  misc_difference 216: note = a, c, g, u, unknown, other, or absent
  misc_difference 217: note = a, c, g, u, unknown, other, or absent
  misc_difference 218: note = a, c, g, u, unknown, other, or absent
  misc_difference 219: note = a, c, g, u, unknown, other, or absent
  misc_difference 220: note = a, c, g, u, unknown, other, or absent
  misc_difference 221: note = a, c, g, u, unknown, other, or absent
  misc_difference 222: note = a, c, g, u, unknown, other, or absent
  misc_difference 223: note = a, c, g, u, unknown, other, or absent
  misc_difference 224: note = a, c, g, u, unknown, other, or absent
  misc_difference 225: note = a, c, g, u, unknown, other, or absent
  misc_difference 226: note = a, c, g, u, unknown, other, or absent
  misc_difference 227: note = a, c, g, u, unknown, other, or absent
  misc_difference 228: note = a, c, g, u, unknown, other, or absent
  misc_difference 229: note = a, c, g, u, unknown, other, or absent
  misc_difference 230: note = a, c, g, u, unknown, other, or absent
  misc_difference 231: note = a, c, g, u, unknown, other, or absent
  misc_difference 232: note = a, c, g, u, unknown, other, or absent
  misc_difference 233: note = a, c, g, u, unknown, other, or absent
  misc_difference 234: note = a, c, g, u, unknown, other, or absent
  misc_difference 235: note = a, c, g, u, unknown, other, or absent
  misc_difference 236: note = a, c, g, u, unknown, other, or absent
  misc_difference 237: note = a, c, g, u, unknown, other, or absent
  misc_difference 238: note = a, c, g, u, unknown, other, or absent
  misc_difference 239: note = a, c, g, u, unknown, other, or absent
  misc_difference 240: note = a, c, g, u, unknown, other, or absent
  misc_difference 241: note = a, c, g, u, unknown, other, or absent
  misc_difference 242: note = a, c, g, u, unknown, other, or absent
  misc_difference 243: note = a, c, g, u, unknown, other, or absent
  misc_difference 244: note = a, c, g, u, unknown, other, or absent
  misc_difference 245: note = a, c, g, u, unknown, other, or absent
  misc_difference 246: note = a, c, g, u, unknown, other, or absent
  misc_difference 247: note = a, c, g, u, unknown, other, or absent
  misc_difference 248: note = a, c, g, u, unknown, other, or absent
  misc_difference 249: note = a, c, g, u, unknown, other, or absent
  misc_difference 250: note = a, c, g, u, unknown, other, or absent
  misc_difference 251: note = a, c, g, u, unknown, other, or absent
  misc_difference 252: note = a, c, g, u, unknown, other, or absent
  misc_difference 253: note = a, c, g, u, unknown, other, or absent
  misc_difference 254: note = a, c, g, u, unknown, other, or absent
  misc_difference 255: note = a, c, g, u, unknown, other, or absent
  misc_difference 256: note = a, c, g, u, unknown, other, or absent
  misc_difference 257: note = a, c, g, u, unknown, other, or absent
  misc_difference 258: note = a, c, g, u, unknown, other, or absent
  misc_difference 259: note = a, c, g, u, unknown, other, or absent
  misc_difference 260: note = a, c, g, u, unknown, other, or absent
  misc_difference 261: note = a, c, g, u, unknown, other, or absent
  misc_difference 262: note = a, c, g, u, unknown, other, or absent
  misc_difference 263: note = a, c, g, u, unknown, other, or absent
  misc_difference 264: note = a, c, g, u, unknown, other, or absent
  misc_difference 265: note = a, c, g, u, unknown, other, or absent
  misc_difference 266: note = a, c, g, u, unknown, other, or absent
  misc_difference 267: note = a, c, g, u, unknown, other, or absent
  misc_difference 268: note = a, c, g, u, unknown, other, or absent
  misc_difference 269: note = a, c, g, u, unknown, other, or absent
  misc_difference 270: note = a, c, g, u, unknown, other, or absent
  misc_difference 271: note = a, c, g, u, unknown, other, or absent
  misc_difference 272: note = a, c, g, u, unknown, other, or absent
  misc_difference 273: note = a, c, g, u, unknown, other, or absent
  misc_difference 274: note = a, c, g, u, unknown, other, or absent
  misc_difference 275: note = a, c, g, u, unknown, other, or absent
  misc_difference 276: note = a, c, g, u, unknown, other, or absent
  misc_difference 277: note = a, c, g, u, unknown, other, or absent
  misc_difference 278: note = a, c, g, u, unknown, other, or absent
  misc_difference 279: note = a, c, g, u, unknown, other, or absent
  misc_difference 280: note = a, c, g, u, unknown, other, or absent
  misc_difference 281: note = a, c, g, u, unknown, other, or absent
  misc_difference 282: note = a, c, g, u, unknown, other, or absent
  misc_difference 283: note = a, c, g, u, unknown, other, or absent
  misc_difference 284: note = a, c, g, u, unknown, other, or absent
  misc_difference 285: note = a, c, g, u, unknown, other, or absent
  misc_difference 286: note = a, c, g, u, unknown, other, or absent
  misc_difference 287: note = a, c, g, u, unknown, other, or absent
  misc_difference 288: note = a, c, g, u, unknown, other, or absent
  misc_difference 289: note = a, c, g, u, unknown, other, or absent
  misc_difference 290: note = a, c, g, u, unknown, other, or absent
  misc_difference 291: note = a, c, g, u, unknown, other, or absent
  misc_difference 292: note = a, c, g, u, unknown, other, or absent
  misc_difference 293: note = a, c, g, u, unknown, other, or absent
  misc_difference 294: note = a, c, g, u, unknown, other, or absent
  misc_difference 295: note = a, c, g, u, unknown, other, or absent
  misc_difference 296: note = a, c, g, u, unknown, other, or absent
  misc_difference 297: note = a, c, g, u, unknown, other, or absent
  misc_difference 298: note = a, c, g, u, unknown, other, or absent
  misc_difference 299: note = a, c, g, u, unknown, other, or absent
  misc_difference 300: note = a, c, g, u, unknown, other, or absent
  misc_difference 301: note = a, c, g, u, unknown, other, or absent
  misc_difference 302: note = a, c, g, u, unknown, other, or absent
  misc_difference 303: note = a, c, g, u, unknown, other, or absent
  misc_difference 304: note = a, c, g, u, unknown, other, or absent
  misc_difference 305: note = a, c, g, u, unknown, other, or absent
  misc_difference 306: note = a, c, g, u, unknown, other, or absent
  misc_difference 307: note = a, c, g, u, unknown, other, or absent
  misc_difference 308: note = a, c, g, u, unknown, other, or absent
  misc_difference 309: note = a, c, g, u, unknown, other, or absent
  misc_difference 310: note = a, c, g, u, unknown, other, or absent
  misc_difference 311: note = a, c, g, u, unknown, other, or absent
  misc_difference 312: note = a, c, g, u, unknown, other, or absent
  misc_difference 313: note = a, c, g, u, unknown, other, or absent
  misc_difference 314: note = a, c, g, u, unknown, other, or absent
  misc_difference 315: note = a, c, g, u, unknown, other, or absent
  misc_difference 316: note = a, c, g, u, unknown, other, or absent
  misc_difference 317: note = a, c, g, u, unknown, other, or absent
  misc_difference 318: note = May be absent
  misc_difference 319: note = May be absent
  misc_difference 320: note = May be absent
  misc_difference 321: note = May be absent
  misc_difference 322: note = May be absent
  misc_difference 323: note = May be absent
  misc_difference 324: note = May be absent
  misc_difference 325: note = May be absent
  misc_difference 326: note = May be absent
  misc_difference 327: note = May be absent
  misc_difference 328: note = May be absent
  misc_difference 329: note = May be absent
  misc_difference 330: note = May be absent
  misc_difference 331: note = a, c, g, u, unknown, other, or absent
  misc_difference 332: note = May be absent
  misc_difference 333: note = May be absent
  misc_difference 334: note = May be absent
  misc_difference 335: note = May be absent
  misc_difference 336: note = a, c, g, u, unknown, other, or absent
  misc_difference 337: note = May be absent
  misc_difference 338: note = May be absent
  misc_difference 339: note = May be absent
  misc_difference 340: note = May be absent
  misc_difference 45..316: note = This region may encompass 1-271 nucleotides
kdbnvydtggydbartmggknavvrynnwsrrytbtkrabhsdvnnnnnnnnnnnnnnnnnnnnnnnnnnnnnnnnnnnnnnnnnnnnnnnnnnnnnnnnnnnnnnnnnnnnnnnnnnnnnnnnnnnnnnnnnnnnnnnnnnnnnnnnnnnnnnnnnnnnnnnnnnnnnnnnnnnnnnnnnnnnnnnnnnnnnnnnnnnnnnnnnnnnnnnnnnnnnnnnnnnnnnnnnnnnnnnnnnnnnnnnnnnnnnnnnnnnnnnnnnnnnnnnnnnnnnnnnnnnnnnnnnnnnnnnnnnnnnnnnnnnnnnnnnnnnnnnndrrttyvadysyhnbhdbnvhmk

SEQ ID NO: 580 - RNA, 342 nt, synthetic construct
  source 1..342: mol_type = other RNA
  misc_difference 1: note = a, c, g, u, unknown, other, or absent
  misc_difference 2: note = a, c, g, u, unknown, other, or absent
  misc_difference 3: note = May be absent
  misc_difference 4: note = May be absent
  misc_difference 5: note = a, c, g, u, unknown, other, or absent
  misc_difference 6: note = a, c, g, u, unknown, other, or absent
  misc_difference 7: note = May be absent
  misc_difference 8: note = May be absent
  misc_difference 9: note = a, c, g, u, unknown, other, or absent
  misc_difference 10: note = May be absent
  misc_difference 11: note = May be absent
  misc_difference 12: note = a, c, g, u, unknown, other, or absent
  misc_difference 13: note = May be absent
  misc_difference 14: note = May be absent
  misc_difference 15: note = May be absent
  misc_difference 16: note = a, c, g, u, unknown, other, or absent
  misc_difference 17: note = May be absent
  misc_difference 18: note = May be absent
  misc_difference 19: note = May be absent
  misc_difference 20: note = a, c, g, u, unknown, other, or absent
  misc_difference 21: note = a, c, g, u, unknown, other, or absent
  misc_difference 22: note = May be absent
  misc_difference 23: note = May be absent
  misc_difference 24: note = May be absent
  misc_difference 25: note = May be absent
  misc_difference 26: note = a, c, g, u, unknown, other, or absent
  misc_difference 27: note = a, c, g, u, unknown, other, or absent
  misc_difference 28: note = May be absent
  misc_difference 29: note = a, c, g, u, unknown, other, or absent
  misc_difference 30: note = a, c, g, u, unknown, other, or absent
  misc_difference 31: note = a, c, g, u, unknown, other, or absent
  misc_difference 32: note = a, c, g, u, unknown, other, or absent
  misc_difference 33: note = a, c, g, u, unknown, other, or absent
  misc_difference 34: note = May be absent
  misc_difference 35: note = May be absent
  misc_difference 36: note = May be absent
  misc_difference 37: note = May be absent
  misc_difference 38: note = May be absent
  misc_difference 39: note = May be absent
  misc_difference 40: note = May be absent
  misc_difference 41: note = a, c, g, u, unknown, other, or absent
  misc_difference 42: note = May be absent
  misc_difference 43: note = May be absent
  misc_difference 44: note = a, c, g, u, unknown, other, or absent
  misc_difference 45: note = a, c, g, u, unknown, other, or absent
  misc_difference 46: note = a, c, g, u, unknown, other, or absent
  misc_difference 47: note = a, c, g, u, unknown, other, or absent
  misc_difference 48: note = a, c, g, u, unknown, other, or absent
  misc_difference 49: note = a, c, g, u, unknown, other, or absent
  misc_difference 50: note = a, c, g, u, unknown, other, or absent
  misc_difference 51: note = a, c, g, u, unknown, other, or absent
  misc_difference 52: note = a, c, g, u, unknown, other, or absent
  misc_difference 53: note = a, c, g, u, unknown, other, or absent
  misc_difference 54: note = a, c, g, u, unknown, other, or absent
  misc_difference 55: note = a, c, g, u, unknown, other, or absent
  misc_difference 56: note = a, c, g, u, unknown, other, or absent
  misc_difference 57: note = a, c, g, u, unknown, other, or absent
  misc_difference 58: note = a, c, g, u, unknown, other, or absent
  misc_difference 59: note = a, c, g, u, unknown, other, or absent
  misc_difference 60: note = a, c, g, u, unknown, other, or absent
  misc_difference 61: note = a, c, g, u, unknown, other, or absent
  misc_difference 62: note = a, c, g, u, unknown, other, or absent
  misc_difference 63: note = a, c, g, u, unknown, other, or absent
  misc_difference 64: note = a, c, g, u, unknown, other, or absent
  misc_difference 65: note = a, c, g, u, unknown, other, or absent
  misc_difference 66: note = a, c, g, u, unknown, other, or absent
  misc_difference 67: note = a, c, g, u, unknown, other, or absent
  misc_difference 68: note = a, c, g, u, unknown, other, or absent
  misc_difference 69: note = a, c, g, u, unknown, other, or absent
  misc_difference 70: note = a, c, g, u, unknown, other, or absent
  misc_difference 71: note = a, c, g, u, unknown, other, or absent
  misc_difference 72: note = a, c, g, u, unknown, other, or absent
  misc_difference 73: note = a, c, g, u, unknown, other, or absent
  misc_difference 74: note = a, c, g, u, unknown, other, or absent
  misc_difference 75: note = a, c, g, u, unknown, other, or absent
  misc_difference 76: note = a, c, g, u, unknown, other, or absent
  misc_difference 77: note = a, c, g, u, unknown, other, or absent
  misc_difference 78: note = a, c, g, u, unknown, other, or absent
  misc_difference 79: note = a, c, g, u, unknown, other, or absent
  misc_difference 80: note = a, c, g, u, unknown, other, or absent
  misc_difference 81: note = a, c, g, u, unknown, other, or absent
  misc_difference 82: note = a, c, g, u, unknown, other, or absent
  misc_difference 83: note = a, c, g, u, unknown, other, or absent
  misc_difference 84: note = a, c, g, u, unknown, other, or absent
  misc_difference 85: note = a, c, g, u, unknown, other, or absent
  misc_difference 86: note = a, c, g, u, unknown, other, or absent
  misc_difference 87: note = a, c, g, u, unknown, other, or absent
  misc_difference 88: note = a, c, g, u, unknown, other, or absent
  misc_difference 89: note = a, c, g, u, unknown, other, or absent
  misc_difference 90: note = a, c, g, u, unknown, other, or absent
  misc_difference 91: note = a, c, g, u, unknown, other, or absent
  misc_difference 92: note = a, c, g, u, unknown, other, or absent
  misc_difference 93: note = a, c, g, u, unknown, other, or absent
  misc_difference 94: note = a, c, g, u, unknown, other, or absent
  misc_difference 95: note = a, c, g, u, unknown, other, or absent
  misc_difference 96: note = a, c, g, u, unknown, other, or absent
  misc_difference 97: note = a, c, g, u, unknown, other, or absent
  misc_difference 98: note = a, c, g, u, unknown, other, or absent
  misc_difference 99: note = a, c, g, u, unknown, other, or absent
  misc_difference 100: note = a, c, g, u, unknown, other, or absent
  misc_difference 101: note = a, c, g, u, unknown, other, or absent
  misc_difference 102: note = a, c, g, u, unknown, other, or absent
  misc_difference 103: note = a, c, g, u, unknown, other, or absent
  misc_difference 104: note = a, c, g, u, unknown, other, or absent
  misc_difference 105: note = a, c, g, u, unknown, other, or absent
  misc_difference 106: note = a, c, g, u, unknown, other, or absent
  misc_difference 107: note = a, c, g, u, unknown, other, or absent
  misc_difference 108: note = a, c, g, u, unknown, other, or absent
  misc_difference 109: note = a, c, g, u, unknown, other, or absent
  misc_difference 110: note = a, c, g, u, unknown, other, or absent
  misc_difference 111: note = a, c, g, u, unknown, other, or absent
  misc_difference 112: note = a, c, g, u, unknown, other, or absent
  misc_difference 113: note = a, c, g, u, unknown, other, or absent
  misc_difference 114: note = a, c, g, u, unknown, other, or absent
  misc_difference 115: note = a, c, g, u, unknown, other, or absent
  misc_difference 116: note = a, c, g, u, unknown, other, or absent
  misc_difference 117: note = a, c, g, u, unknown, other, or absent
  misc_difference 118: note = a, c, g, u, unknown, other, or absent
  misc_difference 119: note = a, c, g, u, unknown, other, or absent
  misc_difference 120: note = a, c, g, u, unknown, other, or absent
  misc_difference 121: note = a, c, g, u, unknown, other, or absent
  misc_difference 122: note = a, c, g, u, unknown, other, or absent
  misc_difference 123: note = a, c, g, u, unknown, other, or absent
  misc_difference 124: note = a, c, g, u, unknown, other, or absent
  misc_difference 125: note = a, c, g, u, unknown, other, or absent
  misc_difference 126: note = a, c, g, u, unknown, other, or absent
  misc_difference 127: note = a, c, g, u, unknown, other, or absent
  misc_difference 128: note = a, c, g, u, unknown, other, or absent
  misc_difference 129: note = a, c, g, u, unknown, other, or absent
  misc_difference 130: note = a, c, g, u, unknown, other, or absent
  misc_difference 131: note = a, c, g, u, unknown, other, or absent
  misc_difference 132: note = a, c, g, u, unknown, other, or absent
  misc_difference 133: note = a, c, g, u, unknown, other, or absent
  misc_difference 134: note = a, c, g, u, unknown, other, or absent
  misc_difference 135: note = a, c, g, u, unknown, other, or absent
  misc_difference 136: note = a, c, g, u, unknown, other, or absent
  misc_difference 137: note = a, c, g, u, unknown, other, or absent
  misc_difference 138: note = a, c, g, u, unknown, other, or absent
  misc_difference 139: note = a, c, g, u, unknown, other, or absent
  misc_difference 140: note = a, c, g, u, unknown, other, or absent
  misc_difference 141: note = a, c, g, u, unknown, other, or absent
  misc_difference 142: note = a, c, g, u, unknown, other, or absent
  misc_difference 143: note = a, c, g, u, unknown, other, or absent
  misc_difference 144: note = a, c, g, u, unknown, other, or absent
  misc_difference 145: note = a, c, g, u, unknown, other, or absent
  misc_difference 146: note = a, c, g, u, unknown, other, or absent
  misc_difference 147: note = a, c, g, u, unknown, other, or absent
  misc_difference 148: note = a, c, g, u, unknown, other, or absent
  misc_difference 149: note = a, c, g, u, unknown, other, or absent
  misc_difference 150: note = a, c, g, u, unknown, other, or absent
  misc_difference 151: note = a, c, g, u, unknown, other, or absent
  misc_difference 152: note = a, c, g, u, unknown, other, or absent
  misc_difference 153: note = a, c, g, u, unknown, other, or absent
  misc_difference 154: note = a, c, g, u, unknown, other, or absent
  misc_difference 155: note = a, c, g, u, unknown, other, or absent
  misc_difference 156: note = a, c, g, u, unknown, other, or absent
  misc_difference 157: note = a, c, g, u, unknown, other, or absent
  misc_difference 158: note = a, c, g, u, unknown, other, or absent
  misc_difference 159: note = a, c, g, u, unknown, other, or absent
  misc_difference 160: note = a, c, g, u, unknown, other, or absent
  misc_difference 161: note = a, c, g, u, unknown, other, or absent
  misc_difference 162: note = a, c, g, u, unknown, other, or absent
  misc_difference 163: note = a, c, g, u, unknown, other, or absent
  misc_difference 164: note = a, c, g, u, unknown, other, or absent
  misc_difference 165: note = a, c, g, u, unknown, other, or absent
  misc_difference 166: note = a, c, g, u, unknown, other, or absent
  misc_difference 167: note = a, c, g, u, unknown, other, or absent
  misc_difference 168: note = a, c, g, u, unknown, other, or absent
  misc_difference 169: note = a, c, g, u, unknown, other, or absent
  misc_difference 170: note = a, c, g, u, unknown, other, or absent
  misc_difference 171: note = a, c, g, u, unknown, other, or absent
  misc_difference 172: note = a, c, g, u, unknown, other, or absent
  misc_difference 173: note = a, c, g, u, unknown, other, or absent
  misc_difference 174: note = a, c, g, u, unknown, other, or absent
  misc_difference 175: note = a, c, g, u, unknown, other, or absent
  misc_difference 176: note = a, c, g, u, unknown, other, or absent
  misc_difference 177: note = a, c, g, u, unknown, other, or absent
  misc_difference 178: note = a, c, g, u, unknown, other, or absent
  misc_difference 179: note = a, c, g, u, unknown, other, or absent
  misc_difference 180: note = a, c, g, u, unknown, other, or absent
  misc_difference 181: note = a, c, g, u, unknown, other, or absent
  misc_difference 182: note = a, c, g, u, unknown, other, or absent
  misc_difference 183: note = a, c, g, u, unknown, other, or absent
  misc_difference 184: note = a, c, g, u, unknown, other, or absent
  misc_difference 185: note = a, c, g, u, unknown, other, or absent
  misc_difference 186: note = a, c, g, u, unknown, other, or absent
  misc_difference 187: note = a, c, g, u, unknown, other, or absent
  misc_difference 188: note = a, c, g, u, unknown, other, or absent
  misc_difference 189: note = a, c, g, u, unknown, other, or absent
  misc_difference 190: note = a, c, g, u, unknown, other, or absent
  misc_difference 191: note = a, c, g, u, unknown, other, or absent
  misc_difference 192: note = a, c, g, u, unknown, other, or absent
  misc_difference 193: note = a, c, g, u, unknown, other, or absent
  misc_difference 194: note = a, c, g, u, unknown, other, or absent
  misc_difference 195: note = a, c, g, u, unknown, other, or absent
  misc_difference 196: note = a, c, g, u, unknown, other, or absent
  misc_difference 197: note = a, c, g, u, unknown, other, or absent
  misc_difference 198: note = a, c, g, u, unknown, other, or absent
  misc_difference 199: note = a, c, g, u, unknown, other, or absent
  misc_difference 200: note = a, c, g, u, unknown, other, or absent
  misc_difference 201: note = a, c, g, u, unknown, other, or absent
  misc_difference 202: note = a, c, g, u, unknown, other, or absent
  misc_difference 203: note = a, c, g, u, unknown, other, or absent
  misc_difference 204: note = a, c, g, u, unknown, other, or absent
  misc_difference 205: note = a, c, g, u, unknown, other, or absent
  misc_difference 206: note = a, c, g, u, unknown, other, or absent
  misc_difference 207: note = a, c, g, u, unknown, other, or absent
  misc_difference 208: note = a, c, g, u, unknown, other, or absent
  misc_difference 209: note = a, c, g, u, unknown, other, or absent
  misc_difference 210: note = a, c, g, u, unknown, other, or absent
  misc_difference 211: note = a, c, g, u, unknown, other, or absent
  misc_difference 212: note = a, c, g, u, unknown, other, or absent
  misc_difference 213: note = a, c, g, u, unknown, other, or absent
  misc_difference 214: note = a, c, g, u, unknown, other, or absent
  misc_difference 215: note = a, c, g, u, unknown, other, or absent
  misc_difference 216: note = a, c, g, u, unknown, other, or absent
  misc_difference 217: note = a, c, g, u, unknown, other, or absent
  misc_difference 218: note = a, c, g, u, unknown, other, or absent
  misc_difference 219: note = a, c, g, u, unknown, other, or absent
  misc_difference 220: note = a, c, g, u, unknown, other, or absent
  misc_difference 221: note = a, c, g, u, unknown, other, or absent
  misc_difference 222: note = a, c, g, u, unknown, other, or absent
  misc_difference 223: note = a, c, g, u, unknown, other, or absent
  misc_difference 224: note = a, c, g, u, unknown, other, or absent
  misc_difference 225: note = a, c, g, u, unknown, other, or absent
  misc_difference 226: note = a, c, g, u, unknown, other, or absent
  misc_difference 227: note = a, c, g, u, unknown, other, or absent
  misc_difference 228: note = a, c, g, u, unknown, other, or absent
  misc_difference 229: note = a, c, g, u, unknown, other, or absent
  misc_difference 230: note = a, c, g, u, unknown, other, or absent
  misc_difference 231: note = a, c, g, u, unknown, other, or absent
  misc_difference 232: note = a, c, g, u, unknown, other, or absent
  misc_difference 233: note = a, c, g, u, unknown, other, or absent
  misc_difference 234: note = a, c, g, u, unknown, other, or absent
  misc_difference 235: note = a, c, g, u, unknown, other, or absent
  misc_difference 236: note = a, c, g, u, unknown, other, or absent
  misc_difference 237: note = a, c, g, u, unknown, other, or absent
  misc_difference 238: note = a, c, g, u, unknown, other, or absent
  misc_difference 239: note = a, c, g, u, unknown, other, or absent
  misc_difference 240: note = a, c, g, u, unknown, other, or absent
  misc_difference 241: note = a, c, g, u, unknown, other, or absent
  misc_difference 242: note = a, c, g, u, unknown, other, or absent
  misc_difference 243: note = a, c, g, u, unknown, other, or absent
  misc_difference 244: note = a, c, g, u, unknown, other, or absent
  misc_difference 245: note = a, c, g, u, unknown, other, or absent
  misc_difference 246: note = a, c, g, u, unknown, other, or absent
  misc_difference 247: note = a, c, g, u, unknown, other, or absent
  misc_difference 248: note = a, c, g, u, unknown, other, or absent
  misc_difference 249: note = a, c, g, u, unknown, other, or absent
  misc_difference 250: note = a, c, g, u, unknown, other, or absent
  misc_difference 251: note = a, c, g, u, unknown, other, or absent
  misc_difference 252: note = a, c, g, u, unknown, other, or absent
  misc_difference 253: note = a, c, g, u, unknown, other, or absent
  misc_difference 254: note = a, c, g, u, unknown, other, or absent
  misc_difference 255: note = a, c, g, u, unknown, other, or absent
  misc_difference 256: note = a, c, g, u, unknown, other, or absent
  misc_difference 257: note = a, c, g, u, unknown, other, or absent
  misc_difference 258: note = a, c, g, u, unknown, other, or absent
  misc_difference 259: note = a, c, g, u, unknown, other, or absent
  misc_difference 260: note = a, c, g, u, unknown, other, or absent
  misc_difference 261: note = a, c, g, u, unknown, other, or absent
  misc_difference 262: note = a, c, g, u, unknown, other, or absent
  misc_difference 263: note = a, c, g, u, unknown, other, or absent
  misc_difference 264: note = a, c, g, u, unknown, other, or absent
  misc_difference 265: note = a, c, g, u, unknown, other, or absent
  misc_difference 266: note = a, c, g, u, unknown, other, or absent
  misc_difference 267: note = a, c, g, u, unknown, other, or absent
  misc_difference 268: note = a, c, g, u, unknown, other, or absent
  misc_difference 269: note = a, c, g, u, unknown, other, or absent
  misc_difference 270: note = a, c, g, u, unknown, other, or absent
  misc_difference 271: note = a, c, g, u, unknown, other, or absent
  misc_difference 272: note = a, c, g, u, unknown, other, or absent
  misc_difference 273: note = a, c, g, u, unknown, other, or absent
  misc_difference 274: note = a, c, g, u, unknown, other, or absent
  misc_difference 275: note = a, c, g, u, unknown, other, or absent
  misc_difference 276: note = a, c, g, u, unknown, other, or absent
  misc_difference 277: note = a, c, g, u, unknown, other, or absent
  misc_difference 278: note = a, c, g, u, unknown, other, or absent
  misc_difference 279: note = a, c, g, u, unknown, other, or absent
  misc_difference 280: note = a, c, g, u, unknown, other, or absent
  misc_difference 281: note = a, c, g, u, unknown, other, or absent
  misc_difference 282: note = a, c, g, u, unknown, other, or absent
  misc_difference 283: note = a, c, g, u, unknown, other, or absent
  misc_difference 284: note = a, c, g, u, unknown, other, or absent
  misc_difference 285: note = a, c, g, u, unknown, other, or absent
  misc_difference 286: note = a, c, g, u, unknown, other, or absent
  misc_difference 287: note = a, c, g, u, unknown, other, or absent
  misc_difference 288: note = a, c, g, u, unknown, other, or absent
  misc_difference 289: note = a, c, g, u, unknown, other, or absent
  misc_difference 290: note = a, c, g, u, unknown, other, or absent
  misc_difference 291: note = a, c, g, u, unknown, other, or absent
  misc_difference 292: note = a, c, g, u, unknown, other, or absent
  misc_difference 293: note = a, c, g, u, unknown, other, or absent
  misc_difference 294: note = a, c, g, u, unknown, other, or absent
  misc_difference 295: note = a, c, g, u, unknown, other, or absent
  misc_difference 296: note = a, c, g, u, unknown, other, or absent
  misc_difference 297: note = a, c, g, u, unknown, other, or absent
  misc_difference 298: note = a, c, g, u, unknown, other, or absent
  misc_difference 299: note = a, c, g, u, unknown, other, or absent
  misc_difference 300: note = a, c, g, u, unknown, other, or absent
  misc_difference 301: note = a, c, g, u, unknown, other, or absent
  misc_difference 302: note = a, c, g, u, unknown, other, or absent
  misc_difference 303: note = a, c, g, u, unknown, other, or absent
  misc_difference 304: note = a, c, g, u, unknown, other, or absent
  misc_difference 305: note = a, c, g, u, unknown, other, or absent
  misc_difference 306: note = a, c, g, u, unknown, other, or absent
  misc_difference 307: note = a, c, g, u, unknown, other, or absent
  misc_difference 308: note = a, c, g, u, unknown, other, or absent
  misc_difference 309: note = a, c, g, u, unknown, other, or absent
  misc_difference 310: note = a, c, g, u, unknown, other, or absent
  misc_difference 311: note = a, c, g, u, unknown, other, or absent
  misc_difference 312: note = a, c, g, u, unknown, other, or absent
  misc_difference 313: note = a, c, g, u, unknown, other, or absent
  misc_difference 314: note = a, c, g, u, unknown, other, or absent
  misc_difference 315: note = a, c, g, u, unknown, other, or absent
  misc_difference 316: note = a, c, g, u, unknown, other, or absent
  misc_difference 317: note = a, c, g, u, unknown, other, or absent
  misc_difference 318: note = a, c, g, u, unknown, other, or absent
  misc_difference 319: note = May be absent
  misc_difference 320: note = a, c, g, u, unknown, other, or absent
  misc_difference 321: note = a, c, g, u, unknown, other, or absent
  misc_difference 322: note = May be absent
  misc_difference 323: note = May be absent
  misc_difference 324: note = May be absent
  misc_difference 325: note = May be absent
  misc_difference 326: note = May be absent
  misc_difference 327: note = May be absent
  misc_difference 328: note = a, c, g, u, unknown, other, or absent
  misc_difference 329: note = May be absent
  misc_difference 330: note = May be absent
  misc_difference 331: note = May be absent
  misc_difference 332: note = May be absent
  misc_difference 333: note = a, c, g, u, unknown, other, or absent
  misc_difference 334: note = a, c, g, u, unknown, other, or absent
  misc_difference 335: note = a, c, g, u, unknown, other, or absent
  misc_difference 336: note = a, c, g, u, unknown, other, or absent
  misc_difference 337: note = May be absent
  misc_difference 338: note = May be absent
  misc_difference 339: note = May be absent
  misc_difference 340: note = a, c, g, u, unknown, other, or absent
  misc_difference 341: note = a, c, g, u, unknown, other, or absent
  misc_difference 342: note = May be absent
  misc_difference 44..315: note = This region may encompass 1-271 nucleotides
nnbbnndtnrwnhrdnhygnnbhrdnnynnnnnvytytsrnbvnnnnnnnnnnnnnnnnnnnnnnnnnnnnnnnnnnnnnnnnnnnnnnnnnnnnnnnnnnnnnnnnnnnnnnnnnnnnnnnnnnnnnnnnnnnnnnnnnnnnnnnnnnnnnnnnnnnnnnnnnnnnnnnnnnnnnnnnnnnnnnnnnnnnnnnnnnnnnnnnnnnnnnnnnnnnnnnnnnnnnnnnnnnnnnnnnnnnnnnnnnnnnnnnnnnnnnnnnnnnnnnnnnnnnnnnnnnnnnnnnnnnnnnnnnnnnnnnnnnnnnnnnnnnnnnnnnnbnnrytbrwnyyhbnnnndvvnnd

SEQ ID NO: 581 - RNA, 340 nt, synthetic construct
  source 1..340: mol_type = other RNA
  misc_difference 1: note = a, c, g, u, unknown, other, or absent
  misc_difference 2: note = a, c, g, u, unknown, other, or absent
  misc_difference 3: note = May be absent
  misc_difference 4: note = May be absent
  misc_difference 5: note = a, c, g, u, unknown, other, or absent
  misc_difference 6: note = May be absent
  misc_difference 7: note = May be absent
  misc_difference 8: note = May be absent
  misc_difference 9: note = May be absent
  misc_difference 10: note = May be absent
  misc_difference 11: note = May be absent
  misc_difference 12: note = a, c, g, u, unknown, other, or absent
  misc_difference 13: note = May be absent
  misc_difference 14: note = May be absent
  misc_difference 15: note = May be absent
  misc_difference 16: note = May be absent
  misc_difference 17: note = May be absent
  misc_difference 18: note = May be absent
  misc_difference 19: note = May be absent
  misc_difference 20: note = a, c, g, u, unknown, other, or absent
  misc_difference 21: note = May be absent
  misc_difference 22: note = May be absent
  misc_difference 23: note = May be absent
  misc_difference 24: note = May be absent
  misc_difference 25: note = May be absent
  misc_difference 26: note = May be absent
  misc_difference 27: note = May be absent
  misc_difference 28: note = May be absent
  misc_difference 29: note = a, c, g, u, unknown, other, or absent
  misc_difference 30: note = May be absent
  misc_difference 31: note = a, c, g, u, unknown, other, or absent
  misc_difference 32: note = May be absent
  misc_difference 33: note = May be absent
  misc_difference 34: note = May be absent
  misc_difference 35: note = May be absent
  misc_difference 36: note = May be absent
  misc_difference 37: note = May be absent
  misc_difference 38: note = May be absent
  misc_difference 39: note = a, c, g, u, unknown, other, or absent
  misc_difference 40: note = May be absent
  misc_difference 41: note = May be absent
  misc_difference 42: note = May be absent
  misc_difference 43: note = a, c, g, u, unknown, other, or absent
  misc_difference 44: note = May be absent
  misc_difference 45: note = a, c, g, u, unknown, other, or absent
  misc_difference 46: note = a, c, g, u, unknown, other, or absent
  misc_difference 47: note = a, c, g, u, unknown, other, or absent
  misc_difference 48: note = a, c, g, u, unknown, other, or absent
  misc_difference 49: note = a, c, g, u, unknown, other, or absent
  misc_difference 50: note = a, c, g, u, unknown, other, or absent
  misc_difference 51: note = a, c, g, u, unknown, other, or absent
  misc_difference 52: note = a, c, g, u, unknown, other, or absent
  misc_difference 53: note = a, c, g, u, unknown, other, or absent
  misc_difference 54: note = a, c, g, u, unknown, other, or absent
  misc_difference 55: note = a, c, g, u, unknown, other, or absent
  misc_difference 56: note = a, c, g, u, unknown, other, or absent
  misc_difference 57: note = a, c, g, u, unknown, other, or absent
  misc_difference 58: note = a, c, g, u, unknown, other, or absent
  misc_difference 59: note = a, c, g, u, unknown, other, or absent
  misc_difference 60: note = a, c, g, u, unknown, other, or absent
  misc_difference 61: note = a, c, g, u, unknown, other, or absent
  misc_difference 62: note = a, c, g, u, unknown, other, or absent
  misc_difference 63: note = a, c, g, u, unknown, other, or absent
  misc_difference 64: note = a, c, g, u, unknown, other, or absent
  misc_difference 65: note = a, c, g, u, unknown, other, or absent
  misc_difference 66: note = a, c, g, u, unknown, other, or absent
  misc_difference 67: note = a, c, g, u, unknown, other, or absent
  misc_difference 68: note = a, c, g, u, unknown, other, or absent
  misc_difference 69: note = a, c, g, u, unknown, other, or absent
  misc_difference 70: note = a, c, g, u, unknown, other, or absent
  misc_difference 71: note = a, c, g, u, unknown, other, or absent
  misc_difference 72: note = a, c, g, u, unknown, other, or absent
  misc_difference 73: note = a, c, g, u, unknown, other, or absent
  misc_difference 74: note = a, c, g, u, unknown, other, or absent
  misc_difference 75: note = a, c, g, u, unknown, other, or absent
  misc_difference 76: note = a, c, g, u, unknown, other, or absent
  misc_difference 77: note = a, c, g, u, unknown, other, or absent
  misc_difference 78: note = a, c, g, u, unknown, other, or absent
  misc_difference 79: note = a, c, g, u, unknown, other, or absent
  misc_difference 80: note = a, c, g, u, unknown, other, or absent
  misc_difference 81: note = a, c, g, u, unknown, other, or absent
  misc_difference 82: note = a, c, g, u, unknown, other, or absent
  misc_difference 83: note = a, c, g, u, unknown, other, or absent
  misc_difference 84: note = a, c, g, u, unknown, other, or absent
  misc_difference 85: note = a, c, g, u, unknown, other, or absent
  misc_difference 86: note = a, c, g, u, unknown, other, or absent
  misc_difference 87: note = a, c, g, u, unknown, other, or absent
  misc_difference 88: note = a, c, g, u, unknown, other, or absent
  misc_difference 89: note = a, c, g, u, unknown, other, or absent
  misc_difference 90: note = a, c, g, u, unknown, other, or absent
  misc_difference 91: note = a, c, g, u, unknown, other, or absent
  misc_difference 92: note = a, c, g, u, unknown, other, or absent
  misc_difference 93: note = a, c, g, u, unknown, other, or absent
  misc_difference 94: note = a, c, g, u, unknown, other, or absent
  misc_difference 95: note = a, c, g, u, unknown, other, or absent
  misc_difference 96: note = a, c, g, u, unknown, other, or absent
  misc_difference 97: note = a, c, g, u, unknown, other, or absent
  misc_difference 98: note = a, c, g, u, unknown, other, or absent
  misc_difference 99: note = a, c, g, u, unknown, other, or absent
  misc_difference 100: note = a, c, g, u, unknown, other, or absent
  misc_difference 101: note = a, c, g, u, unknown, other, or absent
  misc_difference 102: note = a, c, g, u, unknown, other, or absent
  misc_difference 103: note = a, c, g, u, unknown, other, or absent
  misc_difference 104: note = a, c, g, u, unknown, other, or absent
  misc_difference 105: note = a, c, g, u, unknown, other, or absent
  misc_difference 106: note = a, c, g, u, unknown, other, or absent
  misc_difference 107: note = a, c, g, u, unknown, other, or absent
  misc_difference 108: note = a, c, g, u, unknown, other, or absent
  misc_difference 109: note = a, c, g, u, unknown, other, or absent
  misc_difference 110: note = a, c, g, u, unknown, other, or absent
  misc_difference 111: note = a, c, g, u, unknown, other, or absent
  misc_difference 112: note = a, c, g, u, unknown, other, or absent
  misc_difference 113: note = a, c, g, u, unknown, other, or absent
  misc_difference 114: note = a, c, g, u, unknown, other, or absent
  misc_difference 115: note = a, c, g, u, unknown, other, or absent
  misc_difference 116: note = a, c, g, u, unknown, other, or absent
  misc_difference 117: note = a, c, g, u, unknown, other, or absent
  misc_difference 118: note = a, c, g, u, unknown, other, or absent
  misc_difference 119: note = a, c, g, u, unknown, other, or absent
  misc_difference 120: note = a, c, g, u, unknown, other, or absent
  misc_difference 121: note = a, c, g, u, unknown, other, or absent
  misc_difference 122: note = a, c, g, u, unknown, other, or absent
  misc_difference 123: note = a, c, g, u, unknown, other, or absent
  misc_difference 124: note = a, c, g, u, unknown, other, or absent
  misc_difference 125: note = a, c, g, u, unknown, other, or absent
  misc_difference 126: note = a, c, g, u, unknown, other, or absent
  misc_difference 127: note = a, c, g, u, unknown, other, or absent
  misc_difference 128: note = a, c, g, u, unknown, other, or absent
  misc_difference 129: note = a, c, g, u, unknown, other, or absent
  misc_difference 130: note = a, c, g, u, unknown, other, or absent
  misc_difference 131: note = a, c, g, u, unknown, other, or absent
  misc_difference 132: note = a, c, g, u, unknown, other, or absent
  misc_difference 133: note = a, c, g, u, unknown, other, or absent
  misc_difference 134: note = a, c, g, u, unknown, other, or absent
  misc_difference 135: note = a, c, g, u, unknown, other, or absent
  misc_difference 136: note = a, c, g, u, unknown, other, or absent
  misc_difference 137: note = a, c, g, u, unknown, other, or absent
  misc_difference 138: note = a, c, g, u, unknown, other, or absent
  misc_difference 139: note = a, c, g, u, unknown, other, or absent
  misc_difference 140: note = a, c, g, u, unknown, other, or absent
  misc_difference 141: note = a, c, g, u, unknown, other, or absent
  misc_difference 142: note = a, c, g, u, unknown, other, or absent
  misc_difference 143: note = a, c, g, u, unknown, other, or absent
  misc_difference 144: note = a, c, g, u, unknown, other, or absent
  misc_difference 145: note = a, c, g, u, unknown, other, or absent
  misc_difference 146: note = a, c, g, u, unknown, other, or absent
  misc_difference 147: note = a, c, g, u, unknown, other, or absent
  misc_difference 148: note = a, c, g, u, unknown, other, or absent
  misc_difference 149: note = a, c, g, u, unknown, other, or absent
  misc_difference 150: note = a, c, g, u, unknown, other, or absent
  misc_difference 151: note = a, c, g, u, unknown, other, or absent
  misc_difference 152: note = a, c, g, u, unknown, other, or absent
  misc_difference 153: note = a, c, g, u, unknown, other, or absent
  misc_difference 154: note = a, c, g, u, unknown, other, or absent
  misc_difference 155: note = a, c, g, u, unknown, other, or absent
  misc_difference 156: note = a, c, g, u, unknown, other, or absent
  misc_difference 157: note = a, c, g, u, unknown, other, or absent
  misc_difference 158: note = a, c, g, u, unknown, other, or absent
  misc_difference 159: note = a, c, g, u, unknown, other, or absent
  misc_difference 160: note = a, c, g, u, unknown, other, or absent
  misc_difference 161: note = a, c, g, u, unknown, other, or absent
  misc_difference 162: note = a, c, g, u, unknown, other, or absent
  misc_difference 163: note = a, c, g, u, unknown, other, or absent
  misc_difference 164: note = a, c, g, u, unknown, other, or absent
  misc_difference 165: note = a, c, g, u, unknown, other, or absent
  misc_difference 166: note = a, c, g, u, unknown, other, or absent
  misc_difference 167: note = a, c, g, u, unknown, other, or absent
  misc_difference 168: note = a, c, g, u, unknown, other, or absent
  misc_difference 169: note = a, c, g, u, unknown, other, or absent
  misc_difference 170: note = a, c, g, u, unknown, other, or absent
  misc_difference 171: note = a, c, g, u, unknown, other, or absent
  misc_difference 172: note = a, c, g, u, unknown, other, or absent
  misc_difference 173: note = a, c, g, u, unknown, other, or absent
  misc_difference 174: note = a, c, g, u, unknown, other, or absent
  misc_difference 175: note = a, c, g, u, unknown, other, or absent
  misc_difference 176: note = a, c, g, u, unknown, other, or absent
  misc_difference 177: note = a, c, g, u, unknown, other, or absent
  misc_difference 178: note = a, c, g, u, unknown, other, or absent
  misc_difference 179: note = a, c, g, u, unknown, other, or absent
  misc_difference 180: note = a, c, g, u, unknown, other, or absent
  misc_difference 181: note = a, c, g, u, unknown, other, or absent
  misc_difference 182: note = a, c, g, u, unknown, other, or absent
  misc_difference 183: note = a, c, g, u, unknown, other, or absent
  misc_difference 184: note = a, c, g, u, unknown, other, or absent
  misc_difference 185: note = a, c, g, u, unknown, other, or absent
  misc_difference 186: note = a, c, g, u, unknown, other, or absent
  misc_difference 187: note = a, c, g, u, unknown, other, or absent
  misc_difference 188: note = a, c, g, u, unknown, other, or absent
  misc_difference 189: note = a, c, g, u, unknown, other, or absent
  misc_difference 190: note = a, c, g, u, unknown, other, or absent
  misc_difference 191: note = a, c, g, u, unknown, other, or absent
  misc_difference 192: note = a, c, g, u, unknown, other, or absent
  misc_difference 193: note = a, c, g, u, unknown, other, or absent
  misc_difference 194: note = a, c, g, u, unknown, other, or absent
  misc_difference 195: note = a, c, g, u, unknown, other, or absent
  misc_difference 196: note = a, c, g, u, unknown, other, or absent
  misc_difference 197: note = a, c, g, u, unknown, other, or absent
  misc_difference 198: note = a, c, g, u, unknown, other, or absent
  misc_difference 199: note = a, c, g, u, unknown, other, or absent
  misc_difference 200: note = a, c, g, u, unknown, other, or absent
  misc_difference 201: note = a, c, g, u, unknown, other, or absent
  misc_difference 202: note = a, c, g, u, unknown, other, or absent
  misc_difference 203: note = a, c, g, u, unknown, other, or absent
  misc_difference 204: note = a, c, g, u, unknown, other, or absent
  misc_difference 205: note = a, c, g, u, unknown, other, or absent
  misc_difference 206: note = a, c, g, u, unknown, other, or absent
  misc_difference 207: note = a, c, g, u, unknown, other, or absent
  misc_difference 208: note = a, c, g, u, unknown, other, or absent
  misc_difference 209: note = a, c, g, u, unknown, other, or absent
  misc_difference 210: note = a, c, g, u, unknown, other, or absent
  misc_difference 211: note = a, c, g, u, unknown, other, or absent
  misc_difference 212: note = a, c, g, u, unknown, other, or absent
  misc_difference 213: note = a, c, g, u, unknown, other, or absent
  misc_difference 214: note = a, c, g, u, unknown, other, or absent
  misc_difference 215: note = a, c, g, u, unknown, other, or absent
  misc_difference 216: note = a, c, g, u, unknown, other, or absent
  misc_difference 217: note = a, c, g, u, unknown, other, or absent
  misc_difference 218: note = a, c, g, u, unknown, other, or absent
  misc_difference 219: note = a, c, g, u, unknown, other, or absent
  misc_difference 220: note = a, c, g, u, unknown, other, or absent
  misc_difference 221: note = a, c, g, u, unknown, other, or absent
  misc_difference 222: note = a, c, g, u, unknown, other, or absent
  misc_difference 223: note = a, c, g, u, unknown, other, or absent
  misc_difference 224: note = a, c, g, u, unknown, other, or absent
  misc_difference 225: note = a, c, g, u, unknown, other, or absent
  misc_difference 226: note = a, c, g, u, unknown, other, or absent
  misc_difference 227: note = a, c, g, u, unknown, other, or absent
  misc_difference 228: note = a, c, g, u, unknown, other, or absent
  misc_difference 229: note = a, c, g, u, unknown, other, or absent
  misc_difference 230: note = a, c, g, u, unknown, other, or absent
  misc_difference 231: note = a, c, g, u, unknown, other, or absent
  misc_difference 232: note = a, c, g, u, unknown, other, or absent
  misc_difference 233: note = a, c, g, u, unknown, other, or absent
  misc_difference 234: note = a, c, g, u, unknown, other, or absent
  misc_difference 235: note = a, c, g, u, unknown, other, or absent
  misc_difference 236: note = a, c, g, u, unknown, other, or absent
  misc_difference 237: note = a, c, g, u, unknown, other, or absent
  misc_difference 238: note = a, c, g, u, unknown, other, or absent
  misc_difference 239: note = a, c, g, u, unknown, other, or absent
  misc_difference 240: note = a, c, g, u, unknown, other, or absent
  misc_difference 241: note = a, c, g, u, unknown, other, or absent
  misc_difference 242: note = a, c, g, u, unknown, other, or absent
  misc_difference 243: note = a, c, g, u, unknown, other, or absent
  misc_difference 244: note = a, c, g, u, unknown, other, or absent
  misc_difference 245: note = a, c, g, u, unknown, other, or absent
  misc_difference 246: note = a, c, g, u, unknown, other, or absent
  misc_difference 247: note = a, c, g, u, unknown, other, or absent
  misc_difference 248: note = a, c, g, u, unknown, other, or absent
  misc_difference 249: note = a, c, g, u, unknown, other, or absent
  misc_difference 250: note = a, c, g, u, unknown, other, or absent
  misc_difference 251: note = a, c, g, u, unknown, other, or absent
  misc_difference 252: note = a, c, g, u, unknown, other, or absent
  misc_difference 253: note = a, c, g, u, unknown, other, or absent
  misc_difference 254: note = a, c, g, u, unknown, other, or absent
  misc_difference 255: note = a, c, g, u, unknown, other, or absent
  misc_difference 256: note = a, c, g, u, unknown, other, or absent
  misc_difference 257: note = a, c, g, u, unknown, other, or absent
  misc_difference 258: note = a, c, g, u, unknown, other, or absent
  misc_difference 259: note = a, c, g, u, unknown, other, or absent
  misc_difference 260: note = a, c, g, u, unknown, other, or absent
  misc_difference 261: note = a, c, g, u, unknown, other, or absent
  misc_difference 262: note = a, c, g, u, unknown, other, or absent
  misc_difference 263: note = a, c, g, u, unknown, other, or absent
  misc_difference 264: note = a, c, g, u, unknown, other, or absent
  misc_difference 265: note = a, c, g, u, unknown, other, or absent
  misc_difference 266: note = a, c, g, u, unknown, other, or absent
  misc_difference 267: note = a, c, g, u, unknown, other, or absent
  misc_difference 268: note = a, c, g, u, unknown, other, or absent
  misc_difference 269: note = a, c, g, u, unknown, other, or absent
  misc_difference 270: note = a, c, g, u, unknown, other, or absent
  misc_difference 271: note = a, c, g, u, unknown, other, or absent
  misc_difference 272: note = a, c, g, u, unknown, other, or absent
  misc_difference 273: note = a, c, g, u, unknown, other, or absent
  misc_difference 274: note = a, c, g, u, unknown, other, or absent
  misc_difference 275: note = a, c, g, u, unknown, other, or absent
  misc_difference 276: note = a, c, g, u, unknown, other, or absent
  misc_difference 277: note = a, c, g, u, unknown, other, or absent
  misc_difference 278: note = a, c, g, u, unknown, other, or absent
  misc_difference 279: note = a, c, g, u, unknown, other, or absent
  misc_difference 280: note = a, c, g, u, unknown, other, or absent
  misc_difference 281: note = a, c, g, u, unknown, other, or absent
  misc_difference 282: note = a, c, g, u, unknown, other, or absent
  misc_difference 283: note = a, c, g, u, unknown, other, or absent
  misc_difference 284: note = a, c, g, u, unknown, other, or absent
  misc_difference 285: note = a, c, g, u, unknown, other, or absent
  misc_difference 286: note = a, c, g, u, unknown, other, or absent
  misc_difference 287: note = a, c, g, u, unknown, other, or absent
  misc_difference 288: note = a, c, g, u, unknown, other, or absent
  misc_difference 289: note = a, c, g, u, unknown, other, or absent
  misc_difference 290: note = a, c, g, u, unknown, other, or absent
  misc_difference 291: note = a, c, g, u, unknown, other, or absent
  misc_difference 292: note = a, c, g, u, unknown, other, or absent
  misc_difference 293: note = a, c, g, u, unknown, other, or absent
  misc_difference 294: note = a, c, g, u, unknown, other, or absent
  misc_difference 295: note = a, c, g, u, unknown, other, or absent
  misc_difference 296: note = a, c, g, u, unknown, other, or absent
  misc_difference 297: note = a, c, g, u, unknown, other, or absent
  misc_difference 298: note = a, c, g, u, unknown, other, or absent
  misc_difference 299: note = a, c, g, u, unknown, other, or absent
  misc_difference 300: note = a, c, g, u, unknown, other, or absent
  misc_difference 301: note = a, c, g, u, unknown, other, or absent
  misc_difference 302: note = a, c, g, u, unknown, other, or absent
  misc_difference 303: note = a, c, g, u, unknown, other, or absent
  misc_difference 304: note = a, c, g, u, unknown, other, or absent
  misc_difference 305: note = a, c, g, u, unknown, other, or absent
  misc_difference 306: note = a, c, g, u, unknown, other, or absent
  misc_difference 307: note = a, c, g, u, unknown, other, or absent
  misc_difference 308: note = a, c, g, u, unknown, other, or absent
  misc_difference 309: note = a, c, g, u, unknown, other, or absent
  misc_difference 310: note = a, c, g, u, unknown, other, or absent
  misc_difference 311: note = a, c, g, u, unknown, other, or absent
  misc_difference 312: note = a, c, g, u, unknown, other, or absent
  misc_difference 313: note = a, c, g, u, unknown, other, or absent
  misc_difference 314: note = a, c, g, u, unknown, other, or absent
  misc_difference 315: note = a, c, g, u, unknown, other, or absent
  misc_difference 316: note = a, c, g, u, unknown, other, or absent
  misc_difference 317: note = May be absent
  misc_difference 318: note = May be absent
  misc_difference 319: note = a, c, g, u, unknown, other, or absent
  misc_difference 320: note = May be absent
  misc_difference 321: note = May be absent
  misc_difference 322: note = May be absent
  misc_difference 323: note = May be absent
  misc_difference 324: note = May be absent
  misc_difference 325: note = May be absent
  misc_difference 326: note = a, c, g, u, unknown, other, or absent
  misc_difference 327: note = May be absent
  misc_difference 328: note = May be absent
  misc_difference 329: note = May be absent
  misc_difference 330: note = May be absent
  misc_difference 331: note = May be absent
  misc_difference 332: note = May be absent
  misc_difference 333: note = May be absent
  misc_difference 334: note = a, c, g, u, unknown, other, or absent
  misc_difference 335: note = May be absent
  misc_difference 336: note = May be absent
  misc_difference 337: note = May be absent
  misc_difference 338: note = a, c, g, u, unknown, other, or absent
  misc_difference 339: note = May be absent
  misc_difference 340: note = May be absent
  misc_difference 45..316: note = This region may encompass 1-271 nucleotides
nnbynbdyrgtntrdyagbnkrrvvywbnbnvytytsanbvhndnnnnnnnnnnnnnnnnnnnnnnnnnnnnnnnnnnnnnnnnnnnnnnnnnnnnnnnnnnnnnnnnnnnnnnnnnnnnnnnnnnnnnnnnnnnnnnnnnnnnnnnnnnnnnnnnnnnnnnnnnnnnnnnnnnnnnnnnnnnnnnnnnnnnnnnnnnnnnnnnnnnnnnnnnnnnnnnnnnnnnnnnnnnnnnnnnnnnnnnnnnnnnnnnnnnnnnnnnnnnnnnnnnnnnnnnnnnnnnnnnnnnnnnnnnnnnnnnnnnnnnnnnnnnnnnnydnrytbrwnychbrkbndvvnvd

SEQ ID NO: 582 - RNA, 339 nt, synthetic construct
  source 1..339: mol_type = other RNA
  misc_difference 1: note = a, c, g, u, unknown, other, or absent
  misc_difference 2: note = May be absent
  misc_difference 3: note = May be absent
  misc_difference 4: note = May be absent
  misc_difference 5: note = May be absent
  misc_difference 6: note = May be absent
  misc_difference 7: note = May be absent
  misc_difference 8: note = May be absent
  misc_difference 9: note = May be absent
  misc_difference 10: note = May be absent
  misc_difference 11: note = May be absent
  misc_difference 12: note = May be absent
  misc_difference 13: note = May be absent
  misc_difference 14: note = May be absent
  misc_difference 15: note = May be absent
  misc_difference 16: note = May be absent
  misc_difference 17: note = May be absent
  misc_difference 18: note = May be absent
  misc_difference 19: note = May be absent
  misc_difference 20: note = May be absent
  misc_difference 21: note = May be absent
  misc_difference 22: note = May be absent
  misc_difference 23: note = May be absent
  misc_difference 24: note = May be absent
  misc_difference 25: note = May be absent
  misc_difference 26: note = May be absent
  misc_difference 27: note = May be absent
  misc_difference 28: note = a, c, g, u, unknown, other, or absent
  misc_difference 29: note = May be absent
  misc_difference 30: note = a, c, g, u, unknown, other, or absent
  misc_difference 31: note = May be absent
  misc_difference 32: note = May be absent
  misc_difference 33: note = May be absent
  misc_difference 34: note = May be absent
  misc_difference 35: note = May be absent
  misc_difference 36: note = May be absent
  misc_difference 37: note = May be absent
  misc_difference 38: note = May be absent
  misc_difference 39: note = May be absent
  misc_difference 40: note = May be absent
  misc_difference 41: note = May be absent
  misc_difference 42: note = a, c, g, u, unknown, other, or absent
  misc_difference 43: note = May be absent
  misc_difference 44: note = a, c, g, u, unknown, other, or absent
  misc_difference 45: note = a, c, g, u, unknown, other, or absent
  misc_difference 46: note = a, c, g, u, unknown, other, or absent
  misc_difference 47: note = a, c, g, u, unknown, other, or absent
  misc_difference 48: note = a, c, g, u, unknown, other, or absent
  misc_difference 49: note = a, c, g, u, unknown, other, or absent
  misc_difference 50: note = a, c, g, u, unknown, other, or absent
  misc_difference 51: note = a, c, g, u, unknown, other, or absent
  misc_difference 52: note = a, c, g, u, unknown, other, or absent
  misc_difference 53: note = a, c, g, u, unknown, other, or absent
  misc_difference 54: note = a, c, g, u, unknown, other, or absent
  misc_difference 55: note = a, c, g, u, unknown, other, or absent
  misc_difference 56: note = a, c, g, u, unknown, other, or absent
  misc_difference 57: note = a, c, g, u, unknown, other, or absent
  misc_difference 58: note = a, c, g, u, unknown, other, or absent
  misc_difference 59: note = a, c, g, u, unknown, other, or absent
  misc_difference 60: note = a, c, g, u, unknown, other, or absent
  misc_difference 61: note = a, c, g, u, unknown, other, or absent
  misc_difference 62: note = a, c, g, u, unknown, other, or absent
  misc_difference 63: note = a, c, g, u, unknown, other, or absent
  misc_difference 64: note = a, c, g, u, unknown, other, or absent
  misc_difference 65: note = a, c, g, u, unknown, other, or absent
  misc_difference 66: note = a, c, g, u, unknown, other, or absent
  misc_difference 67: note = a, c, g, u, unknown, other, or absent
  misc_difference 68: note = a, c, g, u, unknown, other, or absent
  misc_difference 69: note = a, c, g, u, unknown, other, or absent
  misc_difference 70: note = a, c, g, u, unknown, other, or absent
  misc_difference 71: note = a, c, g, u, unknown, other, or absent
  misc_difference 72: note = a, c, g, u, unknown, other, or absent
  misc_difference 73: note = a, c, g, u, unknown, other, or absent
  misc_difference 74: note = a, c, g, u, unknown, other, or absent
  misc_difference 75: note = a, c, g, u, unknown, other, or absent
  misc_difference 76: note = a, c, g, u, unknown, other, or absent
  misc_difference 77: note = a, c, g, u, unknown, other, or absent
  misc_difference 78: note = a, c, g, u, unknown, other, or absent
  misc_difference 79: note = a, c, g, u, unknown, other, or absent
  misc_difference 80: note = a, c, g, u, unknown, other, or absent
  misc_difference 81: note = a, c, g, u, unknown, other, or absent
  misc_difference 82: note = a, c, g, u, unknown, other, or absent
  misc_difference 83: note = a, c, g, u, unknown, other, or absent
  misc_difference 84: note = a, c, g, u, unknown, other, or absent
  misc_difference 85: note = a, c, g, u, unknown, other, or absent
  misc_difference 86: note = a, c, g, u, unknown, other, or absent
  misc_difference 87: note = a, c, g, u, unknown, other, or absent
  misc_difference 88: note = a, c, g, u, unknown, other, or absent
  misc_difference 89: note = a, c, g, u, unknown, other, or absent
  misc_difference 90: note = a, c, g, u, unknown, other, or absent
  misc_difference 91: note = a, c, g, u, unknown, other, or absent
  misc_difference 92: note = a, c, g, u, unknown, other, or absent
  misc_difference 93: note = a, c, g, u, unknown, other, or absent
  misc_difference 94: note = a, c, g, u, unknown, other, or absent
  misc_difference 95: note = a, c, g, u, unknown, other, or absent
  misc_difference 96: note = a, c, g, u, unknown, other, or absent
  misc_difference 97: note = a, c, g, u, unknown, other, or absent
  misc_difference 98: note = a, c, g, u, unknown, other, or absent
  misc_difference 99: note = a, c, g, u, unknown, other, or absent
  misc_difference 100: note = a, c, g, u, unknown, other, or absent
  misc_difference 101: note = a, c, g, u, unknown, other, or absent
  misc_difference 102: note = a, c, g, u, unknown, other, or absent
  misc_difference 103: note = a, c, g, u, unknown, other, or absent
  misc_difference 104: note = a, c, g, u, unknown, other, or absent
  misc_difference 105: note = a, c, g, u, unknown, other, or absent
  misc_difference 106: note = a, c, g, u, unknown, other, or absent
  misc_difference 107: note = a, c, g, u, unknown, other, or absent
  misc_difference 108: note = a, c, g, u, unknown, other, or absent
  misc_difference 109: note = a, c, g, u, unknown, other, or absent
  misc_difference 110: note = a, c, g, u, unknown, other, or absent
  misc_difference 111: note = a, c, g, u, unknown, other, or absent
  misc_difference 112: note = a, c, g, u, unknown, other, or absent
  misc_difference 113: note = a, c, g, u, unknown, other, or absent
  misc_difference 114: note = a, c, g, u, unknown, other, or absent
  misc_difference 115: note = a, c, g, u, unknown, other, or absent
  misc_difference 116: note = a, c, g, u, unknown, other, or absent
  misc_difference 117: note = a, c, g, u, unknown, other, or absent
  misc_difference 118: note = a, c, g, u, unknown, other, or absent
  misc_difference 119: note = a, c, g, u, unknown, other, or absent
  misc_difference 120: note = a, c, g, u, unknown, other, or absent
  misc_difference 121: note = a, c, g, u, unknown, other, or absent
  misc_difference 122: note = a, c, g, u, unknown, other, or absent
  misc_difference 123: note = a, c, g, u, unknown, other, or absent
  misc_difference 124: note = a, c, g, u, unknown, other, or absent
  misc_difference 125: note = a, c, g, u, unknown, other, or absent
  misc_difference 126: note = a, c, g, u, unknown, other, or absent
  misc_difference 127: note = a, c, g, u, unknown, other, or absent
  misc_difference 128: note = a, c, g, u, unknown, other, or absent
  misc_difference 129: note = a, c, g, u, unknown, other, or absent
  misc_difference 130: note = a, c, g, u, unknown, other, or absent
  misc_difference 131: note = a, c, g, u, unknown, other, or absent
  misc_difference 132: note = a, c, g, u, unknown, other, or absent
  misc_difference 133: note = a, c, g, u, unknown, other, or absent
  misc_difference 134: note = a, c, g, u, unknown, other, or absent
  misc_difference 135: note = a, c, g, u, unknown, other, or absent
  misc_difference 136: note = a, c, g, u, unknown, other, or absent
  misc_difference 137: note = a, c, g, u, unknown, other, or absent
  misc_difference 138: note = a, c, g, u, unknown, other, or absent
  misc_difference 139: note = a, c, g, u, unknown, other, or absent
  misc_difference 140: note = a, c, g, u, unknown, other, or absent
  misc_difference 141: note = a, c, g, u, unknown, other, or absent
  misc_difference 142: note = a, c, g, u, unknown, other, or absent
  misc_difference 143: note = a, c, g, u, unknown, other, or absent
  misc_difference 144: note = a, c, g, u, unknown, other, or absent
  misc_difference 145: note = a, c, g, u, unknown, other, or absent
  misc_difference 146: note = a, c, g, u, unknown, other, or absent
  misc_difference 147: note = a, c, g, u, unknown, other, or absent
  misc_difference 148: note = a, c, g, u, unknown, other, or absent
  misc_difference 149: note = a, c, g, u, unknown, other, or absent
  misc_difference 150: note = a, c, g, u, unknown, other, or absent
  misc_difference 151: note = a, c, g, u, unknown, other, or absent
  misc_difference 152: note = a, c, g, u, unknown, other, or absent
  misc_difference 153: note = a, c, g, u, unknown, other, or absent
  misc_difference 154: note = a, c, g, u, unknown, other, or absent
  misc_difference 155: note = a, c, g, u, unknown, other, or absent
  misc_difference 156: note = a, c, g, u, unknown, other, or absent
  misc_difference 157: note = a, c, g, u, unknown, other, or absent
  misc_difference 158: note = a, c, g, u, unknown, other, or absent
  misc_difference 159: note = a, c, g, u, unknown, other, or absent
  misc_difference 160: note = a, c, g, u, unknown, other, or absent
  misc_difference 161: note = a, c, g, u, unknown, other, or absent
  misc_difference 162: note = a, c, g, u, unknown, other, or absent
  misc_difference 163: note = a, c, g, u, unknown, other, or absent
  misc_difference 164: note = a, c, g, u, unknown, other, or absent
  misc_difference 165: note = a, c, g, u, unknown, other, or absent
  misc_difference 166: note = a, c, g, u, unknown, other, or absent
  misc_difference 167: note = a, c, g, u, unknown, other, or absent
  misc_difference 168: note = a, c, g, u, unknown, other, or absent
  misc_difference 169: note = a, c, g, u, unknown, other, or absent
  misc_difference 170: note = a, c, g, u, unknown, other, or absent
  misc_difference 171: note = a, c, g, u, unknown, other, or absent
  misc_difference 172: note = a, c, g, u, unknown, other, or absent
  misc_difference 173: note = a, c, g, u, unknown, other, or absent
  misc_difference 174: note = a, c, g, u, unknown, other, or absent
  misc_difference 175: note = a, c, g, u, unknown, other, or absent
  misc_difference 176: note = a, c, g, u, unknown, other, or absent
  misc_difference 177: note = a, c, g, u, unknown, other, or absent
  misc_difference 178: note = a, c, g, u, unknown, other, or absent
  misc_difference 179: note = a, c, g, u, unknown, other, or absent
  misc_difference 180: note = a, c, g, u, unknown, other, or absent
  misc_difference 181: note = a, c, g, u, unknown, other, or absent
  misc_difference 182: note = a, c, g, u, unknown, other, or absent
  misc_difference 183: note = a, c, g, u, unknown, other, or absent
  misc_difference 184: note = a, c, g, u, unknown, other, or absent
  misc_difference 185: note = a, c, g, u, unknown, other, or absent
  misc_difference 186: note = a, c, g, u, unknown, other, or absent
  misc_difference 187: note = a, c, g, u, unknown, other, or absent
  misc_difference 188: note = a, c, g, u, unknown, other, or absent
  misc_difference 189: note = a, c, g, u, unknown, other, or absent
  misc_difference 190: note = a, c, g, u, unknown, other, or absent
  misc_difference 191: note = a, c, g, u, unknown, other, or absent
  misc_difference 192: note = a, c, g, u, unknown, other, or absent
  misc_difference 193: note = a, c, g, u, unknown, other, or absent
  misc_difference 194: note = a, c, g, u, unknown, other, or absent
  misc_difference 195: note = a, c, g, u, unknown, other, or absent
  misc_difference 196: note = a, c, g, u, unknown, other, or absent
  misc_difference 197: note = a, c, g, u, unknown, other, or absent
  misc_difference 198: note = a, c, g, u, unknown, other, or absent
  misc_difference 199: note = a, c, g, u, unknown, other, or absent
  misc_difference 200: note = a, c, g, u, unknown, other, or absent
  misc_difference 201: note = a, c, g, u, unknown, other, or absent
  misc_difference 202: note = a, c, g, u, unknown, other, or absent
  misc_difference 203: note = a, c, g, u, unknown, other, or absent
  misc_difference 204: note = a, c, g, u, unknown, other, or absent
  misc_difference 205: note = a, c, g, u, unknown, other, or absent
  misc_difference 206: note = a, c, g, u, unknown, other, or absent
  misc_difference 207: note = a, c, g, u, unknown, other, or absent
  misc_difference 208: note = a, c, g, u, unknown, other, or absent
  misc_difference 209: note = a, c, g, u, unknown, other, or absent
  misc_difference 210: note = a, c, g, u, unknown, other, or absent
  misc_difference 211: note = a, c, g, u, unknown, other, or absent
  misc_difference 212: note = a, c, g, u, unknown, other, or absent
  misc_difference 213: note = a, c, g, u, unknown, other, or absent
  misc_difference 214: note = a, c, g, u, unknown, other, or absent
  misc_difference 215: note = a, c, g, u, unknown, other, or absent
  misc_difference 216: note = a, c, g, u, unknown, other, or absent
  misc_difference 217: note = a, c, g, u, unknown, other, or absent
  misc_difference 218: note = a, c, g, u, unknown, other, or absent
  misc_difference 219: note = a, c, g, u, unknown, other, or absent
  misc_difference 220: note = a, c, g, u, unknown, other, or absent
  misc_difference 221: note = a, c, g, u, unknown, other, or absent
  misc_difference 222: note = a, c, g, u, unknown, other, or absent
  misc_difference 223: note = a, c, g, u, unknown, other, or absent
  misc_difference 224: note = a, c, g, u, unknown, other, or absent
  misc_difference 225: note = a, c, g, u, unknown, other, or absent
  misc_difference 226: note = a, c, g, u, unknown, other, or absent
  misc_difference 227: note = a, c, g, u, unknown, other, or absent
  misc_difference 228: note = a, c, g, u, unknown, other, or absent
  misc_difference 229: note = a, c, g, u, unknown, other, or absent
  misc_difference 230: note = a, c, g, u, unknown, other, or absent
  misc_difference 231: note = a, c, g, u, unknown, other, or absent
  misc_difference 232: note = a, c, g, u, unknown, other, or absent
  misc_difference 233: note = a, c, g, u, unknown, other, or absent
  misc_difference 234: note = a, c, g, u, unknown, other, or absent
  misc_difference 235: note = a, c, g, u, unknown, other, or absent
  misc_difference 236: note = a, c, g, u, unknown, other, or absent
  misc_difference 237: note = a, c, g, u, unknown, other, or absent
  misc_difference 238: note = a, c, g, u, unknown, other, or absent
  misc_difference 239: note = a, c, g, u, unknown, other, or absent
  misc_difference 240: note = a, c, g, u, unknown, other, or absent
  misc_difference 241: note = a, c, g, u, unknown, other, or absent
  misc_difference 242: note = a, c, g, u, unknown, other, or absent
  misc_difference 243: note = a, c, g, u, unknown, other, or absent
  misc_difference 244: note = a, c, g, u, unknown, other, or absent
  misc_difference 245: note = a, c, g, u, unknown, other, or absent
  misc_difference 246: note = a, c, g, u, unknown, other, or absent
  misc_difference 247: note = a, c, g, u, unknown, other, or absent
  misc_difference 248: note = a, c, g, u, unknown, other, or absent
  misc_difference 249: note = a, c, g, u, unknown, other, or absent
  misc_difference 250: note = a, c, g, u, unknown, other, or absent
  misc_difference 251: note = a, c, g, u, unknown, other, or absent
  misc_difference 252: note = a, c, g, u, unknown, other, or absent
  misc_difference 253: note = a, c, g, u, unknown, other, or absent
  misc_difference 254: note = a, c, g, u, unknown, other, or absent
  misc_difference 255: note = a, c, g, u, unknown, other, or absent
  misc_difference 256: note = a, c, g, u, unknown, other, or absent
  misc_difference 257: note = a, c, g, u, unknown, other, or absent
  misc_difference 258: note = a, c, g, u, unknown, other, or absent
  misc_difference 259: note = a, c, g, u, unknown, other, or absent
  misc_difference 260: note = a, c, g, u, unknown, other, or absent
  misc_difference 261: note = a, c, g, u, unknown, other, or absent
  misc_difference 262: note = a, c, g, u, unknown, other, or absent
  misc_difference 263: note = a, c, g, u, unknown, other, or absent
  misc_difference 264: note = a, c, g, u, unknown, other, or absent
  misc_difference 265: note = a, c, g, u, unknown, other, or absent
  misc_difference 266: note = a, c, g, u, unknown, other, or absent
  misc_difference 267: note = a, c, g, u, unknown, other, or absent
  misc_difference 268: note = a, c, g, u, unknown, other, or absent
  misc_difference 269: note = a, c, g, u, unknown, other, or absent
  misc_difference 270: note = a, c, g, u, unknown, other, or absent
  misc_difference 271: note = a, c, g, u, unknown, other, or absent
  misc_difference 272: note = a, c, g, u, unknown, other, or absent
  misc_difference 273: note = a, c, g, u, unknown, other, or absent
  misc_difference 274: note = a, c, g, u, unknown, other, or absent
  misc_difference 275: note = a, c, g, u, unknown, other, or absent
  misc_difference 276: note = a, c, g, u, unknown, other, or absent
  misc_difference 277: note = a, c, g, u, unknown, other, or absent
  misc_difference 278: note = a, c, g, u, unknown, other, or absent
  misc_difference 279: note = a, c, g, u, unknown, other, or absent
  misc_difference 280: note = a, c, g, u, unknown, other, or absent
  misc_difference 281: note = a, c, g, u, unknown, other, or absent
  misc_difference 282: note = a, c, g, u, unknown, other, or absent
  misc_difference 283: note = a, c, g, u, unknown, other, or absent
  misc_difference 284: note = a, c, g, u, unknown, other, or absent
  misc_difference 285: note = a, c, g, u, unknown, other, or absent
  misc_difference 286: note = a, c, g, u, unknown, other, or absent
  misc_difference 287: note = a, c, g, u, unknown, other, or absent
  misc_difference 288: note = a, c, g, u, unknown, other, or absent
  misc_difference 289: note = a, c, g, u, unknown, other, or absent
  misc_difference 290: note = a, c, g, u, unknown, other, or absent
  misc_difference 291: note = a, c, g, u, unknown, other, or absent
  misc_difference 292: note = a, c, g, u, unknown, other, or absent
  misc_difference 293: note = a, c, g, u, unknown, other, or absent
  misc_difference 294: note = a, c, g, u, unknown, other, or absent
  misc_difference 295: note = a, c, g, u, unknown, other, or absent
  misc_difference 296: note = a, c, g, u, unknown, other, or absent
  misc_difference 297: note = a, c, g, u, unknown, other, or absent
  misc_difference 298: note = a, c, g, u, unknown, other, or absent
  misc_difference 299: note = a, c, g, u, unknown, other, or absent
  misc_difference 300: note = a, c, g, u, unknown, other, or absent
  misc_difference 301: note = a, c, g, u, unknown, other, or absent
  misc_difference 302: note = a, c, g, u, unknown, other, or absent
  misc_difference 303: note = a, c, g, u, unknown, other, or absent
  misc_difference 304: note = a, c, g, u, unknown, other, or absent
  misc_difference 305: note = a, c, g, u, unknown, other, or absent
  misc_difference 306: note = a, c, g, u, unknown, other, or absent
  misc_difference 307: note = a, c, g, u, unknown, other, or absent
  misc_difference 308: note = a, c, g, u, unknown, other, or absent
  misc_difference 309: note = a, c, g, u, unknown, other, or absent
  misc_difference 310: note = a, c, g, u, unknown, other, or absent
  misc_difference 311: note = a, c, g, u, unknown, other, or absent
  misc_difference 312: note = a, c, g, u, unknown, other, or absent
  misc_difference 313: note = a, c, g, u, unknown, other, or absent
  misc_difference 314: note = a, c, g, u, unknown, other, or absent
  misc_difference 315: note = May be absent
  misc_difference 316: note = May be absent
  misc_difference 317: note = May be absent
  misc_difference 318: note = a, c, g, u, unknown, other, or absent
  misc_difference 319: note = May be absent
  misc_difference 320: note = May be absent
  misc_difference 321: note = May be absent
  misc_difference 322: note = May be absent
  misc_difference 323: note = May be absent
  misc_difference 324: note = May be absent
  misc_difference 325: note = May be absent
  misc_difference 326: note = May be absent
  misc_difference 327: note = May be absent
  misc_difference 328: note = May be absent
  misc_difference 329: note = May be absent
  misc_difference 330: note = May be absent
  misc_difference 331: note = May be absent
  misc_difference 332: note = May be absent
  misc_difference 333: note = a, c, g, u, unknown, other, or absent
  misc_difference 334: note = May be absent
  misc_difference 335: note = May be absent
  misc_difference 336: note = May be absent
  misc_difference 337: note = May be absent
  misc_difference 338: note = May be absent
  misc_difference 339: note = May be absent
  misc_difference 44..315: note = This region may encompass 1-271 nucleotides
ncsydbrtggtstakygshkrrsaywbnknsytytcahbvmndnnnnnnnnnnnnnnnnnnnnnnnnnnnnnnnnnnnnnnnnnnnnnnnnnnnnnnnnnnnnnnnnnnnnnnnnnnnnnnnnnnnnnnnnnnnnnnnnnnnnnnnnnnnnnnnnnnnnnnnnnnnnnnnnnnnnnnnnnnnnnnnnnnnnnnnnnnnnnnnnnnnnnnnnnnnnnnnnnnnnnnnnnnnnnnnnnnnnnnnnnnnnnnnnnnnnnnnnnnnnnnnnnnnnnnnnnnnnnnnnnnnnnnnnnnnnnnnnnnnnnnnnnnnnnnnbyrnrytyrwytcyyrgbnwrsraw

SEQ ID NO: 583 - RNA, 342 nt, synthetic construct
  source 1..342: mol_type = other RNA
  misc_difference 1: note = May be absent
  misc_difference 2: note = May be absent
  misc_difference 3: note = May be absent
  misc_difference 4: note = a, c, g, u, unknown, other, or absent
  misc_difference 5: note = a, c, g, u, unknown, other, or absent
  misc_difference 6: note = a, c, g, u, unknown, other, or absent
  misc_difference 7: note = a, c, g, u, unknown, other, or absent
  misc_difference 8: note = May be absent
  misc_difference 9: note = May be absent
  misc_difference 10: note = May be absent
  misc_difference 11: note = May be absent
  misc_difference 12: note = a, c, g, u, unknown, other, or absent
  misc_difference 13: note = May be absent
  misc_difference 14: note = May be absent
  misc_difference 15: note = May be absent
  misc_difference 16: note = a, c, g, u, unknown, other, or absent
  misc_difference 17: note = May be absent
  misc_difference 18: note = May be absent
  misc_difference 19: note = May be absent
  misc_difference 20: note = May be absent
  misc_difference 21: note = a, c, g, u, unknown, other, or absent
  misc_difference 22: note = a, c, g, u, unknown, other, or absent
  misc_difference 23: note = May be absent
  misc_difference 24: note = May be absent
  misc_difference 25: note = May be absent
  misc_difference 26: note = a, c, g, u, unknown, other, or absent
  misc_difference 27: note = May be absent
  misc_difference 28: note = May be absent
  misc_difference 29: note = a, c, g, u, unknown, other, or absent
  misc_difference 30: note = a, c, g, u, unknown, other, or absent
  misc_difference 31: note = a, c, g, u, unknown, other, or absent
  misc_difference 32: note = a, c, g, u, unknown, other, or absent
  misc_difference 33: note = a, c, g, u, unknown, other, or absent
  misc_difference 34: note = a, c, g, u, unknown, other, or absent
  misc_difference 35: note = May be absent
  misc_difference 36: note = May be absent
  misc_difference 37: note = May be absent
  misc_difference 38: note = May be absent
  misc_difference 39: note = May be absent
  misc_difference 40: note = May be absent
  misc_difference 41: note = a, c, g, u, unknown, other, or absent
  misc_difference 42: note = a, c, g, u, unknown, other, or absent
  misc_difference 43: note = a, c, g, u, unknown, other, or absent
  misc_difference 44: note = a, c, g, u, unknown, other, or absent
  misc_difference 45: note = a, c, g, u, unknown, other, or absent
  misc_difference 46: note = a, c, g, u, unknown, other, or absent
  misc_difference 47: note = a, c, g, u, unknown, other, or absent
  misc_difference 48: note = a, c, g, u, unknown, other, or absent
  misc_difference 49: note = a, c, g, u, unknown, other, or absent
  misc_difference 50: note = a, c, g, u, unknown, other, or absent
  misc_difference 51: note = a, c, g, u, unknown, other, or absent
  misc_difference 52: note = a, c, g, u, unknown, other, or absent
  misc_difference 53: note = a, c, g, u, unknown, other, or absent
  misc_difference 54: note = a, c, g, u, unknown, other, or absent
  misc_difference 55: note = a, c, g, u, unknown, other, or absent
  misc_difference 56: note = a, c, g, u, unknown, other, or absent
  misc_difference 57: note = a, c, g, u, unknown, other, or absent
  misc_difference 58: note = a, c, g, u, unknown, other, or absent
  misc_difference 59: note = a, c, g, u, unknown, other, or absent
  misc_difference 60: note = a, c, g, u, unknown, other, or absent
  misc_difference 61: note = a, c, g, u, unknown, other, or absent
  misc_difference 62: note = a, c, g, u, unknown, other, or absent
  misc_difference 63: note = a, c, g, u, unknown, other, or absent
  misc_difference 64: note = a, c, g, u, unknown, other, or absent
  misc_difference 65: note = a, c, g, u, unknown, other, or absent
  misc_difference 66: note = a, c, g, u, unknown, other, or absent
  misc_difference 67: note = a, c, g, u, unknown, other, or absent
  misc_difference 68: note = a, c, g, u, unknown, other, or absent
  misc_difference 69: note = a, c, g, u, unknown, other, or absent
  misc_difference 70: note = a, c, g, u, unknown, other, or absent
  misc_difference 71: note = a, c, g, u, unknown, other, or absent
  misc_difference 72: note = a, c, g, u, unknown, other, or absent
  misc_difference 73: note = a, c, g, u, unknown, other, or absent
  misc_difference 74: note = a, c, g, u, unknown, other, or absent
  misc_difference 75: note = a, c, g, u, unknown, other, or absent
  misc_difference 76: note = a, c, g, u, unknown, other, or absent
  misc_difference 77: note = a, c, g, u, unknown, other, or absent
  misc_difference 78: note = a, c, g, u, unknown, other, or absent
  misc_difference 79: note = a, c, g, u, unknown, other, or absent
  misc_difference 80: note = a, c, g, u, unknown, other, or absent
  misc_difference 81: note = a, c, g, u, unknown, other, or absent
  misc_difference 82: note = a, c, g, u, unknown, other, or absent
  misc_difference 83: note = a, c, g, u, unknown, other, or absent
  misc_difference 84: note = a, c, g, u, unknown, other, or absent
  misc_difference 85: note = a, c, g, u, unknown, other, or absent
  misc_difference 86: note = a, c, g, u, unknown, other, or absent
  misc_difference 87: note = a, c, g, u, unknown, other, or absent
  misc_difference 88: note = a, c, g, u, unknown, other, or absent
  misc_difference 89: note = a, c, g, u, unknown, other, or absent
  misc_difference 90: note = a, c, g, u, unknown, other, or absent
  misc_difference 91: note = a, c, g, u, unknown, other, or absent
  misc_difference 92: note = a, c, g, u, unknown, other, or absent
  misc_difference 93: note = a, c, g, u, unknown, other, or absent
  misc_difference 94: note = a, c, g, u, unknown, other, or absent
  misc_difference 95: note = a, c, g, u, unknown, other, or absent
  misc_difference 96: note = a, c, g, u, unknown, other, or absent
  misc_difference 97: note = a, c, g, u, unknown, other, or absent
  misc_difference 98: note = a, c, g, u, unknown, other, or absent
  misc_difference 99: note = a, c, g, u, unknown, other, or absent
  misc_difference 100: note = a, c, g, u, unknown, other, or absent
  misc_difference 101: note = a, c, g, u, unknown, other, or absent
  misc_difference 102: note = a, c, g, u, unknown, other, or absent
  misc_difference 103: note = a, c, g, u, unknown, other, or absent
  misc_difference 104: note = a, c, g, u, unknown, other, or absent
  misc_difference 105: note = a, c, g, u, unknown, other, or absent
  misc_difference 106: note = a, c, g, u, unknown, other, or absent
  misc_difference 107: note = a, c, g, u, unknown, other, or absent
  misc_difference 108: note = a, c, g, u, unknown, other, or absent
  misc_difference 109: note = a, c, g, u, unknown, other, or absent
  misc_difference 110: note = a, c, g, u, unknown, other, or absent
  misc_difference 111: note = a, c, g, u, unknown, other, or absent
  misc_difference 112: note = a, c, g, u, unknown, other, or absent
  misc_difference 113: note = a, c, g, u, unknown, other, or absent
  misc_difference 114: note = a, c, g, u, unknown, other, or absent
  misc_difference 115: note = a, c, g, u, unknown, other, or absent
  misc_difference 116: note = a, c, g, u, unknown, other, or absent
  misc_difference 117: note = a, c, g, u, unknown, other, or absent
  misc_difference 118: note = a, c, g, u, unknown, other, or absent
  misc_difference 119: note = a, c, g, u, unknown, other, or absent
  misc_difference 120: note = a, c, g, u, unknown, other, or absent
  misc_difference 121: note = a, c, g, u, unknown, other, or absent
  misc_difference 122: note = a, c, g, u, unknown, other, or absent
  misc_difference 123: note = a, c, g, u, unknown, other, or absent
  misc_difference 124: note = a, c, g, u, unknown, other, or absent
  misc_difference 125: note = a, c, g, u, unknown, other, or absent
  misc_difference 126: note = a, c, g, u, unknown, other, or absent
  misc_difference 127: note = a, c, g, u, unknown, other, or absent
  misc_difference 128: note = a, c, g, u, unknown, other, or absent
  misc_difference 129: note = a, c, g, u, unknown, other, or absent
  misc_difference 130: note = a, c, g, u, unknown, other, or absent
  misc_difference 131: note = a, c, g, u, unknown, other, or absent
  misc_difference 132: note = a, c, g, u, unknown, other, or absent
  misc_difference 133: note = a, c, g, u, unknown, other, or absent
  misc_difference 134: note = a, c, g, u, unknown, other, or absent
  misc_difference 135: note = a, c, g, u, unknown, other, or absent
  misc_difference 136: note = a, c, g, u, unknown, other, or absent
  misc_difference 137: note = a, c, g, u, unknown, other, or absent
  misc_difference 138: note = a, c, g, u, unknown, other, or absent
  misc_difference 139: note = a, c, g, u, unknown, other, or absent
  misc_difference 140: note = a, c, g, u, unknown, other, or absent
  misc_difference 141: note = a, c, g, u, unknown, other, or absent
  misc_difference 142: note = a, c, g, u, unknown, other, or absent
  misc_difference 143: note = a, c, g, u, unknown, other, or absent
  misc_difference 144: note = a, c, g, u, unknown, other, or absent
  misc_difference 145: note = a, c, g, u, unknown, other, or absent
  misc_difference 146: note = a, c, g, u, unknown, other, or absent
  misc_difference 147: note = a, c, g, u, unknown, other, or absent
  misc_difference 148: note = a, c, g, u, unknown, other, or absent
  misc_difference 149: note = a, c, g, u, unknown, other, or absent
  misc_difference 150: note = a, c, g, u, unknown, other, or absent
  misc_difference 151: note = a, c, g, u, unknown, other, or absent
  misc_difference 152: note = a, c, g, u, unknown, other, or absent
  misc_difference 153: note = a, c, g, u, unknown, other, or absent
  misc_difference 154: note = a, c, g, u, unknown, other, or absent
  misc_difference 155: note = a, c, g, u, unknown, other, or absent
  misc_difference 156: note = a, c, g, u, unknown, other, or absent
  misc_difference 157: note = a, c, g, u, unknown, other, or absent
  misc_difference 158: note = a, c, g, u, unknown, other, or absent
  misc_difference 159: note = a, c, g, u, unknown, other, or absent
  misc_difference 160: note = a, c, g, u, unknown, other, or absent
  misc_difference 161: note = a, c, g, u, unknown, other, or absent
  misc_difference 162: note = a, c, g, u, unknown, other, or absent
  misc_difference 163: note = a, c, g, u, unknown, other, or absent
  misc_difference 164: note = a, c, g, u, unknown, other, or absent
  misc_difference 165: note = a, c, g, u, unknown, other, or absent
  misc_difference 166: note = a, c, g, u, unknown, other, or absent
  misc_difference 167: note = a, c, g, u, unknown, other, or absent
  misc_difference 168: note = a, c, g, u, unknown, other, or absent
  misc_difference 169: note = a, c, g, u, unknown, other, or absent
  misc_difference 170: note = a, c, g, u, unknown, other, or absent
  misc_difference 171: note = a, c, g, u, unknown, other, or absent
  misc_difference 172: note = a, c, g, u, unknown, other, or absent
  misc_difference 173: note = a, c, g, u, unknown, other, or absent
  misc_difference 174: note = a, c, g, u, unknown, other, or absent
  misc_difference 175: note = a, c, g, u, unknown, other, or absent
  misc_difference 176: note = a, c, g, u, unknown, other, or absent
  misc_difference 177: note = a, c, g, u, unknown, other, or absent
  misc_difference 178: note = a, c, g, u, unknown, other, or absent
  misc_difference 179: note = a, c, g, u, unknown, other, or absent
  misc_difference 180: note = a, c, g, u, unknown, other, or absent
  misc_difference 181: note = a, c, g, u, unknown, other, or absent
  misc_difference 182: note = a, c, g, u, unknown, other, or absent
  misc_difference 183: note = a, c, g, u, unknown, other, or absent
  misc_difference 184: note = a, c, g, u, unknown, other, or absent
  misc_difference 185: note = a, c, g, u, unknown, other, or absent
  misc_difference 186: note = a, c, g, u, unknown, other, or absent
  misc_difference 187: note = a, c, g, u, unknown, other, or absent
  misc_difference 188: note = a, c, g, u, unknown, other, or absent
  misc_difference 189: note = a, c, g, u, unknown, other, or absent
  misc_difference 190: note = a, c, g, u, unknown, other, or absent
  misc_difference 191: note = a, c, g, u, unknown, other, or absent
  misc_difference 192: note = a, c, g, u, unknown, other, or absent
  misc_difference 193: note = a, c, g, u, unknown, other, or absent
  misc_difference 194: note = a, c, g, u, unknown, other, or absent
  misc_difference 195: note = a, c, g, u, unknown, other, or absent
  misc_difference 196: note = a, c, g, u, unknown, other, or absent
  misc_difference 197: note = a, c, g, u, unknown, other, or absent
  misc_difference 198: note = a, c, g, u, unknown, other, or absent
  misc_difference 199: note = a, c, g, u, unknown, other, or absent
  misc_difference 200: note = a, c, g, u, unknown, other, or absent
  misc_difference 201: note = a, c, g, u, unknown, other, or absent
  misc_difference 202: note = a, c, g, u, unknown, other, or absent
  misc_difference 203: note = a, c, g, u, unknown, other, or absent
  misc_difference 204: note = a, c, g, u, unknown, other, or absent
  misc_difference 205: note = a, c, g, u, unknown, other, or absent
  misc_difference 206: note = a, c, g, u, unknown, other, or absent
  misc_difference 207: note = a, c, g, u, unknown, other, or absent
  misc_difference 208: note = a, c, g, u, unknown, other, or absent
  misc_difference 209: note = a, c, g, u, unknown, other, or absent
  misc_difference 210: note = a, c, g, u, unknown, other, or absent
  misc_difference 211: note = a, c, g, u, unknown, other, or absent
  misc_difference 212: note = a, c, g, u, unknown, other, or absent
  misc_difference 213: note = a, c, g, u, unknown, other, or absent
  misc_difference 214: note = a, c, g, u, unknown, other, or absent
  misc_difference 215: note = a, c, g, u, unknown, other, or absent
  misc_difference 216: note = a, c, g, u, unknown, other, or absent
  misc_difference 217: note = a, c, g, u, unknown, other, or absent
  misc_difference 218: note = a, c, g, u, unknown, other, or absent
  misc_difference 219: note = a, c, g, u, unknown, other, or absent
  misc_difference 220: note = a, c, g, u, unknown, other, or absent
  misc_difference 221: note = a, c, g, u, unknown, other, or absent
  misc_difference 222: note = a, c, g, u, unknown, other, or absent
  misc_difference 223: note = a, c, g, u, unknown, other, or absent
  misc_difference 224: note = a, c, g, u, unknown, other, or absent
  misc_difference 225: note = a, c, g, u, unknown, other, or absent
  misc_difference 226: note = a, c, g, u, unknown, other, or absent
  misc_difference 227: note = a, c, g, u, unknown, other, or absent
  misc_difference 228: note = a, c, g, u, unknown, other, or absent
  misc_difference 229: note = a, c, g, u, unknown, other, or absent
  misc_difference 230: note = a, c, g, u, unknown, other, or absent
  misc_difference 231: note = a, c, g, u, unknown, other, or absent
  misc_difference 232: note = a, c, g, u, unknown, other, or absent
  misc_difference 233: note = a, c, g, u, unknown, other, or absent
  misc_difference 234: note = a, c, g, u, unknown, other, or absent
  misc_difference 235: note = a, c, g, u, unknown, other, or absent
  misc_difference 236: note = a, c, g, u, unknown, other, or absent
  misc_difference 237: note = a, c, g, u, unknown, other, or absent
  misc_difference 238: note = a, c, g, u, unknown, other, or absent
  misc_difference 239: note = a, c, g, u, unknown, other, or absent
  misc_difference 240: note = a, c, g, u, unknown, other, or absent
  misc_difference 241: note = a, c, g, u, unknown, other, or absent
  misc_difference 242: note = a, c, g, u, unknown, other, or absent
  misc_difference 243: note = a, c, g, u, unknown, other, or absent
  misc_difference 244: note = a, c, g, u, unknown, other, or absent
  misc_difference 245: note = a, c, g, u, unknown, other, or absent
  misc_difference 246: note = a, c, g, u, unknown, other, or absent
  misc_difference 247: note = a, c, g, u, unknown, other, or absent
  misc_difference 248: note = a, c, g, u, unknown, other, or absent
  misc_difference 249: note = a, c, g, u, unknown, other, or absent
  misc_difference 250: note = a, c, g, u, unknown, other, or absent
  misc_difference 251: note = a, c, g, u, unknown, other, or absent
  misc_difference 252: note = a, c, g, u, unknown, other, or absent
  misc_difference 253: note = a, c, g, u, unknown, other, or absent
  misc_difference 254: note = a, c, g, u, unknown, other, or absent
  misc_difference 255: note = a, c, g, u, unknown, other, or absent
  misc_difference 256: note = a, c, g, u, unknown, other, or absent
  misc_difference 257: note = a, c, g, u, unknown, other, or absent
  misc_difference 258: note = a, c, g, u, unknown, other, or absent
  misc_difference 259: note = a, c, g, u, unknown, other, or absent
  misc_difference 260: note = a, c, g, u, unknown, other, or absent
  misc_difference 261: note = a, c, g, u, unknown, other, or absent
  misc_difference 262: note = a, c, g, u, unknown, other, or absent
  misc_difference 263: note = a, c, g, u, unknown, other, or absent
  misc_difference 264: note = a, c, g, u, unknown, other, or absent
  misc_difference 265: note = a, c, g, u, unknown, other, or absent
  misc_difference 266: note = a, c, g, u, unknown, other, or absent
  misc_difference 267: note = a, c, g, u, unknown, other, or absent
  misc_difference 268: note = a, c, g, u, unknown, other, or absent
  misc_difference 269: note = a, c, g, u, unknown, other, or absent
  misc_difference 270: note = a, c, g, u, unknown, other, or absent
  misc_difference 271: note = a, c, g, u, unknown, other, or absent
  misc_difference 272: note = a, c, g, u, unknown, other, or absent
  misc_difference 273: note = a, c, g, u, unknown, other, or absent
  misc_difference 274: note = a, c, g, u, unknown, other, or absent
  misc_difference 275: note = a, c, g, u, unknown, other, or absent
  misc_difference 276: note = a, c, g, u, unknown, other, or absent
  misc_difference 277: note = a, c, g, u, unknown, other, or absent
  misc_difference 278: note = a, c, g, u, unknown, other, or absent
  misc_difference 279: note = a, c, g, u, unknown, other, or absent
  misc_difference 280: note = a, c, g, u, unknown, other, or absent
  misc_difference 281: note = a, c, g, u, unknown, other, or absent
  misc_difference 282: note = a, c, g, u, unknown, other, or absent
  misc_difference 283: note = a, c, g, u, unknown, other, or absent
  misc_difference 284: note = a, c, g, u, unknown, other, or absent
  misc_difference 285: note = a, c, g, u, unknown, other, or absent
  misc_difference 286: note = a, c, g, u, unknown, other, or absent
  misc_difference 287: note = a, c, g, u, unknown, other, or absent
  misc_difference 288: note = a, c, g, u, unknown, other, or absent
  misc_difference 289: note = a, c, g, u, unknown, other, or absent
  misc_difference 290: note = a, c, g, u, unknown, other, or absent
  misc_difference 291: note = a, c, g, u, unknown, other, or absent
  misc_difference 292: note = a, c, g, u, unknown, other, or absent
  misc_difference 293: note = a, c, g, u, unknown, other, or absent
  misc_difference 294: note = a, c, g, u, unknown, other, or absent
  misc_difference 295: note = a, c, g, u, unknown, other, or absent
  misc_difference 296: note = a, c, g, u, unknown, other, or absent
  misc_difference 297: note = a, c, g, u, unknown, other, or absent
  misc_difference 298: note = a, c, g, u, unknown, other, or absent
  misc_difference 299: note = a, c, g, u, unknown, other, or absent
  misc_difference 300: note = a, c, g, u, unknown, other, or absent
  misc_difference 301: note = a, c, g, u, unknown, other, or absent
  misc_difference 302: note = a, c, g, u, unknown, other, or absent
  misc_difference 303: note = a, c, g, u, unknown, other, or absent
  misc_difference 304: note = a, c, g, u, unknown, other, or absent
  misc_difference 305: note = a, c, g, u, unknown, other, or absent
  misc_difference 306: note = a, c, g, u, unknown, other, or absent
  misc_difference 307: note = a, c, g, u, unknown, other, or absent
  misc_difference 308: note = a, c, g, u, unknown, other, or absent
  misc_difference 309: note = a, c, g, u, unknown, other, or absent
  misc_difference 310: note = a, c, g, u, unknown, other, or absent
  misc_difference 311: note = a, c, g, u, unknown, other, or absent
  misc_difference 312: note = a, c, g, u, unknown, other, or absent
  misc_difference 313: note = a, c, g, u, unknown, other, or absent
  misc_difference 314: note = a, c, g, u, unknown, other, or absent
  misc_difference 315: note = a, c, g, u, unknown, other, or absent
  misc_difference 316: note = a, c, g, u, unknown, other, or absent
  misc_difference 317: note = a, c, g, u, unknown, other, or absent
  misc_difference 318: note = a, c, g, u, unknown, other, or absent
  misc_difference 319: note = a, c, g, u, unknown, other, or absent
  misc_difference 320: note = May be absent
  misc_difference 321: note = May be absent
  misc_difference 322: note = May be absent
  misc_difference 323: note = May be absent
  misc_difference 324: note = May be absent
  misc_difference 325: note = May be absent
  misc_difference 326: note = May be absent
  misc_difference 327: note = May be absent
  misc_difference 328: note = a, c, g, u, unknown, other, or absent
  misc_difference 329: note = May be absent
  misc_difference 330: note = May be absent
  misc_difference 331: note = May be absent
  misc_difference 332: note = May be absent
  misc_difference 333: note = a, c, g, u, unknown, other, or absent
  misc_difference 334: note = a, c, g, u, unknown, other, or absent
  misc_difference 335: note = a, c, g, u, unknown, other, or absent
  misc_difference 336: note = a, c, g, u, unknown, other, or absent
  misc_difference 337: note = a, c, g, u, unknown, other, or absent
  misc_difference 338: note = a, c, g, u, unknown, other, or absent
  misc_difference 339: note = May be absent
  misc_difference 340: note = May be absent
  misc_difference 341: note = May be absent
  misc_difference 342: note = May be absent
  misc_difference 41..312: note = This region may encompass 1-271 nucleotides
rbvnnnntvrynyrrnytbdnntadnrynnnnnnyybccvnnnnnnnnnnnnnnnnnnnnnnnnnnnnnnnnnnnnnnnnnnnnnnnnnnnnnnnnnnnnnnnnnnnnnnnnnnnnnnnnnnnnnnnnnnnnnnnnnnnnnnnnnnnnnnnnnnnnnnnnnnnnnnnnnnnnnnnnnnnnnnnnnnnnnnnnnnnnnnnnnnnnnnnnnnnnnnnnnnnnnnnnnnnnnnnnnnnnnnnnnnnnnnnnnnnnnnnnnnnnnnnnnnnnnnnnnnnnnnnnnnnnnnnnnnnnnnnnnnnnnnnnnnnnnnnnnnnnnnnvvstbbrwnhcbbnnnnnnbbyw

SEQ ID NO: 584 - RNA, 340 nt, synthetic construct
  source 1..340: mol_type = other RNA
  misc_difference 1: note = May be absent
  misc_difference 2: note = May be absent
  misc_difference 3: note = May be absent
  misc_difference 4: note = May be absent
  misc_difference 5: note = a, c, g, u, unknown, other, or absent
  misc_difference 6: note = May be absent
  misc_difference 7: note = May be absent
  misc_difference 8: note = May be absent
  misc_difference 9: note = May be absent
  misc_difference 10: note = May be absent
  misc_difference 11: note = May be absent
  misc_difference 12: note = May be absent
  misc_difference 13: note = May be absent
  misc_difference 14: note = May be absent
  misc_difference 15: note = May be absent
  misc_difference 16: note = May be absent
  misc_difference 17: note = May be absent
  misc_difference 18: note = May be absent
  misc_difference 19: note = May be absent
  misc_difference 20: note = May be absent
  misc_difference 21: note = May be absent
  misc_difference 22: note = May be absent
  misc_difference 23: note = May be absent
  misc_difference 24: note = May be absent
  misc_difference 25: note = May be absent
  misc_difference 26: note = May be absent
  misc_difference 27: note = May be absent
  misc_difference 28: note = a, c, g, u, unknown, other, or absent
  misc_difference 29: note = May be absent
  misc_difference 30: note = May be absent
  misc_difference 31: note = May be absent
  misc_difference 32: note = May be absent
  misc_difference 33: note = May be absent
  misc_difference 34: note = May be absent
  misc_difference 35: note = May be absent
  misc_difference 36: note = May be absent
  misc_difference 37: note = May be absent
  misc_difference 38: note = May be absent
  misc_difference 39: note = a, c, g, u, unknown, other, or absent
  misc_difference 40: note = a, c, g, u, unknown, other, or absent
  misc_difference 41: note = May be absent
  misc_difference 42: note = a, c, g, u, unknown, other, or absent
  misc_difference 43: note = May be absent
  misc_difference 44: note = May be absent
  misc_difference 45: note = a, c, g, u, unknown, other, or absent
  misc_difference 46: note = a, c, g, u, unknown, other, or absent
  misc_difference 47: note = a, c, g, u, unknown, other, or absent
  misc_difference 48: note = a, c, g, u, unknown, other, or absent
  misc_difference 49: note = a, c, g, u, unknown, other, or absent
  misc_difference 50: note = a, c, g, u, unknown, other, or absent
  misc_difference 51: note = a, c, g, u, unknown, other, or absent
  misc_difference 52: note = a, c, g, u, unknown, other, or absent
  misc_difference 53: note = a, c, g, u, unknown, other, or absent
  misc_difference 54: note = a, c, g, u, unknown, other, or absent
  misc_difference 55: note = a, c, g, u, unknown, other, or absent
  misc_difference 56: note = a, c, g, u, unknown, other, or absent
  misc_difference 57: note = a, c, g, u, unknown, other, or absent
  misc_difference 58: note = a, c, g, u, unknown, other, or absent
  misc_difference 59: note = a, c, g, u, unknown, other, or absent
  misc_difference 60: note = a, c, g, u, unknown, other, or absent
  misc_difference 61: note = a, c, g, u, unknown, other, or absent
  misc_difference 62: note = a, c, g, u, unknown, other, or absent
  misc_difference 63: note = a, c, g, u, unknown, other, or absent
  misc_difference 64: note = a, c, g, u, unknown, other, or absent
  misc_difference 65: note = a, c, g, u, unknown, other, or absent
  misc_difference 66: note = a, c, g, u, unknown, other, or absent
  misc_difference 67: note = a, c, g, u, unknown, other, or absent
  misc_difference 68: note = a, c, g, u, unknown, other, or absent
  misc_difference 69: note = a, c, g, u, unknown, other, or absent
  misc_difference 70: note = a, c, g, u, unknown, other, or absent
  misc_difference 71: note = a, c, g, u, unknown, other, or absent
  misc_difference 72: note = a, c, g, u, unknown, other, or absent
  misc_difference 73: note = a, c, g, u, unknown, other, or absent
  misc_difference 74: note = a, c, g, u, unknown, other, or absent
  misc_difference 75: note = a, c, g, u, unknown, other, or absent
  misc_difference 76: note = a, c, g, u, unknown, other, or absent
  misc_difference 77: note = a, c, g, u, unknown, other, or absent
  misc_difference 78: note = a, c, g, u, unknown, other, or absent
  misc_difference 79: note = a, c, g, u, unknown, other, or absent
  misc_difference 80: note = a, c, g, u, unknown, other, or absent
  misc_difference 81: note = a, c, g, u, unknown, other, or absent
  misc_difference 82: note = a, c, g, u, unknown, other, or absent
  misc_difference 83: note = a, c, g, u, unknown, other, or absent
  misc_difference 84: note = a, c, g, u, unknown, other, or absent
  misc_difference 85: note = a, c, g, u, unknown, other, or absent
  misc_difference 86: note = a, c, g, u, unknown, other, or absent
  misc_difference 87: note = a, c, g, u, unknown, other, or absent
  misc_difference 88: note = a, c, g, u, unknown, other, or absent
  misc_difference 89: note = a, c, g, u, unknown, other, or absent
  misc_difference 90: note = a, c, g, u, unknown, other, or absent
  misc_difference 91: note = a, c, g, u, unknown, other, or absent
  misc_difference 92: note = a, c, g, u, unknown, other, or absent
  misc_difference 93: note = a, c, g, u, unknown, other, or absent
  misc_difference 94: note = a, c, g, u, unknown, other, or absent
  misc_difference 95: note = a, c, g, u, unknown, other, or absent
  misc_difference 96: note = a, c, g, u, unknown, other, or absent
  misc_difference 97: note = a, c, g, u, unknown, other, or absent
  misc_difference 98: note = a, c, g, u, unknown, other, or absent
  misc_difference 99: note = a, c, g, u, unknown, other, or absent
  misc_difference 100: note = a, c, g, u, unknown, other, or absent
  misc_difference 101: note = a, c, g, u, unknown, other, or absent
  misc_difference 102: note = a, c, g, u, unknown, other, or absent
  misc_difference 103: note = a, c, g, u, unknown, other, or absent
  misc_difference 104: note = a, c, g, u, unknown, other, or absent
  misc_difference 105: note = a, c, g, u, unknown, other, or absent
  misc_difference 106: note = a, c, g, u, unknown, other, or absent
  misc_difference 107: note = a, c, g, u, unknown, other, or absent
  misc_difference 108: note = a, c, g, u, unknown, other, or absent
  misc_difference 109: note = a, c, g, u, unknown, other, or absent
  misc_difference 110: note = a, c, g, u, unknown, other, or absent
  misc_difference 111: note = a, c, g, u, unknown, other, or absent
  misc_difference 112: note = a, c, g, u, unknown, other, or absent
  misc_difference 113: note = a, c, g, u, unknown, other, or absent
  misc_difference 114: note = a, c, g, u, unknown, other, or absent
  misc_difference 115: note = a, c, g, u, unknown, other, or absent
  misc_difference 116: note = a, c, g, u, unknown, other, or absent
  misc_difference 117: note = a, c, g, u, unknown, other, or absent
  misc_difference 118: note = a, c, g, u, unknown, other, or absent
  misc_difference 119: note = a, c, g, u, unknown, other, or absent
  misc_difference 120: note = a, c, g, u, unknown, other, or absent
  misc_difference 121: note = a, c, g, u, unknown, other, or absent
  misc_difference 122: note = a, c, g, u, unknown, other, or absent
  misc_difference 123: note = a, c, g, u, unknown, other, or absent
  misc_difference 124: note = a, c, g, u, unknown, other, or absent
  misc_difference 125: note = a, c, g, u, unknown, other, or absent
  misc_difference 126: note = a, c, g, u, unknown, other, or absent
  misc_difference 127: note = a, c, g, u, unknown, other, or absent
  misc_difference 128: note = a, c, g, u, unknown, other, or absent
  misc_difference 129: note = a, c, g, u, unknown, other, or absent
  misc_difference 130: note = a, c, g, u, unknown, other, or absent
  misc_difference 131: note = a, c, g, u, unknown, other, or absent
  misc_difference 132: note = a, c, g, u, unknown, other, or absent
  misc_difference 133: note = a, c, g, u, unknown, other, or absent
  misc_difference 134: note = a, c, g, u, unknown, other, or absent
  misc_difference 135: note = a, c, g, u, unknown, other, or absent
  misc_difference 136: note = a, c, g, u, unknown, other, or absent
  misc_difference 137: note = a, c, g, u, unknown, other, or absent
  misc_difference 138: note = a, c, g, u, unknown, other, or absent
  misc_difference 139: note = a, c, g, u, unknown, other, or absent
  misc_difference 140: note = a, c, g, u, unknown, other, or absent
  misc_difference 141: note = a, c, g, u, unknown, other, or absent
  misc_difference 142: note = a, c, g, u, unknown, other, or absent
  misc_difference 143: note = a, c, g, u, unknown, other, or absent
  misc_difference 144: note = a, c, g, u, unknown, other, or absent
  misc_difference 145: note = a, c, g, u, unknown, other, or absent
  misc_difference 146: note = a, c, g, u, unknown, other, or absent
  misc_difference 147: note = a, c, g, u, unknown, other, or absent
  misc_difference 148: note = a, c, g, u, unknown, other, or absent
  misc_difference 149: note = a, c, g, u, unknown, other, or absent
  misc_difference 150: note = a, c, g, u, unknown, other, or absent
  misc_difference 151: note = a, c, g, u, unknown, other, or absent
  misc_difference 152: note = a, c, g, u, unknown, other, or absent
  misc_difference 153: note = a, c, g, u, unknown, other, or absent
  misc_difference 154: note = a, c, g, u, unknown, other, or absent
  misc_difference 155: note = a, c, g, u, unknown, other, or absent
  misc_difference 156: note = a, c, g, u, unknown, other, or absent
  misc_difference 157: note = a, c, g, u, unknown, other, or absent
  misc_difference 158: note = a, c, g, u, unknown, other, or absent
  misc_difference 159: note = a, c, g, u, unknown, other, or absent
  misc_difference 160: note = a, c, g, u, unknown, other, or absent
  misc_difference 161: note = a, c, g, u, unknown, other, or absent
  misc_difference 162: note = a, c, g, u, unknown, other, or absent
  misc_difference 163: note = a, c, g, u, unknown, other, or absent
  misc_difference 164: note = a, c, g, u, unknown, other, or absent
  misc_difference 165: note = a, c, g, u, unknown, other, or absent
  misc_difference 166: note = a, c, g, u, unknown, other, or absent
  misc_difference 167: note = a, c, g, u, unknown, other, or absent
  misc_difference 168: note = a, c, g, u, unknown, other, or absent
  misc_difference 169: note = a, c, g, u, unknown, other, or absent
  misc_difference 170: note = a, c, g, u, unknown, other, or absent
  misc_difference 171: note = a, c, g, u, unknown, other, or absent
  misc_difference 172: note = a, c, g, u, unknown, other, or absent
  misc_difference 173: note = a, c, g, u, unknown, other, or absent
  misc_difference 174: note = a, c, g, u, unknown, other, or absent
  misc_difference 175: note = a, c, g, u, unknown, other, or absent
  misc_difference 176: note = a, c, g, u, unknown, other, or absent
  misc_difference 177: note = a, c, g, u, unknown, other, or absent
  misc_difference 178: note = a, c, g, u, unknown, other, or absent
  misc_difference 179: note = a, c, g, u, unknown, other, or absent
  misc_difference 180: note = a, c, g, u, unknown, other, or absent
  misc_difference 181: note = a, c, g, u, unknown, other, or absent
  misc_difference 182: note = a, c, g, u, unknown, other, or absent
  misc_difference 183: note = a, c, g, u, unknown, other, or absent
  misc_difference 184: note = a, c, g, u, unknown, other, or absent
  misc_difference 185: note = a, c, g, u, unknown, other, or absent
  misc_difference 186: note = a, c, g, u, unknown, other, or absent
  misc_difference 187: note = a, c, g, u, unknown, other, or absent
  misc_difference 188: note = a, c, g, u, unknown, other, or absent
  misc_difference 189: note = a, c, g, u, unknown, other, or absent
  misc_difference 190: note = a, c, g, u, unknown, other, or absent
  misc_difference 191: note = a, c, g, u, unknown, other, or absent
  misc_difference 192: note = a, c, g, u, unknown, other, or absent
  misc_difference 193: note = a, c, g, u, unknown, other, or absent
  misc_difference 194: note = a, c, g, u, unknown, other, or absent
  misc_difference 195: note = a, c, g, u, unknown, other, or absent
  misc_difference 196: note = a, c, g, u, unknown, other, or absent
  misc_difference 197: note = a, c, g, u, unknown, other, or absent
  misc_difference 198: note = a, c, g, u, unknown, other, or absent
  misc_difference 199: note = a, c, g, u, unknown, other, or absent
  misc_difference 200: note = a, c, g, u, unknown, other, or absent
  misc_difference 201: note = a, c, g, u, unknown, other, or absent
  misc_difference 202: note = a, c, g, u, unknown, other, or absent
  misc_difference 203: note = a, c, g, u, unknown, other, or absent
  misc_difference 204: note = a, c, g, u, unknown, other, or absent
  misc_difference 205: note = a, c, g, u, unknown, other, or absent
  misc_difference 206: note = a, c, g, u, unknown, other, or absent
  misc_difference 207: note = a, c, g, u, unknown, other, or absent
  misc_difference 208: note = a, c, g, u, unknown, other, or absent
  misc_difference 209: note = a, c, g, u, unknown, other, or absent
  misc_difference 210: note = a, c, g, u, unknown, other, or absent
  misc_difference 211: note = a, c, g, u, unknown, other, or absent
  misc_difference 212: note = a, c, g, u, unknown, other, or absent
  misc_difference 213: note = a, c, g, u, unknown, other, or absent
  misc_difference 214: note = a, c, g, u, unknown, other, or absent
  misc_difference 215: note = a, c, g, u, unknown, other, or absent
  misc_difference 216: note = a, c, g, u, unknown, other, or absent
  misc_difference 217: note = a, c, g, u, unknown, other, or absent
  misc_difference 218: note = a, c, g, u, unknown, other, or absent
  misc_difference 219: note = a, c, g, u, unknown, other, or absent
  misc_difference 220: note = a, c, g, u, unknown, other, or absent
  misc_difference 221: note = a, c, g, u, unknown, other, or absent
  misc_difference 222: note = a, c, g, u, unknown, other, or absent
  misc_difference 223: note = a, c, g, u, unknown, other, or absent
  misc_difference 224: note = a, c, g, u, unknown, other, or absent
  misc_difference 225: note = a, c, g, u, unknown, other, or absent
  misc_difference 226: note = a, c, g, u, unknown, other, or absent
  misc_difference 227: note = a, c, g, u, unknown, other, or absent
  misc_difference 228: note = a, c, g, u, unknown, other, or absent
  misc_difference 229: note = a, c, g, u, unknown, other, or absent
  misc_difference 230: note = a, c, g, u, unknown, other, or absent
  misc_difference 231: note = a, c, g, u, unknown, other, or absent
  misc_difference 232: note = a, c, g, u, unknown, other, or absent
  misc_difference 233: note = a, c, g, u, unknown, other, or absent
  misc_difference 234: note = a, c, g, u, unknown, other, or absent
  misc_difference 235: note = a, c, g, u, unknown, other, or absent
  misc_difference 236: note = a, c, g, u, unknown, other, or absent
  misc_difference 237: note = a, c, g, u, unknown, other, or absent
  misc_difference 238: note = a, c, g, u, unknown, other, or absent
  misc_difference 239: note = a, c, g, u, unknown, other, or absent
  misc_difference 240: note = a, c, g, u, unknown, other, or absent
  misc_difference 241: note = a, c, g, u, unknown, other, or absent
  misc_difference 242: note = a, c, g, u, unknown, other, or absent
  misc_difference 243: note = a, c, g, u, unknown, other, or absent
  misc_difference 244: note = a, c, g, u, unknown, other, or absent
  misc_difference 245: note = a, c, g, u, unknown, other, or absent
  misc_difference 246: note = a, c, g, u, unknown, other, or absent
  misc_difference 247: note = a, c, g, u, unknown, other, or absent
  misc_difference 248: note = a, c, g, u, unknown, other, or absent
  misc_difference 249: note = a, c, g, u, unknown, other, or absent
  misc_difference 250: note = a, c, g, u, unknown, other, or absent
  misc_difference 251: note = a, c, g, u, unknown, other, or absent
  misc_difference 252: note = a, c, g, u, unknown, other, or absent
  misc_difference 253: note = a, c, g, u, unknown, other, or absent
  misc_difference 254: note = a, c, g, u, unknown, other, or absent
  misc_difference 255: note = a, c, g, u, unknown, other, or absent
  misc_difference 256: note = a, c, g, u, unknown, other, or absent
  misc_difference 257: note = a, c, g, u, unknown, other, or absent
  misc_difference 258: note = a, c, g, u, unknown, other, or absent
  misc_difference 259: note = a, c, g, u, unknown, other, or absent
  misc_difference 260: note = a, c, g, u, unknown, other, or absent
  misc_difference 261: note = a, c, g, u, unknown, other, or absent
  misc_difference 262: note = a, c, g, u, unknown, other, or absent
  misc_difference 263: note = a, c, g, u, unknown, other, or absent
  misc_difference 264: note = a, c, g, u, unknown, other, or absent
  misc_difference 265: note = a, c, g, u, unknown, other, or absent
  misc_difference 266: note = a, c, g, u, unknown, other, or absent
  misc_difference 267: note = a, c, g, u, unknown, other, or absent
  misc_difference 268: note = a, c, g, u, unknown, other, or absent
  misc_difference 269: note = a, c, g, u, unknown, other, or absent
  misc_difference 270: note = a, c, g, u, unknown, other, or absent
  misc_difference 271: note = a, c, g, u, unknown, other, or absent
  misc_difference 272: note = a, c, g, u, unknown, other, or absent
  misc_difference 273: note = a, c, g, u, unknown, other, or absent
  misc_difference 274: note = a, c, g, u, unknown, other, or absent
  misc_difference 275: note = a, c, g, u, unknown, other, or absent
  misc_difference 276: note = a, c, g, u, unknown, other, or absent
  misc_difference 277: note = a, c, g, u, unknown, other, or absent
  misc_difference 278: note = a, c, g, u, unknown, other, or absent
  misc_difference 279: note = a, c, g, u, unknown, other, or absent
  misc_difference 280: note = a, c, g, u, unknown, other, or absent
  misc_difference 281: note = a, c, g, u, unknown, other, or absent
  misc_difference 282: note = a, c, g, u, unknown, other, or absent
  misc_difference 283: note = a, c, g, u, unknown, other, or absent
  misc_difference 284: note = a, c, g, u, unknown, other, or absent
  misc_difference 285: note = a, c, g, u, unknown, other, or absent
  misc_difference 286: note = a, c, g, u, unknown, other, or absent
  misc_difference 287: note = a, c, g, u, unknown, other, or absent
  misc_difference 288: note = a, c, g, u, unknown, other, or absent
  misc_difference 289: note = a, c, g, u, unknown, other, or absent
  misc_difference 290: note = a, c, g, u, unknown, other, or absent
  misc_difference 291: note = a, c, g, u, unknown, other, or absent
  misc_difference 292: note = a, c, g, u, unknown, other, or absent
  misc_difference 293: note = a, c, g, u, unknown, other, or absent
  misc_difference 294: note = a, c, g, u, unknown, other, or absent
  misc_difference 295: note = a, c, g, u, unknown, other, or absent
  misc_difference 296: note = a, c, g, u, unknown, other, or absent
  misc_difference 297: note = a, c, g, u, unknown, other, or absent
  misc_difference 298: note = a, c, g, u, unknown, other, or absent
  misc_difference 299: note = a, c, g, u, unknown, other, or absent
  misc_difference 300: note = a, c, g, u, unknown, other, or absent
  misc_difference 301: note = a, c, g, u, unknown, other, or absent
  misc_difference 302: note = a, c, g, u, unknown, other, or absent
  misc_difference 303: note = a, c, g, u, unknown, other, or absent
  misc_difference 304: note = a, c, g, u, unknown, other, or absent
  misc_difference 305: note = a, c, g, u, unknown, other, or absent
  misc_difference 306: note = a, c, g, u, unknown, other, or absent
  misc_difference 307: note = a, c, g, u, unknown, other, or absent
  misc_difference 308: note = a, c, g, u, unknown, other, or absent
  misc_difference 309: note = a, c, g, u, unknown, other, or absent
  misc_difference 310: note = a, c, g, u, unknown, other, or absent
  misc_difference 311: note = a, c, g, u, unknown, other, or absent
  misc_difference 312: note = a, c, g, u, unknown, other, or absent
  misc_difference 313: note = a, c, g, u, unknown, other, or absent
  misc_difference 314: note = a, c, g, u, unknown, other, or absent
  misc_difference 315: note = a, c, g, u, unknown, other, or absent
  misc_difference 316: note = May be absent
  misc_difference 317: note = a, c, g, u, unknown, other, or absent
  misc_difference 318: note = May be absent
  misc_difference 319: note = May be absent
  misc_difference 320: note = May be absent
  misc_difference 321: note = May be absent
  misc_difference 322: note = May be absent
  misc_difference 323: note = May be absent
  misc_difference 324: note = May be absent
  misc_difference 325: note = May be absent
  misc_difference 326: note = May be absent
  misc_difference 327: note = May be absent
  misc_difference 328: note = May be absent
  misc_difference 329: note = May be absent
  misc_difference 330: note = May be absent
  misc_difference 331: note = May be absent
  misc_difference 332: note = May be absent
  misc_difference 333: note = May be absent
  misc_difference 334: note = May be absent
  misc_difference 335: note = a, c, g, u, unknown, other, or absent
  misc_difference 336: note = May be absent
  misc_difference 337: note = May be absent
  misc_difference 338: note = May be absent
  misc_difference 339: note = May be absent
  misc_difference 340: note = May be absent
  misc_difference 45..316: note = This region may encompass 1-271 nucleotides
gbvbnsvtrrtdyrrdcggkdadmatdnhhrhytbccannynkdnnnnnnnnnnnnnnnnnnnnnnnnnnnnnnnnnnnnnnnnnnnnnnnnnnnnnnnnnnnnnnnnnnnnnnnnnnnnnnnnnnnnnnnnnnnnnnnnnnnnnnnnnnnnnnnnnnnnnnnnnnnnnnnnnnnnnnnnnnnnnnnnnnnnnnnnnnnnnnnnnnnnnnnnnnnnnnnnnnnnnnnnnnnnnnnnnnnnnnnnnnnnnnnnnnnnnnnnnnnnnnnnnnnnnnnnnnnnnnnnnnnnnnnnnnnnnnnnnnnnnnnnnnnnnnnbnrgsttbrwttccyksbsnvygca

SEQ ID NO: 585 - RNA, 340 nt, synthetic construct
  source 1..340: mol_type = other RNA
  misc_difference 1: note = May be absent
  misc_difference 2: note = May be absent
  misc_difference 3: note = May be absent
  misc_difference 4: note = May be absent
  misc_difference 5: note = a, c, g, u, unknown, other, or absent
  misc_difference 6: note = May be absent
  misc_difference 7: note = May be absent
  misc_difference 8: note = May be absent
  misc_difference 9: note = May be absent
  misc_difference 10: note = May be absent
  misc_difference 11: note = May be absent
  misc_difference 12: note = May be absent
  misc_difference 13: note = May be absent
  misc_difference 14: note = May be absent
  misc_difference 15: note = May be absent
  misc_difference 16: note = May be absent
  misc_difference 17: note = May be absent
  misc_difference 18: note = May be absent
  misc_difference 19: note = May be absent
  misc_difference 20: note = May be absent
  misc_difference 21: note = May be absent
  misc_difference 22: note = May be absent
  misc_difference 23: note = May be absent
  misc_difference 24: note = May be absent
  misc_difference 25: note = May be absent
  misc_difference 26: note = May be absent
  misc_difference 27: note = May be absent
  misc_difference 28: note = a, c, g, u, unknown, other, or absent
  misc_difference 29: note = May be absent
  misc_difference 30: note = May be absent
  misc_difference 31: note = May be absent
  misc_difference 32: note = May be absent
  misc_difference 33: note = May be absent
  misc_difference 34: note = May be absent
  misc_difference 35: note = May be absent
  misc_difference 36: note = May be absent
  misc_difference 37: note = May be absent
  misc_difference 38: note = May be absent
  misc_difference 39: note = a, c, g, u, unknown, other, or absent
  misc_difference 40: note = May be absent
  misc_difference 41: note = May be absent
  misc_difference 42: note = a, c, g, u, unknown, other, or absent
  misc_difference 43: note = May be absent
  misc_difference 44: note = May be absent
  misc_difference 45: note = a, c, g, u, unknown, other, or absent
  misc_difference 46: note = a, c, g, u, unknown, other, or absent
  misc_difference 47: note = a, c, g, u, unknown, other, or absent
  misc_difference 48: note = a, c, g, u, unknown, other, or absent
  misc_difference 49: note = a, c, g, u, unknown, other, or absent
  misc_difference 50: note = a, c, g, u, unknown, other, or absent
  misc_difference 51: note = a, c, g, u, unknown, other, or absent
  misc_difference 52: note = a, c, g, u, unknown, other, or absent
  misc_difference 53: note = a, c, g, u, unknown, other, or absent
  misc_difference 54: note = a, c, g, u, unknown, other, or absent
  misc_difference 55: note = a, c, g, u, unknown, other, or absent
  misc_difference 56: note = a, c, g, u, unknown, other, or absent
  misc_difference 57: note = a, c, g, u, unknown, other, or absent
  misc_difference 58: note = a, c, g, u, unknown, other, or absent
  misc_difference 59: note = a, c, g, u, unknown, other, or absent
  misc_difference 60: note = a, c, g, u, unknown, other, or absent
  misc_difference 61: note = a, c, g, u, unknown, other, or absent
  misc_difference 62: note = a, c, g, u, unknown, other, or absent
  misc_difference 63: note = a, c, g, u, unknown, other, or absent
  misc_difference 64: note = a, c, g, u, unknown, other, or absent
  misc_difference 65: note = a, c, g, u, unknown, other, or absent
  misc_difference 66: note = a, c, g, u, unknown, other, or absent
  misc_difference 67: note = a, c, g, u, unknown, other, or absent
  misc_difference 68: note = a, c, g, u, unknown, other, or absent
  misc_difference 69: note = a, c, g, u, unknown, other, or absent
  misc_difference 70: note = a, c, g, u, unknown, other, or absent
  misc_difference 71: note = a, c, g, u, unknown, other, or absent
  misc_difference 72: note = a, c, g, u, unknown, other, or absent
  misc_difference 73: note = a, c, g, u, unknown, other, or absent
  misc_difference 74: note = a, c, g, u, unknown, other, or absent
  misc_difference 75: note = a, c, g, u, unknown, other, or absent
  misc_difference 76: note = a, c, g, u, unknown, other, or absent
  misc_difference 77: note = a, c, g, u, unknown, other, or absent
  misc_difference 78: note = a, c, g, u, unknown, other, or absent
  misc_difference 79: note = a, c, g, u, unknown, other, or absent
  misc_difference 80: note = a, c, g, u, unknown, other, or absent
  misc_difference 81: note = a, c, g, u, unknown, other, or absent
  misc_difference 82: note = a, c, g, u, unknown, other, or absent
  misc_difference 83: note = a, c, g, u, unknown, other, or absent
  misc_difference 84: note = a, c, g, u, unknown, other, or absent
  misc_difference 85: note = a, c, g, u, unknown, other, or absent
  misc_difference 86: note = a, c, g, u, unknown, other, or absent
  misc_difference 87: note = a, c, g, u, unknown, other, or absent
  misc_difference 88: note = a, c, g, u, unknown, other, or absent
  misc_difference 89: note = a, c, g, u, unknown, other, or absent
  misc_difference 90: note = a, c, g, u, unknown, other, or absent
  misc_difference 91: note = a, c, g, u, unknown, other, or absent
  misc_difference 92: note = a, c, g, u, unknown, other, or absent
  misc_difference 93: note = a, c, g, u, unknown, other, or absent
  misc_difference 94: note = a, c, g, u, unknown, other, or absent
  misc_difference 95: note = a, c, g, u, unknown, other, or absent
  misc_difference 96: note = a, c, g, u, unknown, other, or absent
  misc_difference 97: note = a, c, g, u, unknown, other, or absent
  misc_difference 98: note = a, c, g, u, unknown, other, or absent
  misc_difference 99: note = a, c, g, u, unknown, other, or absent
  misc_difference 100: note = a, c, g, u, unknown, other, or absent
  misc_difference 101: note = a, c, g, u, unknown, other, or absent
  misc_difference 102: note = a, c, g, u, unknown, other, or absent
  misc_difference 103: note = a, c, g, u, unknown, other, or absent
  misc_difference 104: note = a, c, g, u, unknown, other, or absent
  misc_difference 105: note = a, c, g, u, unknown, other, or absent
  misc_difference 106: note = a, c, g, u, unknown, other, or absent
  misc_difference 107: note = a, c, g, u, unknown, other, or absent
  misc_difference 108: note = a, c, g, u, unknown, other, or absent
  misc_difference 109: note = a, c, g, u, unknown, other, or absent
  misc_difference 110: note = a, c, g, u, unknown, other, or absent
  misc_difference 111: note = a, c, g, u, unknown, other, or absent
  misc_difference 112: note = a, c, g, u, unknown, other, or absent
  misc_difference 113: note = a, c, g, u, unknown, other, or absent
  misc_difference 114: note = a, c, g, u, unknown, other, or absent
  misc_difference 115: note = a, c, g, u, unknown, other, or absent
  misc_difference 116: note = a, c, g, u, unknown, other, or absent
  misc_difference 117: note = a, c, g, u, unknown, other, or absent
  misc_difference 118: note = a, c, g, u, unknown, other, or absent
  misc_difference 119: note = a, c, g, u, unknown, other, or absent
  misc_difference 120: note = a, c, g, u, unknown, other, or absent
  misc_difference 121: note = a, c, g, u, unknown, other, or absent
  misc_difference 122: note = a, c, g, u, unknown, other, or absent
  misc_difference 123: note = a, c, g, u, unknown, other, or absent
  misc_difference 124: note = a, c, g, u, unknown, other, or absent
  misc_difference 125: note = a, c, g, u, unknown, other, or absent
  misc_difference 126: note = a, c, g, u, unknown, other, or absent
  misc_difference 127: note = a, c, g, u, unknown, other, or absent
  misc_difference 128: note = a, c, g, u, unknown, other, or absent
  misc_difference 129: note = a, c, g, u, unknown, other, or absent
  misc_difference 130: note = a, c, g, u, unknown, other, or absent
  misc_difference 131: note = a, c, g, u, unknown, other, or absent
  misc_difference 132: note = a, c, g, u, unknown, other, or absent
  misc_difference 133: note = a, c, g, u, unknown, other, or absent
  misc_difference 134: note = a, c, g, u, unknown, other, or absent
  misc_difference 135: note = a, c, g, u, unknown, other, or absent
  misc_difference 136: note = a, c, g, u, unknown, other, or absent
  misc_difference 137: note = a, c, g, u, unknown, other, or absent
  misc_difference 138: note = a, c, g, u, unknown, other, or absent
  misc_difference 139: note = a, c, g, u, unknown, other, or absent
  misc_difference 140: note = a, c, g, u, unknown, other, or absent
  misc_difference 141: note = a, c, g, u, unknown, other, or absent
  misc_difference 142: note = a, c, g, u, unknown, other, or absent
  misc_difference 143: note = a, c, g, u, unknown, other, or absent
  misc_difference 144: note = a, c, g, u, unknown, other, or absent
  misc_difference 145: note = a, c, g, u, unknown, other, or absent
  misc_difference 146: note = a, c, g, u, unknown, other, or absent
  misc_difference 147: note = a, c, g, u, unknown, other, or absent
  misc_difference 148: note = a, c, g, u, unknown, other, or absent
  misc_difference 149: note = a, c, g, u, unknown, other, or absent
  misc_difference 150: note = a, c, g, u, unknown, other, or absent
  misc_difference 151: note = a, c, g, u, unknown, other, or absent
  misc_difference 152: note = a, c, g, u, unknown, other, or absent
  misc_difference 153: note = a, c, g, u, unknown, other, or absent
  misc_difference 154: note = a, c, g, u, unknown, other, or absent
  misc_difference 155: note = a, c, g, u, unknown, other, or absent
  misc_difference 156: note = a, c, g, u, unknown, other, or absent
  misc_difference 157: note = a, c, g, u, unknown, other, or absent
  misc_difference 158: note = a, c, g, u, unknown, other, or absent
  misc_difference 159: note = a, c, g, u, unknown, other, or absent
  misc_difference 160: note = a, c, g, u, unknown, other, or absent
  misc_difference 161: note = a, c, g, u, unknown, other, or absent
  misc_difference 162: note = a, c, g, u, unknown, other, or absent
  misc_difference 163: note = a, c, g, u, unknown, other, or absent
  misc_difference 164: note = a, c, g, u, unknown, other, or absent
  misc_difference 165: note = a, c, g, u, unknown, other, or absent
  misc_difference 166: note = a, c, g, u, unknown, other, or absent
  misc_difference 167: note = a, c, g, u, unknown, other, or absent
  misc_difference 168: note = a, c, g, u, unknown, other, or absent
  misc_difference 169: note = a, c, g, u, unknown, other, or absent
  misc_difference 170: note = a, c, g, u, unknown, other, or absent
  misc_difference 171: note = a, c, g, u, unknown, other, or absent
  misc_difference 172: note = a, c, g, u, unknown, other, or absent
  misc_difference 173: note = a, c, g, u, unknown, other, or absent
  misc_difference 174: note = a, c, g, u, unknown, other, or absent
  misc_difference 175: note = a, c, g, u, unknown, other, or absent
  misc_difference 176: note = a, c, g, u, unknown, other, or absent
  misc_difference 177: note = a, c, g, u, unknown, other, or absent
  misc_difference 178: note = a, c, g, u, unknown, other, or absent
  misc_difference 179: note = a, c, g, u, unknown, other, or absent
  misc_difference 180: note = a, c, g, u, unknown, other, or absent
  misc_difference 181: note = a, c, g, u, unknown, other, or absent
  misc_difference 182: note = a, c, g, u, unknown, other, or absent
  misc_difference 183: note = a, c, g, u, unknown, other, or absent
  misc_difference 184: note = a, c, g, u, unknown, other, or absent
  misc_difference 185: note = a, c, g, u, unknown, other, or absent
  misc_difference 186: note = a, c, g, u, unknown, other, or absent
  misc_difference 187: note = a, c, g, u, unknown, other, or absent
  misc_difference 188: note = a, c, g, u, unknown, other, or absent
  misc_difference 189: note = a, c, g, u, unknown, other, or absent
  misc_difference 190: note = a, c, g, u, unknown, other, or absent
  misc_difference 191: note = a, c, g, u, unknown, other, or absent
  misc_difference 192: note = a, c, g, u, unknown, other, or absent
  misc_difference 193: note = a, c, g, u, unknown, other, or absent
  misc_difference 194: note = a, c, g, u, unknown, other, or absent
  misc_difference 195: note = a, c, g, u, unknown, other, or absent
  misc_difference 196: note = a, c, g, u, unknown, other, or absent
  misc_difference 197: note = a, c, g, u, unknown, other, or absent
  misc_difference 198: note = a, c, g, u, unknown, other, or absent
  misc_difference 199: note = a, c, g, u, unknown, other, or absent
  misc_difference 200: note = a, c, g, u, unknown, other, or absent
  misc_difference 201: note = a, c, g, u, unknown, other, or absent
  misc_difference 202: note = a, c, g, u, unknown, other, or absent
  misc_difference 203: note = a, c, g, u, unknown, other, or absent
  misc_difference 204: note = a, c, g, u, unknown, other, or absent
  misc_difference 205: note = a, c, g, u, unknown, other, or absent
  misc_difference 206: note = a, c, g, u, unknown, other, or absent
  misc_difference 207: note = a, c, g, u, unknown, other, or absent
  misc_difference 208: note = a, c, g, u, unknown, other, or absent
  misc_difference 209: note = a, c, g, u, unknown, other, or absent
  misc_difference 210: note = a, c, g, u, unknown, other, or absent
  misc_difference 211: note = a, c, g, u, unknown, other, or absent
  misc_difference 212: note = a, c, g, u, unknown, other, or absent
  misc_difference 213: note = a, c, g, u, unknown, other, or absent
  misc_difference 214: note = a, c, g, u, unknown, other, or absent
  misc_difference 215: note = a, c, g, u, unknown, other, or absent
  misc_difference 216: note = a, c, g, u, unknown, other, or absent
  misc_difference 217: note = a, c, g, u, unknown, other, or absent
  misc_difference 218: note = a, c, g, u, unknown, other, or absent
  misc_difference 219: note = a, c, g, u, unknown, other, or absent
  misc_difference 220: note = a, c, g, u, unknown, other, or absent
  misc_difference 221: note = a, c, g, u, unknown, other, or absent
  misc_difference 222: note = a, c, g, u, unknown, other, or absent
  misc_difference 223: note = a, c, g, u, unknown, other, or absent
  misc_difference 224: note = a, c, g, u, unknown, other, or absent
  misc_difference 225: note = a, c, g, u, unknown, other, or absent
  misc_difference 226: note = a, c, g, u, unknown, other, or absent
  misc_difference 227: note = a, c, g, u, unknown, other, or absent
  misc_difference 228: note = a, c, g, u, unknown, other, or absent
  misc_difference 229: note = a, c, g, u, unknown, other, or absent
  misc_difference 230: note = a, c, g, u, unknown, other, or absent
  misc_difference 231: note = a, c, g, u, unknown, other, or absent
  misc_difference 232: note = a, c, g, u, unknown, other, or absent
  misc_difference 233: note = a, c, g, u, unknown, other, or absent
  misc_difference 234: note = a, c, g, u, unknown, other, or absent
  misc_difference 235: note = a, c, g, u, unknown, other, or absent
  misc_difference 236: note = a, c, g, u, unknown, other, or absent
  misc_difference 237: note = a, c, g, u, unknown, other, or absent
  misc_difference 238: note = a, c, g, u, unknown, other, or absent
  misc_difference 239: note = a, c, g, u, unknown, other, or absent
  misc_difference 240: note = a, c, g, u, unknown, other, or absent
  misc_difference 241: note = a, c, g, u, unknown, other, or absent
  misc_difference 242: note = a, c, g, u, unknown, other, or absent
  misc_difference 243: note = a, c, g, u, unknown, other, or absent
  misc_difference 244: note = a, c, g, u, unknown, other, or absent
  misc_difference 245: note = a, c, g, u, unknown, other, or absent
  misc_difference 246: note = a, c, g, u, unknown, other, or absent
  misc_difference 247: note = a, c, g, u, unknown, other, or absent
  misc_difference 248: note = a, c, g, u, unknown, other, or absent
  misc_difference 249: note = a, c, g, u, unknown, other, or absent
  misc_difference 250: note = a, c, g, u, unknown, other, or absent
  misc_difference 251: note = a, c, g, u, unknown, other, or absent
  misc_difference 252: note = a, c, g, u, unknown, other, or absent
  misc_difference 253: note = a, c, g, u, unknown, other, or absent
  misc_difference 254: note = a, c, g, u, unknown, other, or absent
  misc_difference 255: note = a, c, g, u, unknown, other, or absent
  misc_difference 256: note = a, c, g, u, unknown, other, or absent
  misc_difference 257: note = a, c, g, u, unknown, other, or absent
  misc_difference 258: note = a, c, g, u, unknown, other, or absent
  misc_difference 259: note = a, c, g, u, unknown, other, or absent
  misc_difference 260: note = a, c, g, u, unknown, other, or absent
  misc_difference 261: note = a, c, g, u, unknown, other, or absent
  misc_difference 262: note = a, c, g, u, unknown, other, or absent
  misc_difference 263: note = a, c, g, u, unknown, other, or absent
  misc_difference 264: note = a, c, g, u, unknown, other, or absent
  misc_difference 265: note = a, c, g, u, unknown, other, or absent
  misc_difference 266: note = a, c, g, u, unknown, other, or absent
  misc_difference 267: note = a, c, g, u, unknown, other, or absent
  misc_difference 268: note = a, c, g, u, unknown, other, or absent
  misc_difference 269: note = a, c, g, u, unknown, other, or absent
  misc_difference 270: note = a, c, g, u, unknown, other, or absent
  misc_difference 271: note = a, c, g, u, unknown, other, or absent
  misc_difference 272: note = a, c, g, u, unknown, other, or absent
  misc_difference 273: note = a, c, g, u, unknown, other, or absent
  misc_difference 274: note = a, c, g, u, unknown, other, or absent
  misc_difference 275: note = a, c, g, u, unknown, other, or absent
  misc_difference 276: note = a, c, g, u, unknown, other, or absent
  misc_difference 277: note = a, c, g, u, unknown, other, or absent
  misc_difference 278: note = a, c, g, u, unknown, other, or absent
  misc_difference 279: note = a, c, g, u, unknown, other, or absent
  misc_difference 280: note = a, c, g, u, unknown, other, or absent
  misc_difference 281: note = a, c, g, u, unknown, other, or absent
  misc_difference 282: note = a, c, g, u, unknown, other, or absent
  misc_difference 283: note = a, c, g, u, unknown, other, or absent
  misc_difference 284: note = a, c, g, u, unknown, other, or absent
  misc_difference 285: note = a, c, g, u, unknown, other, or absent
  misc_difference 286: note = a, c, g, u, unknown, other, or absent
  misc_difference 287: note = a, c, g, u, unknown, other, or absent
  misc_difference 288: note = a, c, g, u, unknown, other, or absent
  misc_difference 289: note = a, c, g, u, unknown, other, or absent
  misc_difference 290: note = a, c, g, u, unknown, other, or absent
  misc_difference 291: note = a, c, g, u, unknown, other, or absent
  misc_difference 292: note = a, c, g, u, unknown, other, or absent
  misc_difference 293: note = a, c, g, u, unknown, other, or absent
  misc_difference 294: note = a, c, g, u, unknown, other, or absent
  misc_difference 295: note = a, c, g, u, unknown, other, or absent
  misc_difference 296: note = a, c, g, u, unknown, other, or absent
  misc_difference 297: note = a, c, g, u, unknown, other, or absent
  misc_difference 298: note = a, c, g, u, unknown, other, or absent
  misc_difference 299: note = a, c, g, u, unknown, other, or absent
  misc_difference 300: note = a, c, g, u, unknown, other, or absent
  misc_difference 301: note = a, c, g, u, unknown, other, or absent
  misc_difference 302: note = a, c, g, u, unknown, other, or absent
  misc_difference 303: note = a, c, g, u, unknown, other, or absent
  misc_difference 304: note = a, c, g, u, unknown, other, or absent
  misc_difference 305: note = a, c, g, u, unknown, other, or absent
  misc_difference 306: note = a, c, g, u, unknown, other, or absent
  misc_difference 307: note = a, c, g, u, unknown, other, or absent
  misc_difference 308: note = a, c, g, u, unknown, other, or absent
  misc_difference 309: note = a, c, g, u, unknown, other, or absent
  misc_difference 310: note = a, c, g, u, unknown, other, or absent
  misc_difference 311: note = a, c, g, u, unknown, other, or absent
  misc_difference 312: note = a, c, g, u, unknown, other, or absent
  misc_difference 313: note = a, c, g, u, unknown, other, or absent
  misc_difference 314: note = a, c, g, u, unknown, other, or absent
  misc_difference 315: note = a, c, g, u, unknown, other, or absent
  misc_difference 316: note = May be absent
  misc_difference 317: note = May be absent
  misc_difference 318: note = May be absent
  misc_difference 319: note = May be absent
  misc_difference 320: note = May be absent
  misc_difference 321: note = May be absent
  misc_difference 322: note = May be absent
  misc_difference 323: note = May be absent
  misc_difference 324: note = May be absent
  misc_difference 325: note = May be absent
  misc_difference 326: note = May be absent
  misc_difference 327: note = May be absent
  misc_difference 328: note = May be absent
  misc_difference 329: note = May be absent
  misc_difference 330: note = May be absent
  misc_difference 331: note = May be absent
  misc_difference 332: note = May be absent
  misc_difference 333: note = May be absent
  misc_difference 334: note = May be absent
  misc_difference 335: note = a, c, g, u, unknown, other, or absent
  misc_difference 336: note = May be absent
  misc_difference 337: note = May be absent
  misc_difference 338: note = May be absent
  misc_difference 339: note = May be absent
  misc_difference 340: note = May be absent
  misc_difference 45..316: note = This region may encompass 1-271 nucleotides
gyvynsvtrrtdyrrwcggkkadmatdnhhrhytbccandynkdnnnnnnnnnnnnnnnnnnnnnnnnnnnnnnnnnnnnnnnnnnnnnnnnnnnnnnnnnnnnnnnnnnnnnnnnnnnnnnnnnnnnnnnnnnnnnnnnnnnnnnnnnnnnnnnnnnnnnnnnnnnnnnnnnnnnnnnnnnnnnnnnnnnnnnnnnnnnnnnnnnnnnnnnnnnnnnnnnnnnnnnnnnnnnnnnnnnnnnnnnnnnnnnnnnnnnnnnnnnnnnnnnnnnnnnnnnnnnnnnnnnnnnnnnnnnnnnnnnnnnnnnnnnnnnnbvrgsttyrwttccyksbsnvygca

SEQ ID NO: 586 - RNA, 342 nt, synthetic construct
  source 1..342: mol_type = other RNA
  misc_difference 1: note = May be absent
  misc_difference 2: note = May be absent
  misc_difference 3: note = May be absent
  misc_difference 4: note = a, c, g, u, unknown, other, or absent
  misc_difference 5: note = a, c, g, u, unknown, other, or absent
  misc_difference 6: note = a, c, g, u, unknown, other, or absent
  misc_difference 7: note = a, c, g, u, unknown, other, or absent
  misc_difference 8: note = May be absent
  misc_difference 9: note = May be absent
  misc_difference 10: note = May be absent
  misc_difference 11: note = May be absent
  misc_difference 12: note = May be absent
  misc_difference 13: note = a, c, g, u, unknown, other, or absent
  misc_difference 14: note = May be absent
  misc_difference 15: note = May be absent
  misc_difference 16: note = May be absent
  misc_difference 17: note = May be absent
  misc_difference 18: note = May be absent
  misc_difference 19: note = May be absent
  misc_difference 20: note = May be absent
  misc_difference 21: note = May be absent
  misc_difference 22: note = May be absent
  misc_difference 23: note = May be absent
  misc_difference 24: note = May be absent
  misc_difference 25: note = a, c, g, u, unknown, other, or absent
  misc_difference 26: note = a, c, g, u, unknown, other, or absent
  misc_difference 27: note = May be absent
  misc_difference 28: note = May be absent
  misc_difference 29: note = a, c, g, u, unknown, other, or absent
  misc_difference 30: note = a, c, g, u, unknown, other, or absent
  misc_difference 31: note = a, c, g, u, unknown, other, or absent
  misc_difference 32: note = May be absent
  misc_difference 33: note = May be absent
  misc_difference 34: note = a, c, g, u, unknown, other, or absent
  misc_difference 35: note = May be absent
  misc_difference 36: note = May be absent
  misc_difference 37: note = May be absent
  misc_difference 38: note = May be absent
  misc_difference 39: note = May be absent
  misc_difference 40: note = May be absent
  misc_difference 41: note = May be absent
  misc_difference 42: note = a, c, g, u, unknown, other, or absent
  misc_difference 43: note = May be absent
  misc_difference 44: note = May be absent
  misc_difference 45: note = a, c, g, u, unknown, other, or absent
  misc_difference 46: note = a, c, g, u, unknown, other, or absent
  misc_difference 47: note = a, c, g, u, unknown, other, or absent
  misc_difference 48: note = a, c, g, u, unknown, other, or absent
  misc_difference 49: note = a, c, g, u, unknown, other, or absent
  misc_difference 50: note = a, c, g, u, unknown, other, or absent
  misc_difference 51: note = a, c, g, u, unknown, other, or absent
  misc_difference 52: note = a, c, g, u, unknown, other, or absent
  misc_difference 53: note = a, c, g, u, unknown, other, or absent
  misc_difference 54: note = a, c, g, u, unknown, other, or absent
  misc_difference 55: note = a, c, g, u, unknown, other, or absent
  misc_difference 56: note = a, c, g, u, unknown, other, or absent
  misc_difference 57: note = a, c, g, u, unknown, other, or absent
  misc_difference 58: note = a, c, g, u, unknown, other, or absent
  misc_difference 59: note = a, c, g, u, unknown, other, or absent
  misc_difference 60: note = a, c, g, u, unknown, other, or absent
  misc_difference 61: note = a, c, g, u, unknown, other, or absent
  misc_difference 62: note = a, c, g, u, unknown, other, or absent
  misc_difference 63: note = a, c, g, u, unknown, other, or absent
  misc_difference 64: note = a, c, g, u, unknown, other, or absent
  misc_difference 65: note = a, c, g, u, unknown, other, or absent
  misc_difference 66: note = a, c, g, u, unknown, other, or absent
  misc_difference 67: note = a, c, g, u, unknown, other, or absent
  misc_difference 68: note = a, c, g, u, unknown, other, or absent
  misc_difference 69: note = a, c, g, u, unknown, other, or absent
  misc_difference 70: note = a, c, g, u, unknown, other, or absent
  misc_difference 71: note = a, c, g, u, unknown, other, or absent
  misc_difference 72: note = a, c, g, u, unknown, other, or absent
  misc_difference 73: note = a, c, g, u, unknown, other, or absent
  misc_difference 74: note = a, c, g, u, unknown, other, or absent
  misc_difference 75: note = a, c, g, u, unknown, other, or absent
  misc_difference 76: note = a, c, g, u, unknown, other, or absent
  misc_difference 77: note = a, c, g, u, unknown, other, or absent
  misc_difference 78: note = a, c, g, u, unknown, other, or absent
  misc_difference 79: note = a, c, g, u, unknown, other, or absent
  misc_difference 80: note = a, c, g, u, unknown, other, or absent
  misc_difference 81: note = a, c, g, u, unknown, other, or absent
  misc_difference 82: note = a, c, g, u, unknown, other, or absent
  misc_difference 83: note = a, c, g, u, unknown, other, or absent
  misc_difference 84: note = a, c, g, u, unknown, other, or absent
  misc_difference 85: note = a, c, g, u, unknown, other, or absent
  misc_difference 86: note = a, c, g, u, unknown, other, or absent
  misc_difference 87: note = a, c, g, u, unknown, other, or absent
  misc_difference 88: note = a, c, g, u, unknown, other, or absent
  misc_difference 89: note = a, c, g, u, unknown, other, or absent
  misc_difference 90: note = a, c, g, u, unknown, other, or absent
  misc_difference 91: note = a, c, g, u, unknown, other, or absent
  misc_difference 92: note = a, c, g, u, unknown, other, or absent
  misc_difference 93: note = a, c, g, u, unknown, other, or absent
  misc_difference 94: note = a, c, g, u, unknown, other, or absent
  misc_difference 95: note = a, c, g, u, unknown, other, or absent
  misc_difference 96: note = a, c, g, u, unknown, other, or absent
  misc_difference 97: note = a, c, g, u, unknown, other, or absent
  misc_difference 98: note = a, c, g, u, unknown, other, or absent
  misc_difference 99: note = a, c, g, u, unknown, other, or absent
  misc_difference 100: note = a, c, g, u, unknown, other, or absent
  misc_difference 101: note = a, c, g, u, unknown, other, or absent
  misc_difference 102: note = a, c, g, u, unknown, other, or absent
  misc_difference 103: note = a, c, g, u, unknown, other, or absent
  misc_difference 104: note = a, c, g, u, unknown, other, or absent
  misc_difference 105: note = a, c, g, u, unknown, other, or absent
  misc_difference 106: note = a, c, g, u, unknown, other, or absent
  misc_difference 107: note = a, c, g, u, unknown, other, or absent
  misc_difference 108: note = a, c, g, u, unknown, other, or absent
  misc_difference 109: note = a, c, g, u, unknown, other, or absent
  misc_difference 110: note = a, c, g, u, unknown, other, or absent
  misc_difference 111: note = a, c, g, u, unknown, other, or absent
  misc_difference 112: note = a, c, g, u, unknown, other, or absent
  misc_difference 113: note = a, c, g, u, unknown, other, or absent
  misc_difference 114: note = a, c, g, u, unknown, other, or absent
  misc_difference 115: note = a, c, g, u, unknown, other, or absent
  misc_difference 116: note = a, c, g, u, unknown, other, or absent
  misc_difference 117: note = a, c, g, u, unknown, other, or absent
  misc_difference 118: note = a, c, g, u, unknown, other, or absent
  misc_difference 119: note = a, c, g, u, unknown, other, or absent
  misc_difference 120: note = a, c, g, u, unknown, other, or absent
  misc_difference 121: note = a, c, g, u, unknown, other, or absent
  misc_difference 122: note = a, c, g, u, unknown, other, or absent
  misc_difference 123: note = a, c, g, u, unknown, other, or absent
  misc_difference 124: note = a, c, g, u, unknown, other, or absent
  misc_difference 125: note = a, c, g, u, unknown, other, or absent
  misc_difference 126: note = a, c, g, u, unknown, other, or absent
  misc_difference 127: note = a, c, g, u, unknown, other, or absent
  misc_difference 128: note = a, c, g, u, unknown, other, or absent
  misc_difference 129: note = a, c, g, u, unknown, other, or absent
  misc_difference 130: note = a, c, g, u, unknown, other, or absent
  misc_difference 131: note = a, c, g, u, unknown, other, or absent
  misc_difference 132: note = a, c, g, u, unknown, other, or absent
  misc_difference 133: note = a, c, g, u, unknown, other, or absent
  misc_difference 134: note = a, c, g, u, unknown, other, or absent
  misc_difference 135: note = a, c, g, u, unknown, other, or absent
  misc_difference 136: note = a, c, g, u, unknown, other, or absent
  misc_difference 137: note = a, c, g, u, unknown, other, or absent
  misc_difference 138: note = a, c, g, u, unknown, other, or absent
  misc_difference 139: note = a, c, g, u, unknown, other, or absent
  misc_difference 140: note = a, c, g, u, unknown, other, or absent
  misc_difference 141: note = a, c, g, u, unknown, other, or absent
  misc_difference 142: note = a, c, g, u, unknown, other, or absent
  misc_difference 143: note = a, c, g, u, unknown, other, or absent
  misc_difference 144: note = a, c, g, u, unknown, other, or absent
  misc_difference 145: note = a, c, g, u, unknown, other, or absent
  misc_difference 146: note = a, c, g, u, unknown, other, or absent
  misc_difference 147: note = a, c, g, u, unknown, other, or absent
  misc_difference 148: note = a, c, g, u, unknown, other, or absent
  misc_difference 149: note = a, c, g, u, unknown, other, or absent
  misc_difference 150: note = a, c, g, u, unknown, other, or absent
  misc_difference 151: note = a, c, g, u, unknown, other, or absent
  misc_difference 152: note = a, c, g, u, unknown, other, or absent
  misc_difference 153: note = a, c, g, u, unknown, other, or absent
  misc_difference 154: note = a, c, g, u, unknown, other, or absent
  misc_difference 155: note = a, c, g, u, unknown, other, or absent
  misc_difference 156: note = a, c, g, u, unknown, other, or absent
  misc_difference 157: note = a, c, g, u, unknown, other, or absent
  misc_difference 158: note = a, c, g, u, unknown, other, or absent
  misc_difference 159: note = a, c, g, u, unknown, other, or absent
  misc_difference 160: note = a, c, g, u, unknown, other, or absent
  misc_difference 161: note = a, c, g, u, unknown, other, or absent
  misc_difference 162: note = a, c, g, u, unknown, other, or absent
  misc_difference 163: note = a, c, g, u, unknown, other, or absent
  misc_difference 164: note = a, c, g, u, unknown, other, or absent
  misc_difference 165: note = a, c, g, u, unknown, other, or absent
  misc_difference 166: note = a, c, g, u, unknown, other, or absent
  misc_difference 167: note = a, c, g, u, unknown, other, or absent
  misc_difference 168: note = a, c, g, u, unknown, other, or absent
  misc_difference 169: note = a, c, g, u, unknown, other, or absent
  misc_difference 170: note = a, c, g, u, unknown, other, or absent
  misc_difference 171: note = a, c, g, u, unknown, other, or absent
  misc_difference 172: note = a, c, g, u, unknown, other, or absent
  misc_difference 173: note = a, c, g, u, unknown, other, or absent
  misc_difference 174: note = a, c, g, u, unknown, other, or absent
  misc_difference 175: note = a, c, g, u, unknown, other, or absent
  misc_difference 176: note = a, c, g, u, unknown, other, or absent
  misc_difference 177: note = a, c, g, u, unknown, other, or absent
  misc_difference 178: note = a, c, g, u, unknown, other, or absent
  misc_difference 179: note = a, c, g, u, unknown, other, or absent
  misc_difference 180: note = a, c, g, u, unknown, other, or absent
  misc_difference 181: note = a, c, g, u, unknown, other, or absent
  misc_difference 182: note = a, c, g, u, unknown, other, or absent
  misc_difference 183: note = a, c, g, u, unknown, other, or absent
  misc_difference 184: note = a, c, g, u, unknown, other, or absent
  misc_difference 185: note = a, c, g, u, unknown, other, or absent
  misc_difference 186: note = a, c, g, u, unknown, other, or absent
  misc_difference 187: note = a, c, g, u, unknown, other, or absent
  misc_difference 188: note = a, c, g, u, unknown, other, or absent
  misc_difference 189: note = a, c, g, u, unknown, other, or absent
  misc_difference 190: note = a, c, g, u, unknown, other, or absent
  misc_difference 191: note = a, c, g, u, unknown, other, or absent
  misc_difference 192: note = a, c, g, u, unknown, other, or absent
  misc_difference 193: note = a, c, g, u, unknown, other, or absent
  misc_difference 194: note = a, c, g, u, unknown, other, or absent
  misc_difference 195: note = a, c, g, u, unknown, other, or absent
  misc_difference 196: note = a, c, g, u, unknown, other, or absent
  misc_difference 197: note = a, c, g, u, unknown, other, or absent
  misc_difference 198: note = a, c, g, u, unknown, other, or absent
  misc_difference 199: note = a, c, g, u, unknown, other, or absent
  misc_difference 200: note = a, c, g, u, unknown, other, or absent
  misc_difference 201: note = a, c, g, u, unknown, other, or absent
  misc_difference 202: note = a, c, g, u, unknown, other, or absent
  misc_difference 203: note = a, c, g, u, unknown, other, or absent
  misc_difference 204: note = a, c, g, u, unknown, other, or absent
  misc_difference 205: note = a, c, g, u, unknown, other, or absent
  misc_difference 206: note = a, c, g, u, unknown, other, or absent
  misc_difference 207: note = a, c, g, u, unknown, other, or absent
  misc_difference 208: note = a, c, g, u, unknown, other, or absent
  misc_difference 209: note = a, c, g, u, unknown, other, or absent
  misc_difference 210: note = a, c, g, u, unknown, other, or absent
  misc_difference 211: note = a, c, g, u, unknown, other, or absent
  misc_difference 212: note = a, c, g, u, unknown, other, or absent
  misc_difference 213: note = a, c, g, u, unknown, other, or absent
  misc_difference 214: note = a, c, g, u, unknown, other, or absent
  misc_difference 215: note = a, c, g, u, unknown, other, or absent
  misc_difference 216: note = a, c, g, u, unknown, other, or absent
  misc_difference 217: note = a, c, g, u, unknown, other, or absent
  misc_difference 218: note = a, c, g, u, unknown, other, or absent
  misc_difference 219: note = a, c, g, u, unknown, other, or absent
  misc_difference 220: note = a, c, g, u, unknown, other, or absent
  misc_difference 221: note = a, c, g, u, unknown, other, or absent
  misc_difference 222: note = a, c, g, u, unknown, other, or absent
  misc_difference 223: note = a, c, g, u, unknown, other, or absent
  misc_difference 224: note = a, c, g, u, unknown, other, or absent
  misc_difference 225: note = a, c, g, u, unknown, other, or absent
  misc_difference 226: note = a, c, g, u, unknown, other, or absent
  misc_difference 227: note = a, c, g, u, unknown, other, or absent
  misc_difference 228: note = a, c, g, u, unknown, other, or absent
  misc_difference 229: note = a, c, g, u, unknown, other, or absent
  misc_difference 230: note = a, c, g, u, unknown, other, or absent
  misc_difference 231: note = a, c, g, u, unknown, other, or absent
  misc_difference 232: note = a, c, g, u, unknown, other, or absent
  misc_difference 233: note = a, c, g, u, unknown, other, or absent
  misc_difference 234: note = a, c, g, u, unknown, other, or absent
  misc_difference 235: note = a, c, g, u, unknown, other, or absent
  misc_difference 236: note = a, c, g, u, unknown, other, or absent
  misc_difference 237: note = a, c, g, u, unknown, other, or absent
  misc_difference 238: note = a, c, g, u, unknown, other, or absent
  misc_difference 239: note = a, c, g, u, unknown, other, or absent
  misc_difference 240: note = a, c, g, u, unknown, other, or absent
  misc_difference 241: note = a, c, g, u, unknown, other, or absent
  misc_difference 242: note = a, c, g, u, unknown, other, or absent
  misc_difference 243: note = a, c, g, u, unknown, other, or absent
  misc_difference 244: note = a, c, g, u, unknown, other, or absent
  misc_difference 245: note = a, c, g, u, unknown, other, or absent
  misc_difference 246: note = a, c, g, u, unknown, other, or absent
  misc_difference 247: note = a, c, g, u, unknown, other, or absent
  misc_difference 248: note = a, c, g, u, unknown, other, or absent
  misc_difference 249: note = a, c, g, u, unknown, other, or absent
  misc_difference 250: note = a, c, g, u, unknown, other, or absent
  misc_difference 251: note = a, c, g, u, unknown, other, or absent
  misc_difference 252: note = a, c, g, u, unknown, other, or absent
  misc_difference 253: note = a, c, g, u, unknown, other, or absent
  misc_difference 254: note = a, c, g, u, unknown, other, or absent
  misc_difference 255: note = a, c, g, u, unknown, other, or absent
  misc_difference 256: note = a, c, g, u, unknown, other, or absent
  misc_difference 257: note = a, c, g, u, unknown, other, or absent
  misc_difference 258: note = a, c, g, u, unknown, other, or absent
  misc_difference 259: note = a, c, g, u, unknown, other, or absent
  misc_difference 260: note = a, c, g, u, unknown, other, or absent
  misc_difference 261: note = a, c, g, u, unknown, other, or absent
  misc_difference 262: note = a, c, g, u, unknown, other, or absent
  misc_difference 263: note = a, c, g, u, unknown, other, or absent
  misc_difference 264: note = a, c, g, u, unknown, other, or absent
  misc_difference 265: note = a, c, g, u, unknown, other, or absent
  misc_difference 266: note = a, c, g, u, unknown, other, or absent
  misc_difference 267: note = a, c, g, u, unknown, other, or absent
  misc_difference 268: note = a, c, g, u, unknown, other, or absent
  misc_difference 269: note = a, c, g, u, unknown, other, or absent
  misc_difference 270: note = a, c, g, u, unknown, other, or absent
  misc_difference 271: note = a, c, g, u, unknown, other, or absent
  misc_difference 272: note = a, c, g, u, unknown, other, or absent
  misc_difference 273: note = a, c, g, u, unknown, other, or absent
  misc_difference 274: note = a, c, g, u, unknown, other, or absent
  misc_difference 275: note = a, c, g, u, unknown, other, or absent
  misc_difference 276: note = a, c, g, u, unknown, other, or absent
  misc_difference 277: note = a, c, g, u, unknown, other, or absent
  misc_difference 278: note = a, c, g, u, unknown, other, or absent
  misc_difference 279: note = a, c, g, u, unknown, other, or absent
  misc_difference 280: note = a, c, g, u, unknown, other, or absent
  misc_difference 281: note = a, c, g, u, unknown, other, or absent
  misc_difference 282: note = a, c, g, u, unknown, other, or absent
  misc_difference 283: note = a, c, g, u, unknown, other, or absent
  misc_difference 284: note = a, c, g, u, unknown, other, or absent
  misc_difference 285: note = a, c, g, u, unknown, other, or absent
  misc_difference 286: note = a, c, g, u, unknown, other, or absent
  misc_difference 287: note = a, c, g, u, unknown, other, or absent
  misc_difference 288: note = a, c, g, u, unknown, other, or absent
  misc_difference 289: note = a, c, g, u, unknown, other, or absent
  misc_difference 290: note = a, c, g, u, unknown, other, or absent
  misc_difference 291: note = a, c, g, u, unknown, other, or absent
  misc_difference 292: note = a, c, g, u, unknown, other, or absent
  misc_difference 293: note = a, c, g, u, unknown, other, or absent
  misc_difference 294: note = a, c, g, u, unknown, other, or absent
  misc_difference 295: note = a, c, g, u, unknown, other, or absent
  misc_difference 296: note = a, c, g, u, unknown, other, or absent
  misc_difference 297: note = a, c, g, u, unknown, other, or absent
  misc_difference 298: note = a, c, g, u, unknown, other, or absent
  misc_difference 299: note = a, c, g, u, unknown, other, or absent
  misc_difference 300: note = a, c, g, u, unknown, other, or absent
  misc_difference 301: note = a, c, g, u, unknown, other, or absent
  misc_difference 302: note = a, c, g, u, unknown, other, or absent
  misc_difference 303: note = a, c, g, u, unknown, other, or absent
  misc_difference 304: note = a, c, g, u, unknown, other, or absent
  misc_difference 305: note = a, c, g, u, unknown, other, or absent
  misc_difference 306: note = a, c, g, u, unknown, other, or absent
  misc_difference 307: note = a, c, g, u, unknown, other, or absent
  misc_difference 308: note = a, c, g, u, unknown, other, or absent
  misc_difference 309: note = a, c, g, u, unknown, other, or absent
  misc_difference 310: note = a, c, g, u, unknown, other, or absent
  misc_difference 311: note = a, c, g, u, unknown, other, or absent
  misc_difference 312: note = a, c, g, u, unknown, other, or absent
  misc_difference 313: note = a, c, g, u, unknown, other, or absent
  misc_difference 314: note = a, c, g, u, unknown, other, or absent
  misc_difference 315: note = a, c, g, u, unknown, other, or absent
  misc_difference 316: note = a, c, g, u, unknown, other, or absent
  misc_difference 317: note = a, c, g, u, unknown, other, or absent
  misc_difference 318: note = May be absent
  misc_difference 319: note = a, c, g, u, unknown, other, or absent
  misc_difference 320: note = a, c, g, u, unknown, other, or absent
  misc_difference 321: note = May be absent
  misc_difference 322: note = May be absent
  misc_difference 323: note = May be absent
  misc_difference 324: note = May be absent
  misc_difference 325: note = May be absent
  misc_difference 326: note = May be absent
  misc_difference 327: note = May be absent
  misc_difference 328: note = a, c, g, u, unknown, other, or absent
  misc_difference 329: note = May be absent
  misc_difference 330: note = May be absent
  misc_difference 331: note = May be absent
  misc_difference 332: note = a, c, g, u, unknown, other, or absent
  misc_difference 333: note = a, c, g, u, unknown, other, or absent
  misc_difference 334: note = May be absent
  misc_difference 335: note = May be absent
  misc_difference 336: note = a, c, g, u, unknown, other, or absent
  misc_difference 337: note = a, c, g, u, unknown, other, or absent
  misc_difference 338: note = a, c, g, u, unknown, other, or absent
  misc_difference 339: note = May be absent
  misc_difference 340: note = May be absent
  misc_difference 341: note = May be absent
  misc_difference 342: note = May be absent
  misc_difference 45..316: note = This region may encompass 1-271 nucleotides
kgynnnndtvgbnhagbytgghyannvynnndbnytgtgrhnvhnnnnnnnnnnnnnnnnnnnnnnnnnnnnnnnnnnnnnnnnnnnnnnnnnnnnnnnnnnnnnnnnnnnnnnnnnnnnnnnnnnnnnnnnnnnnnnnnnnnnnnnnnnnnnnnnnnnnnnnnnnnnnnnnnnnnnnnnnnnnnnnnnnnnnnnnnnnnnnnnnnnnnnnnnnnnnnnnnnnnnnnnnnnnnnnnnnnnnnnnnnnnnnnnnnnnnnnnnnnnnnnnnnnnnnnnnnnnnnnnnnnnnnnnnnnnnnnnnnnnnnnnnnnnnnnnnvnnrgytcranycynnbhnnnvrym

SEQ ID NO: 587 - RNA, 339 nt, synthetic construct
  source 1..339: mol_type = other RNA
  misc_difference 1: note = May be absent
  misc_difference 2: note = May be absent
  misc_difference 3: note = May be absent
  misc_difference 4: note = May be absent
  misc_difference 5: note = May be absent
  misc_difference 6: note = May be absent
  misc_difference 7: note = May be absent
  misc_difference 8: note = May be absent
  misc_difference 9: note = May be absent
  misc_difference 10: note = May be absent
  misc_difference 11: note = May be absent
  misc_difference 12: note = May be absent
  misc_difference 13: note = May be absent
  misc_difference 14: note = May be absent
  misc_difference 15: note = May be absent
  misc_difference 16: note = May be absent
  misc_difference 17: note = May be absent
  misc_difference 18: note = May be absent
  misc_difference 19: note = May be absent
  misc_difference 20: note = May be absent
  misc_difference 21: note = May be absent
  misc_difference 22: note = May be absent
  misc_difference 23: note = May be absent
  misc_difference 24: note = May be absent
  misc_difference 25: note = May be absent
  misc_difference 26: note = May be absent
  misc_difference 27: note = May be absent
  misc_difference 28: note = May be absent
  misc_difference 29: note = May be absent
  misc_difference 30: note = May be absent
  misc_difference 31: note = May be absent
  misc_difference 32: note = May be absent
  misc_difference 33: note = May be absent
  misc_difference 34: note = May be absent
  misc_difference 35: note = May be absent
  misc_difference 36: note = May be absent
  misc_difference 37: note = May be absent
  misc_difference 38: note = May be absent
  misc_difference 39: note = May be absent
  misc_difference 40: note = May be absent
  misc_difference 41: note = May be absent
  misc_difference 42: note = May be absent
  misc_difference 43: note = May be absent
  misc_difference 44: note = a, c, g, u, unknown, other, or absent
  misc_difference 45: note = a, c, g, u, unknown, other, or absent
  misc_difference 46: note = a, c, g, u, unknown, other, or absent
  misc_difference 47: note = a, c, g, u, unknown, other, or absent
  misc_difference 48: note = a, c, g, u, unknown, other, or absent
  misc_difference 49: note = a, c, g, u, unknown, other, or absent
  misc_difference 50: note = a, c, g, u, unknown, other, or absent
  misc_difference 51: note = a, c, g, u, unknown, other, or absent
  misc_difference 52: note = a, c, g, u, unknown, other, or absent
  misc_difference 53: note = a, c, g, u, unknown, other, or absent
  misc_difference 54: note = a, c, g, u, unknown, other, or absent
  misc_difference 55: note = a, c, g, u, unknown, other, or absent
  misc_difference 56: note = a, c, g, u, unknown, other, or absent
  misc_difference 57: note = a, c, g, u, unknown, other, or absent
  misc_difference 58: note = a, c, g, u, unknown, other, or absent
  misc_difference 59: note = a, c, g, u, unknown, other, or absent
  misc_difference 60: note = a, c, g, u, unknown, other, or absent
  misc_difference 61: note = a, c, g, u, unknown, other, or absent
  misc_difference 62: note = a, c, g, u, unknown, other, or absent
  misc_difference 63: note = a, c, g, u, unknown, other, or absent
  misc_difference 64: note = a, c, g, u, unknown, other, or absent
  misc_difference 65: note = a, c, g, u, unknown, other, or absent
  misc_difference 66: note = a, c, g, u, unknown, other, or absent
  misc_difference 67: note = a, c, g, u, unknown, other, or absent
  misc_difference 68: note = a, c, g, u, unknown, other, or absent
  misc_difference 69: note = a, c, g, u, unknown, other, or absent
  misc_difference 70: note = a, c, g, u, unknown, other, or absent
  misc_difference 71: note = a, c, g, u, unknown, other, or absent
  misc_difference 72: note = a, c, g, u, unknown, other, or absent
  misc_difference 73: note = a, c, g, u, unknown, other, or absent
  misc_difference 74: note = a, c, g, u, unknown, other, or absent
  misc_difference 75: note = a, c, g, u, unknown, other, or absent
  misc_difference 76: note = a, c, g, u, unknown, other, or absent
  misc_difference 77: note = a, c, g, u, unknown, other, or absent
  misc_difference 78: note = a, c, g, u, unknown, other, or absent
  misc_difference 79: note = a, c, g, u, unknown, other, or absent
  misc_difference 80: note = a, c, g, u, unknown, other, or absent
  misc_difference 81: note = a, c, g, u, unknown, other, or absent
  misc_difference 82: note = a, c, g, u, unknown, other, or absent
  misc_difference 83: note = a, c, g, u, unknown, other, or absent
  misc_difference 84: note = a, c, g, u, unknown, other, or absent
  misc_difference 85: note = a, c, g, u, unknown, other, or absent
  misc_difference 86: note = a, c, g, u, unknown, other, or absent
  misc_difference 87: note = a, c, g, u, unknown, other, or absent
  misc_difference 88: note = a, c, g, u, unknown, other, or absent
  misc_difference 89: note = a, c, g, u, unknown, other, or absent
  misc_difference 90: note = a, c, g, u, unknown, other, or absent
  misc_difference 91: note = a, c, g, u, unknown, other, or absent
  misc_difference 92: note = a, c, g, u, unknown, other, or absent
  misc_difference 93: note = a, c, g, u, unknown, other, or absent
  misc_difference 94: note = a, c, g, u, unknown, other, or absent
  misc_difference 95: note = a, c, g, u, unknown, other, or absent
  misc_difference 96: note = a, c, g, u, unknown, other, or absent
  misc_difference 97: note = a, c, g, u, unknown, other, or absent
  misc_difference 98: note = a, c, g, u, unknown, other, or absent
  misc_difference 99: note = a, c, g, u, unknown, other, or absent
  misc_difference 100: note = a, c, g, u, unknown, other, or absent
  misc_difference 101: note = a, c, g, u, unknown, other, or absent
  misc_difference 102: note = a, c, g, u, unknown, other, or absent
  misc_difference 103: note = a, c, g, u, unknown, other, or absent
  misc_difference 104: note = a, c, g, u, unknown, other, or absent
  misc_difference 105: note = a, c, g, u, unknown, other, or absent
  misc_difference 106: note = a, c, g, u, unknown, other, or absent
  misc_difference 107: note = a, c, g, u, unknown, other, or absent
  misc_difference 108: note = a, c, g, u, unknown, other, or absent
  misc_difference 109: note = a, c, g, u, unknown, other, or absent
  misc_difference 110: note = a, c, g, u, unknown, other, or absent
  misc_difference 111: note = a, c, g, u, unknown, other, or absent
  misc_difference 112: note = a, c, g, u, unknown, other, or absent
  misc_difference 113: note = a, c, g, u, unknown, other, or absent
  misc_difference 114: note = a, c, g, u, unknown, other, or absent
  misc_difference 115: note = a, c, g, u, unknown, other, or absent
  misc_difference 116: note = a, c, g, u, unknown, other, or absent
  misc_difference 117: note = a, c, g, u, unknown, other, or absent
  misc_difference 118: note = a, c, g, u, unknown, other, or absent
  misc_difference 119: note = a, c, g, u, unknown, other, or absent
  misc_difference 120: note = a, c, g, u, unknown, other, or absent
  misc_difference 121: note = a, c, g, u, unknown, other, or absent
  misc_difference 122: note = a, c, g, u, unknown, other, or absent
  misc_difference 123: note = a, c, g, u, unknown, other, or absent
  misc_difference 124: note = a, c, g, u, unknown, other, or absent
  misc_difference 125: note = a, c, g, u, unknown, other, or absent
  misc_difference 126: note = a, c, g, u, unknown, other, or absent
  misc_difference 127: note = a, c, g, u, unknown, other, or absent
  misc_difference 128: note = a, c, g, u, unknown, other, or absent
  misc_difference 129: note = a, c, g, u, unknown, other, or absent
  misc_difference 130: note = a, c, g, u, unknown, other, or absent
  misc_difference 131: note = a, c, g, u, unknown, other, or absent
  misc_difference 132: note = a, c, g, u, unknown, other, or absent
  misc_difference 133: note = a, c, g, u, unknown, other, or absent
  misc_difference 134: note = a, c, g, u, unknown, other, or absent
  misc_difference 135: note = a, c, g, u, unknown, other, or absent
  misc_difference 136: note = a, c, g, u, unknown, other, or absent
  misc_difference 137: note = a, c, g, u, unknown, other, or absent
  misc_difference 138: note = a, c, g, u, unknown, other, or absent
  misc_difference 139: note = a, c, g, u, unknown, other, or absent
  misc_difference 140: note = a, c, g, u, unknown, other, or absent
  misc_difference 141: note = a, c, g, u, unknown, other, or absent
  misc_difference 142: note = a, c, g, u, unknown, other, or absent
  misc_difference 143: note = a, c, g, u, unknown, other, or absent
  misc_difference 144: note = a, c, g, u, unknown, other, or absent
  misc_difference 145: note = a, c, g, u, unknown, other, or absent
  misc_difference 146: note = a, c, g, u, unknown, other, or absent
  misc_difference 147: note = a, c, g, u, unknown, other, or absent
  misc_difference 148: note = a, c, g, u, unknown, other, or absent
  misc_difference 149: note = a, c, g, u, unknown, other, or absent
  misc_difference 150: note = a, c, g, u, unknown, other, or absent
  misc_difference 151: note = a, c, g, u, unknown, other, or absent
  misc_difference 152: note = a, c, g, u, unknown, other, or absent
  misc_difference 153: note = a, c, g, u, unknown, other, or absent
  misc_difference 154: note = a, c, g, u, unknown, other, or absent
  misc_difference 155: note = a, c, g, u, unknown, other, or absent
  misc_difference 156: note = a, c, g, u, unknown, other, or absent
  misc_difference 157: note = a, c, g, u, unknown, other, or absent
  misc_difference 158: note = a, c, g, u, unknown, other, or absent
  misc_difference 159: note = a, c, g, u, unknown, other, or absent
  misc_difference 160: note = a, c, g, u, unknown, other, or absent
  misc_difference 161: note = a, c, g, u, unknown, other, or absent
  misc_difference 162: note = a, c, g, u, unknown, other, or absent
  misc_difference 163: note = a, c, g, u, unknown, other, or absent
  misc_difference 164: note = a, c, g, u, unknown, other, or absent
  misc_difference 165: note = a, c, g, u, unknown, other, or absent
  misc_difference 166: note = a, c, g, u, unknown, other, or absent
  misc_difference 167: note = a, c, g, u, unknown, other, or absent
  misc_difference 168: note = a, c, g, u, unknown, other, or absent
  misc_difference 169: note = a, c, g, u, unknown, other, or absent
  misc_difference 170: note = a, c, g, u, unknown, other, or absent
  misc_difference 171: note = a, c, g, u, unknown, other, or absent
  misc_difference 172: note = a, c, g, u, unknown, other, or absent
  misc_difference 173: note = a, c, g, u, unknown, other, or absent
  misc_difference 174: note = a, c, g, u, unknown, other, or absent
  misc_difference 175: note = a, c, g, u, unknown, other, or absent
  misc_difference 176: note = a, c, g, u, unknown, other, or absent
  misc_difference 177: note = a, c, g, u, unknown, other, or absent
  misc_difference 178: note = a, c, g, u, unknown, other, or absent
  misc_difference 179: note = a, c, g, u, unknown, other, or absent
  misc_difference 180: note = a, c, g, u, unknown, other, or absent
  misc_difference 181: note = a, c, g, u, unknown, other, or absent
  misc_difference 182: note = a, c, g, u, unknown, other, or absent
  misc_difference 183: note = a, c, g, u, unknown, other, or absent
  misc_difference 184: note = a, c, g, u, unknown, other, or absent
  misc_difference 185: note = a, c, g, u, unknown, other, or absent
  misc_difference 186: note = a, c, g, u, unknown, other, or absent
  misc_difference 187: note = a, c, g, u, unknown, other, or absent
  misc_difference 188: note = a, c, g, u, unknown, other, or absent
  misc_difference 189: note = a, c, g, u, unknown, other, or absent
  misc_difference 190: note = a, c, g, u, unknown, other, or absent
  misc_difference 191: note = a, c, g, u, unknown, other, or absent
  misc_difference 192: note = a, c, g, u, unknown, other, or absent
  misc_difference 193: note = a, c, g, u, unknown, other, or absent
  misc_difference 194: note = a, c, g, u, unknown, other, or absent
  misc_difference 195: note = a, c, g, u, unknown, other, or absent
  misc_difference 196: note = a, c, g, u, unknown, other, or absent
  misc_difference 197: note = a, c, g, u, unknown, other, or absent
  misc_difference 198: note = a, c, g, u, unknown, other, or absent
  misc_difference 199: note = a, c, g, u, unknown, other, or absent
  misc_difference 200: note = a, c, g, u, unknown, other, or absent
  misc_difference 201: note = a, c, g, u, unknown, other, or absent
  misc_difference 202: note = a, c, g, u, unknown, other, or absent
  misc_difference 203: note = a, c, g, u, unknown, other, or absent
  misc_difference 204: note = a, c, g, u, unknown, other, or absent
  misc_difference 205: note = a, c, g, u, unknown, other, or absent
  misc_difference 206: note = a, c, g, u, unknown, other, or absent
  misc_difference 207: note = a, c, g, u, unknown, other, or absent
  misc_difference 208: note = a, c, g, u, unknown, other, or absent
  misc_difference 209: note = a, c, g, u, unknown, other, or absent
  misc_difference 210: note = a, c, g, u, unknown, other, or absent
  misc_difference 211: note = a, c, g, u, unknown, other, or absent
  misc_difference 212: note = a, c, g, u, unknown, other, or absent
  misc_difference 213: note = a, c, g, u, unknown, other, or absent
  misc_difference 214: note = a, c, g, u, unknown, other, or absent
  misc_difference 215: note = a, c, g, u, unknown, other, or absent
  misc_difference 216: note = a, c, g, u, unknown, other, or absent
  misc_difference 217: note = a, c, g, u, unknown, other, or absent
  misc_difference 218: note = a, c, g, u, unknown, other, or absent
  misc_difference 219: note = a, c, g, u, unknown, other, or absent
  misc_difference 220: note = a, c, g, u, unknown, other, or absent
  misc_difference 221: note = a, c, g, u, unknown, other, or absent
  misc_difference 222: note = a, c, g, u, unknown, other, or absent
  misc_difference 223: note = a, c, g, u, unknown, other, or absent
  misc_difference 224: note = a, c, g, u, unknown, other, or absent
  misc_difference 225: note = a, c, g, u, unknown, other, or absent
  misc_difference 226: note = a, c, g, u, unknown, other, or absent
  misc_difference 227: note = a, c, g, u, unknown, other, or absent
  misc_difference 228: note = a, c, g, u, unknown, other, or absent
  misc_difference 229: note = a, c, g, u, unknown, other, or absent
  misc_difference 230: note = a, c, g, u, unknown, other, or absent
  misc_difference 231: note = a, c, g, u, unknown, other, or absent
  misc_difference 232: note = a, c, g, u, unknown, other, or absent
  misc_difference 233: note = a, c, g, u, unknown, other, or absent
  misc_difference 234: note = a, c, g, u, unknown, other, or absent
  misc_difference 235: note = a, c, g, u, unknown, other, or absent
  misc_difference 236: note = a, c, g, u, unknown, other, or absent
  misc_difference 237: note = a, c, g, u, unknown, other, or absent
  misc_difference 238: note = a, c, g, u, unknown, other, or absent
  misc_difference 239: note = a, c, g, u, unknown, other, or absent
  misc_difference 240: note = a, c, g, u, unknown, other, or absent
  misc_difference 241: note = a, c, g, u, unknown, other, or absent
  misc_difference 242: note = a, c, g, u, unknown, other, or absent
  misc_difference 243: note = a, c, g, u, unknown, other, or absent
  misc_difference 244: note = a, c, g, u, unknown, other, or absent
  misc_difference 245: note = a, c, g, u, unknown, other, or absent
  misc_difference 246: note = a, c, g, u, unknown, other, or absent
  misc_difference 247: note = a, c, g, u, unknown, other, or absent
  misc_difference 248: note = a, c, g, u, unknown, other, or absent
  misc_difference 249: note = a, c, g, u, unknown, other, or absent
  misc_difference 250: note = a, c, g, u, unknown, other, or absent
  misc_difference 251: note = a, c, g, u, unknown, other, or absent
  misc_difference 252: note = a, c, g, u, unknown, other, or absent
  misc_difference 253: note = a, c, g, u, unknown, other, or absent
  misc_difference 254: note = a, c, g, u, unknown, other, or absent
  misc_difference 255: note = a, c, g, u, unknown, other, or absent
  misc_difference 256: note = a, c, g, u, unknown, other, or absent
  misc_difference 257: note = a, c, g, u, unknown, other, or absent
  misc_difference 258: note = a, c, g, u, unknown, other, or absent
  misc_difference 259: note = a, c, g, u, unknown, other, or absent
  misc_difference 260: note = a, c, g, u, unknown, other, or absent
  misc_difference 261: note = a, c, g, u, unknown, other, or absent
  misc_difference 262: note = a, c, g, u, unknown, other, or absent
  misc_difference 263: note = a, c, g, u, unknown, other, or absent
  misc_difference 264: note = a, c, g, u, unknown, other, or absent
  misc_difference 265: note = a, c, g, u, unknown, other, or absent
  misc_difference 266: note = a, c, g, u, unknown, other, or absent
  misc_difference 267: note = a, c, g, u, unknown, other, or absent
  misc_difference 268: note = a, c, g, u, unknown, other, or absent
  misc_difference 269: note = a, c, g, u, unknown, other, or absent
  misc_difference 270: note = a, c, g, u, unknown, other, or absent
  misc_difference 271: note = a, c, g, u, unknown, other, or absent
  misc_difference 272: note = a, c, g, u, unknown, other, or absent
  misc_difference 273: note = a, c, g, u, unknown, other, or absent
  misc_difference 274: note = a, c, g, u, unknown, other, or absent
  misc_difference 275: note = a, c, g, u, unknown, other, or absent
  misc_difference 276: note = a, c, g, u, unknown, other, or absent
  misc_difference 277: note = a, c, g, u, unknown, other, or absent
  misc_difference 278: note = a, c, g, u, unknown, other, or absent
  misc_difference 279: note = a, c, g, u, unknown, other, or absent
  misc_difference 280: note = a, c, g, u, unknown, other, or absent
  misc_difference 281: note = a, c, g, u, unknown, other, or absent
  misc_difference 282: note = a, c, g, u, unknown, other, or absent
  misc_difference 283: note = a, c, g, u, unknown, other, or absent
  misc_difference 284: note = a, c, g, u, unknown, other, or absent
  misc_difference 285: note = a, c, g, u, unknown, other, or absent
  misc_difference 286: note = a, c, g, u, unknown, other, or absent
  misc_difference 287: note = a, c, g, u, unknown, other, or absent
  misc_difference 288: note = a, c, g, u, unknown, other, or absent
  misc_difference 289: note = a, c, g, u, unknown, other, or absent
  misc_difference 290: note = a, c, g, u, unknown, other, or absent
  misc_difference 291: note = a, c, g, u, unknown, other, or absent
  misc_difference 292: note = a, c, g, u, unknown, other, or absent
  misc_difference 293: note = a, c, g, u, unknown, other, or absent
  misc_difference 294: note = a, c, g, u, unknown, other, or absent
  misc_difference 295: note = a, c, g, u, unknown, other, or absent
  misc_difference 296: note = a, c, g, u, unknown, other, or absent
  misc_difference 297: note = a, c, g, u, unknown, other, or absent
  misc_difference 298: note = a, c, g, u, unknown, other, or absent
  misc_difference 299: note = a, c, g, u, unknown, other, or absent
  misc_difference 300: note = a, c, g, u, unknown, other, or absent
  misc_difference 301: note = a, c, g, u, unknown, other, or absent
  misc_difference 302: note = a, c, g, u, unknown, other, or absent
  misc_difference 303: note = a, c, g, u, unknown, other, or absent
  misc_difference 304: note = a, c, g, u, unknown, other, or absent
  misc_difference 305: note = a, c, g, u, unknown, other, or absent
  misc_difference 306: note = a, c, g, u, unknown, other, or absent
  misc_difference 307: note = a, c, g, u, unknown, other, or absent
  misc_difference 308: note = a, c, g, u, unknown, other, or absent
  misc_difference 309: note = a, c, g, u, unknown, other, or absent
  misc_difference 310: note = a, c, g, u, unknown, other, or absent
  misc_difference 311: note = a, c, g, u, unknown, other, or absent
  misc_difference 312: note = a, c, g, u, unknown, other, or absent
  misc_difference 313: note = a, c, g, u, unknown, other, or absent
  misc_difference 314: note = a, c, g, u, unknown, other, or absent
  misc_difference 315: note = May be absent
  misc_difference 316: note = May be absent
  misc_difference 317: note = May be absent
  misc_difference 318: note = May be absent
  misc_difference 319: note = May be absent
  misc_difference 320: note = May be absent
  misc_difference 321: note = May be absent
  misc_difference 322: note = May be absent
  misc_difference 323: note = May be absent
  misc_difference 324: note = May be absent
  misc_difference 325: note = May be absent
  misc_difference 326: note = May be absent
  misc_difference 327: note = May be absent
  misc_difference 328: note = May be absent
  misc_difference 329: note = May be absent
  misc_difference 330: note = May be absent
  misc_difference 331: note = May be absent
  misc_difference 332: note = May be absent
  misc_difference 333: note = May be absent
  misc_difference 334: note = May be absent
  misc_difference 335: note = May be absent
  misc_difference 336: note = May be absent
  misc_difference 337: note = May be absent
  misc_difference 338: note = May be absent
  misc_difference 339: note = May be absent
  misc_difference 44..315: note = This region may encompass 1-271 nucleotides
gchrtgaybgtayagkggttasyactctgygytgtggccrcagnnnnnnnnnnnnnnnnnnnnnnnnnnnnnnnnnnnnnnnnnnnnnnnnnnnnnnnnnnnnnnnnnnnnnnnnnnnnnnnnnnnnnnnnnnnnnnnnnnnnnnnnnnnnnnnnnnnnnnnnnnnnnnnnnnnnnnnnnnnnnnnnnnnnnnnnnnnnnnnnnnnnnnnnnnnnnnnnnnnnnnnnnnnnnnnnnnnnnnnnnnnnnnnnnnnnnnnnnnnnnnnnnnnnnnnnnnnnnnnnnnnnnnnnnnnnnnnnnnnnnnnnnnnnnnncwyggytcraatcygagtcaygrca

SEQ ID NO: 588 - RNA, 339 nt, synthetic construct
  source 1..339: mol_type = other RNA
  misc_difference 1: note = May be absent
  misc_difference 2: note = May be absent
  misc_difference 3: note = May be absent
  misc_difference 4: note = May be absent
  misc_difference 5: note = May be absent
  misc_difference 6: note = May be absent
  misc_difference 7: note = May be absent
  misc_difference 8: note = May be absent
  misc_difference 9: note = May be absent
  misc_difference 10: note = May be absent
  misc_difference 11: note = May be absent
  misc_difference 12: note = May be absent
  misc_difference 13: note = May be absent
  misc_difference 14: note = May be absent
  misc_difference 15: note = May be absent
  misc_difference 16: note = May be absent
  misc_difference 17: note = May be absent
  misc_difference 18: note = May be absent
  misc_difference 19: note = May be absent
  misc_difference 20: note = May be absent
  misc_difference 21: note = May be absent
  misc_difference 22: note = May be absent
  misc_difference 23: note = May be absent
  misc_difference 24: note = May be absent
  misc_difference 25: note = May be absent
  misc_difference 26: note = May be absent
  misc_difference 27: note = May be absent
  misc_difference 28: note = May be absent
  misc_difference 29: note = May be absent
  misc_difference 30: note = May be absent
  misc_difference 31: note = May be absent
  misc_difference 32: note = May be absent
  misc_difference 33: note = May be absent
  misc_difference 34: note = May be absent
  misc_difference 35: note = May be absent
  misc_difference 36: note = May be absent
  misc_difference 37: note = May be absent
  misc_difference 38: note = May be absent
  misc_difference 39: note = May be absent
  misc_difference 40: note = May be absent
  misc_difference 41: note = May be absent
  misc_difference 42: note = May be absent
  misc_difference 43: note = May be absent
  misc_difference 44: note = a, c, g, u, unknown, other, or absent
  misc_difference 45: note = a, c, g, u, unknown, other, or absent
  misc_difference 46: note = a, c, g, u, unknown, other, or absent
  misc_difference 47: note = a, c, g, u, unknown, other, or absent
  misc_difference 48: note = a, c, g, u, unknown, other, or absent
  misc_difference 49: note = a, c, g, u, unknown, other, or absent
  misc_difference 50: note = a, c, g, u, unknown, other, or absent
  misc_difference 51: note = a, c, g, u, unknown, other, or absent
  misc_difference 52: note = a, c, g, u, unknown, other, or absent
  misc_difference 53: note = a, c, g, u, unknown, other, or absent
  misc_difference 54: note = a, c, g, u, unknown, other, or absent
  misc_difference 55: note = a, c, g, u, unknown, other, or absent
  misc_difference 56: note = a, c, g, u, unknown, other, or absent
  misc_difference 57: note = a, c, g, u, unknown, other, or absent
  misc_difference 58: note = a, c, g, u, unknown, other, or absent
  misc_difference 59: note = a, c, g, u, unknown, other, or absent
  misc_difference 60: note = a, c, g, u, unknown, other, or absent
  misc_difference 61: note = a, c, g, u, unknown, other, or absent
  misc_difference 62: note = a, c, g, u, unknown, other, or absent
  misc_difference 63: note = a, c, g, u, unknown, other, or absent
  misc_difference 64: note = a, c, g, u, unknown, other, or absent
  misc_difference 65: note = a, c, g, u, unknown, other, or absent
  misc_difference 66: note = a, c, g, u, unknown, other, or absent
  misc_difference 67: note = a, c, g, u, unknown, other, or absent
  misc_difference 68: note = a, c, g, u, unknown, other, or absent
  misc_difference 69: note = a, c, g, u, unknown, other, or absent
  misc_difference 70: note = a, c, g, u, unknown, other, or absent
  misc_difference 71: note = a, c, g, u, unknown, other, or absent
  misc_difference 72: note = a, c, g, u, unknown, other, or absent
  misc_difference 73: note = a, c, g, u, unknown, other, or absent
  misc_difference 74: note = a, c, g, u, unknown, other, or absent
  misc_difference 75: note = a, c, g, u, unknown, other, or absent
  misc_difference 76: note = a, c, g, u, unknown, other, or absent
  misc_difference 77: note = a, c, g, u, unknown, other, or absent
  misc_difference 78: note = a, c, g, u, unknown, other, or absent
  misc_difference 79: note = a, c, g, u, unknown, other, or absent
  misc_difference 80: note = a, c, g, u, unknown, other, or absent
  misc_difference 81: note = a, c, g, u, unknown, other, or absent
  misc_difference 82: note = a, c, g, u, unknown, other, or absent
  misc_difference 83: note = a, c, g, u, unknown, other, or absent
  misc_difference 84: note = a, c, g, u, unknown, other, or absent
  misc_difference 85: note = a, c, g, u, unknown, other, or absent
  misc_difference 86: note = a, c, g, u, unknown, other, or absent
  misc_difference 87: note = a, c, g, u, unknown, other, or absent
  misc_difference 88: note = a, c, g, u, unknown, other, or absent
  misc_difference 89: note = a, c, g, u, unknown, other, or absent
  misc_difference 90: note = a, c, g, u, unknown, other, or absent
  misc_difference 91: note = a, c, g, u, unknown, other, or absent
  misc_difference 92: note = a, c, g, u, unknown, other, or absent
  misc_difference 93: note = a, c, g, u, unknown, other, or absent
  misc_difference 94: note = a, c, g, u, unknown, other, or absent
  misc_difference 95: note = a, c, g, u, unknown, other, or absent
  misc_difference 96: note = a, c, g, u, unknown, other, or absent
  misc_difference 97: note = a, c, g, u, unknown, other, or absent
  misc_difference 98: note = a, c, g, u, unknown, other, or absent
  misc_difference 99: note = a, c, g, u, unknown, other, or absent
  misc_difference 100: note = a, c, g, u, unknown, other, or absent
  misc_difference 101: note = a, c, g, u, unknown, other, or absent
  misc_difference 102: note = a, c, g, u, unknown, other, or absent
  misc_difference 103: note = a, c, g, u, unknown, other, or absent
  misc_difference 104: note = a, c, g, u, unknown, other, or absent
  misc_difference 105: note = a, c, g, u, unknown, other, or absent
  misc_difference 106: note = a, c, g, u, unknown, other, or absent
  misc_difference 107: note = a, c, g, u, unknown, other, or absent
  misc_difference 108: note = a, c, g, u, unknown, other, or absent
  misc_difference 109: note = a, c, g, u, unknown, other, or absent
  misc_difference 110: note = a, c, g, u, unknown, other, or absent
  misc_difference 111: note = a, c, g, u, unknown, other, or absent
  misc_difference 112: note = a, c, g, u, unknown, other, or absent
  misc_difference 113: note = a, c, g, u, unknown, other, or absent
  misc_difference 114: note = a, c, g, u, unknown, other, or absent
  misc_difference 115: note = a, c, g, u, unknown, other, or absent
  misc_difference 116: note = a, c, g, u, unknown, other, or absent
  misc_difference 117: note = a, c, g, u, unknown, other, or absent
  misc_difference 118: note = a, c, g, u, unknown, other, or absent
  misc_difference 119: note = a, c, g, u, unknown, other, or absent
  misc_difference 120: note = a, c, g, u, unknown, other, or absent
  misc_difference 121: note = a, c, g, u, unknown, other, or absent
  misc_difference 122: note = a, c, g, u, unknown, other, or absent
  misc_difference 123: note = a, c, g, u, unknown, other, or absent
  misc_difference 124: note = a, c, g, u, unknown, other, or absent
  misc_difference 125: note = a, c, g, u, unknown, other, or absent
  misc_difference 126: note = a, c, g, u, unknown, other, or absent
  misc_difference 127: note = a, c, g, u, unknown, other, or absent
  misc_difference 128: note = a, c, g, u, unknown, other, or absent
  misc_difference 129: note = a, c, g, u, unknown, other, or absent
  misc_difference 130: note = a, c, g, u, unknown, other, or absent
  misc_difference 131: note = a, c, g, u, unknown, other, or absent
  misc_difference 132: note = a, c, g, u, unknown, other, or absent
  misc_difference 133: note = a, c, g, u, unknown, other, or absent
  misc_difference 134: note = a, c, g, u, unknown, other, or absent
  misc_difference 135: note = a, c, g, u, unknown, other, or absent
  misc_difference 136: note = a, c, g, u, unknown, other, or absent
  misc_difference 137: note = a, c, g, u, unknown, other, or absent
  misc_difference 138: note = a, c, g, u, unknown, other, or absent
  misc_difference 139: note = a, c, g, u, unknown, other, or absent
  misc_difference 140: note = a, c, g, u, unknown, other, or absent
  misc_difference 141: note = a, c, g, u, unknown, other, or absent
  misc_difference 142: note = a, c, g, u, unknown, other, or absent
  misc_difference 143: note = a, c, g, u, unknown, other, or absent
  misc_difference 144: note = a, c, g, u, unknown, other, or absent
  misc_difference 145: note = a, c, g, u, unknown, other, or absent
  misc_difference 146: note = a, c, g, u, unknown, other, or absent
  misc_difference 147: note = a, c, g, u, unknown, other, or absent
  misc_difference 148: note = a, c, g, u, unknown, other, or absent
  misc_difference 149: note = a, c, g, u, unknown, other, or absent
  misc_difference 150: note = a, c, g, u, unknown, other, or absent
  misc_difference 151: note = a, c, g, u, unknown, other, or absent
  misc_difference 152: note = a, c, g, u, unknown, other, or absent
  misc_difference 153: note = a, c, g, u, unknown, other, or absent
  misc_difference 154: note = a, c, g, u, unknown, other, or absent
  misc_difference 155: note = a, c, g, u, unknown, other, or absent
  misc_difference 156: note = a, c, g, u, unknown, other, or absent
  misc_difference 157: note = a, c, g, u, unknown, other, or absent
  misc_difference 158: note = a, c, g, u, unknown, other, or absent
  misc_difference 159: note = a, c, g, u, unknown, other, or absent
  misc_difference 160: note = a, c, g, u, unknown, other, or absent
  misc_difference 161: note = a, c, g, u, unknown, other, or absent
  misc_difference 162: note = a, c, g, u, unknown, other, or absent
  misc_difference 163: note = a, c, g, u, unknown, other, or absent
  misc_difference 164: note = a, c, g, u, unknown, other, or absent
  misc_difference 165: note = a, c, g, u, unknown, other, or absent
  misc_difference 166: note = a, c, g, u, unknown, other, or absent
  misc_difference 167: note = a, c, g, u, unknown, other, or absent
  misc_difference 168: note = a, c, g, u, unknown, other, or absent
  misc_difference 169: note = a, c, g, u, unknown, other, or absent
  misc_difference 170: note = a, c, g, u, unknown, other, or absent
  misc_difference 171: note = a, c, g, u, unknown, other, or absent
  misc_difference 172: note = a, c, g, u, unknown, other, or absent
  misc_difference 173: note = a, c, g, u, unknown, other, or absent
  misc_difference 174: note = a, c, g, u, unknown, other, or absent
  misc_difference 175: note = a, c, g, u, unknown, other, or absent
  misc_difference 176: note = a, c, g, u, unknown, other, or absent
  misc_difference 177: note = a, c, g, u, unknown, other, or absent
  misc_difference 178: note = a, c, g, u, unknown, other, or absent
  misc_difference 179: note = a, c, g, u, unknown, other, or absent
  misc_difference 180: note = a, c, g, u, unknown, other, or absent
  misc_difference 181: note = a, c, g, u, unknown, other, or absent
  misc_difference 182: note = a, c, g, u, unknown, other, or absent
  misc_difference 183: note = a, c, g, u, unknown, other, or absent
  misc_difference 184: note = a, c, g, u, unknown, other, or absent
  misc_difference 185: note = a, c, g, u, unknown, other, or absent
  misc_difference 186: note = a, c, g, u, unknown, other, or absent
  misc_difference 187: note = a, c, g, u, unknown, other, or absent
  misc_difference 188: note = a, c, g, u, unknown, other, or absent
  misc_difference 189: note = a, c, g, u, unknown, other, or absent
  misc_difference 190: note = a, c, g, u, unknown, other, or absent
  misc_difference 191: note = a, c, g, u, unknown, other, or absent
  misc_difference 192: note = a, c, g, u, unknown, other, or absent
  misc_difference 193: note = a, c, g, u, unknown, other, or absent
  misc_difference 194: note = a, c, g, u, unknown, other, or absent
  misc_difference 195: note = a, c, g, u, unknown, other, or absent
  misc_difference 196: note = a, c, g, u, unknown, other, or absent
  misc_difference 197: note = a, c, g, u, unknown, other, or absent
  misc_difference 198: note = a, c, g, u, unknown, other, or absent
  misc_difference 199: note = a, c, g, u, unknown, other, or absent
  misc_difference 200: note = a, c, g, u, unknown, other, or absent
  misc_difference 201: note = a, c, g, u, unknown, other, or absent
  misc_difference 202: note = a, c, g, u, unknown, other, or absent
  misc_difference 203: note = a, c, g, u, unknown, other, or absent
  misc_difference 204: note = a, c, g, u, unknown, other, or absent
  misc_difference 205: note = a, c, g, u, unknown, other, or absent
  misc_difference 206: note = a, c, g, u, unknown, other, or absent
  misc_difference 207: note = a, c, g, u, unknown, other, or absent
  misc_difference 208: note = a, c, g, u, unknown, other, or absent
  misc_difference 209: note = a, c, g, u, unknown, other, or absent
  misc_difference 210: note = a, c, g, u, unknown, other, or absent
  misc_difference 211: note = a, c, g, u, unknown, other, or absent
  misc_difference 212: note = a, c, g, u, unknown, other, or absent
  misc_difference 213: note = a, c, g, u, unknown, other, or absent
  misc_difference 214: note = a, c, g, u, unknown, other, or absent
  misc_difference 215: note = a, c, g, u, unknown, other, or absent
  misc_difference 216: note = a, c, g, u, unknown, other, or absent
  misc_difference 217: note = a, c, g, u, unknown, other, or absent
  misc_difference 218: note = a, c, g, u, unknown, other, or absent
  misc_difference 219: note = a, c, g, u, unknown, other, or absent
  misc_difference 220: note = a, c, g, u, unknown, other, or absent
  misc_difference 221: note = a, c, g, u, unknown, other, or absent
  misc_difference 222: note = a, c, g, u, unknown, other, or absent
  misc_difference 223: note = a, c, g, u, unknown, other, or absent
  misc_difference 224: note = a, c, g, u, unknown, other, or absent
  misc_difference 225: note = a, c, g, u, unknown, other, or absent
  misc_difference 226: note = a, c, g, u, unknown, other, or absent
  misc_difference 227: note = a, c, g, u, unknown, other, or absent
  misc_difference 228: note = a, c, g, u, unknown, other, or absent
  misc_difference 229: note = a, c, g, u, unknown, other, or absent
  misc_difference 230: note = a, c, g, u, unknown, other, or absent
  misc_difference 231: note = a, c, g, u, unknown, other, or absent
  misc_difference 232: note = a, c, g, u, unknown, other, or absent
  misc_difference 233: note = a, c, g, u, unknown, other, or absent
  misc_difference 234: note = a, c, g, u, unknown, other, or absent
  misc_difference 235: note = a, c, g, u, unknown, other, or absent
  misc_difference 236: note = a, c, g, u, unknown, other, or absent
  misc_difference 237: note = a, c, g, u, unknown, other, or absent
  misc_difference 238: note = a, c, g, u, unknown, other, or absent
  misc_difference 239: note = a, c, g, u, unknown, other, or absent
  misc_difference 240: note = a, c, g, u, unknown, other, or absent
  misc_difference 241: note = a, c, g, u, unknown, other, or absent
  misc_difference 242: note = a, c, g, u, unknown, other, or absent
  misc_difference 243: note = a, c, g, u, unknown, other, or absent
  misc_difference 244: note = a, c, g, u, unknown, other, or absent
  misc_difference 245: note = a, c, g, u, unknown, other, or absent
  misc_difference 246: note = a, c, g, u, unknown, other, or absent
  misc_difference 247: note = a, c, g, u, unknown, other, or absent
  misc_difference 248: note = a, c, g, u, unknown, other, or absent
  misc_difference 249: note = a, c, g, u, unknown, other, or absent
  misc_difference 250: note = a, c, g, u, unknown, other, or absent
  misc_difference 251: note = a, c, g, u, unknown, other, or absent
  misc_difference 252: note = a, c, g, u, unknown, other, or absent
  misc_difference 253: note = a, c, g, u, unknown, other, or absent
  misc_difference 254: note = a, c, g, u, unknown, other, or absent
  misc_difference 255: note = a, c, g, u, unknown, other, or absent
  misc_difference 256: note = a, c, g, u, unknown, other, or absent
  misc_difference 257: note = a, c, g, u, unknown, other, or absent
  misc_difference 258: note = a, c, g, u, unknown, other, or absent
  misc_difference 259: note = a, c, g, u, unknown, other, or absent
  misc_difference 260: note = a, c, g, u, unknown, other, or absent
  misc_difference 261: note = a, c, g, u, unknown, other, or absent
  misc_difference 262: note = a, c, g, u, unknown, other, or absent
  misc_difference 263: note = a, c, g, u, unknown, other, or absent
  misc_difference 264: note = a, c, g, u, unknown, other, or absent
  misc_difference 265: note = a, c, g, u, unknown, other, or absent
  misc_difference 266: note = a, c, g, u, unknown, other, or absent
  misc_difference 267: note = a, c, g, u, unknown, other, or absent
  misc_difference 268: note = a, c, g, u, unknown, other, or absent
  misc_difference 269: note = a, c, g, u, unknown, other, or absent
  misc_difference 270: note = a, c, g, u, unknown, other, or absent
  misc_difference 271: note = a, c, g, u, unknown, other, or absent
  misc_difference 272: note = a, c, g, u, unknown, other, or absent
  misc_difference 273: note = a, c, g, u, unknown, other, or absent
  misc_difference 274: note = a, c, g, u, unknown, other, or absent
  misc_difference 275: note = a, c, g, u, unknown, other, or absent
  misc_difference 276: note = a, c, g, u, unknown, other, or absent
  misc_difference 277: note = a, c, g, u, unknown, other, or absent
  misc_difference 278: note = a, c, g, u, unknown, other, or absent
  misc_difference 279: note = a, c, g, u, unknown, other, or absent
  misc_difference 280: note = a, c, g, u, unknown, other, or absent
  misc_difference 281: note = a, c, g, u, unknown, other, or absent
  misc_difference 282: note = a, c, g, u, unknown, other, or absent
  misc_difference 283: note = a, c, g, u, unknown, other, or absent
  misc_difference 284: note = a, c, g, u, unknown, other, or absent
  misc_difference 285: note = a, c, g, u, unknown, other, or absent
  misc_difference 286: note = a, c, g, u, unknown, other, or absent
  misc_difference 287: note = a, c, g, u, unknown, other, or absent
  misc_difference 288: note = a, c, g, u, unknown, other, or absent
  misc_difference 289: note = a, c, g, u, unknown, other, or absent
  misc_difference 290: note = a, c, g, u, unknown, other, or absent
  misc_difference 291: note = a, c, g, u, unknown, other, or absent
  misc_difference 292: note = a, c, g, u, unknown, other, or absent
  misc_difference 293: note = a, c, g, u, unknown, other, or absent
  misc_difference 294: note = a, c, g, u, unknown, other, or absent
  misc_difference 295: note = a, c, g, u, unknown, other, or absent
  misc_difference 296: note = a, c, g, u, unknown, other, or absent
  misc_difference 297: note = a, c, g, u, unknown, other, or absent
  misc_difference 298: note = a, c, g, u, unknown, other, or absent
  misc_difference 299: note = a, c, g, u, unknown, other, or absent
  misc_difference 300: note = a, c, g, u, unknown, other, or absent
  misc_difference 301: note = a, c, g, u, unknown, other, or absent
  misc_difference 302: note = a, c, g, u, unknown, other, or absent
  misc_difference 303: note = a, c, g, u, unknown, other, or absent
  misc_difference 304: note = a, c, g, u, unknown, other, or absent
  misc_difference 305: note = a, c, g, u, unknown, other, or absent
  misc_difference 306: note = a, c, g, u, unknown, other, or absent
  misc_difference 307: note = a, c, g, u, unknown, other, or absent
  misc_difference 308: note = a, c, g, u, unknown, other, or absent
  misc_difference 309: note = a, c, g, u, unknown, other, or absent
  misc_difference 310: note = a, c, g, u, unknown, other, or absent
  misc_difference 311: note = a, c, g, u, unknown, other, or absent
  misc_difference 312: note = a, c, g, u, unknown, other, or absent
  misc_difference 313: note = a, c, g, u, unknown, other, or absent
  misc_difference 314: note = a, c, g, u, unknown, other, or absent
  misc_difference 315: note = May be absent
  misc_difference 316: note = May be absent
  misc_difference 317: note = May be absent
  misc_difference 318: note = May be absent
  misc_difference 319: note = May be absent
  misc_difference 320: note = May be absent
  misc_difference 321: note = May be absent
  misc_difference 322: note = May be absent
  misc_difference 323: note = May be absent
  misc_difference 324: note = May be absent
  misc_difference 325: note = May be absent
  misc_difference 326: note = May be absent
  misc_difference 327: note = May be absent
  misc_difference 328: note = May be absent
  misc_difference 329: note = May be absent
  misc_difference 330: note = May be absent
  misc_difference 331: note = May be absent
  misc_difference 332: note = May be absent
  misc_difference 333: note = May be absent
  misc_difference 334: note = May be absent
  misc_difference 335: note = May be absent
  misc_difference 336: note = May be absent
  misc_difference 337: note = May be absent
  misc_difference 338: note = May be absent
  misc_difference 339: note = May be absent
  misc_difference 44..315: note = This region may encompass 1-271 nucleotides
gcmrtgayygtatagtggttagyactctgygytgtggccrcagnnnnnnnnnnnnnnnnnnnnnnnnnnnnnnnnnnnnnnnnnnnnnnnnnnnnnnnnnnnnnnnnnnnnnnnnnnnnnnnnnnnnnnnnnnnnnnnnnnnnnnnnnnnnnnnnnnnnnnnnnnnnnnnnnnnnnnnnnnnnnnnnnnnnnnnnnnnnnnnnnnnnnnnnnnnnnnnnnnnnnnnnnnnnnnnnnnnnnnnnnnnnnnnnnnnnnnnnnnnnnnnnnnnnnnnnnnnnnnnnnnnnnnnnnnnnnnnnnnnnnnnnnnnnnnncwyggttcraatcygagtcaygrca

SEQ ID NO: 589 - RNA, 342 nt, synthetic construct
  source 1..342: mol_type = other RNA
  misc_difference 1: note = a, c, g, u, unknown, other, or absent
  misc_difference 2: note = May be absent
  misc_difference 3: note = May be absent
  misc_difference 4: note = a, c, g, u, unknown, other, or absent
  misc_difference 5: note = a, c, g, u, unknown, other, or absent
  misc_difference 6: note = May be absent
  misc_difference 7: note = a, c, g, u, unknown, other, or absent
  misc_difference 8: note = May be absent
  misc_difference 9: note = May be absent
  misc_difference 10: note = May be absent
  misc_difference 11: note = May be absent
  misc_difference 12: note = May be absent
  misc_difference 13: note = May be absent
  misc_difference 14: note = May be absent
  misc_difference 15: note = May be absent
  misc_difference 16: note = May be absent
  misc_difference 17: note = a, c, g, u, unknown, other, or absent
  misc_difference 18: note = May be absent
  misc_difference 19: note = May be absent
  misc_difference 20: note = May be absent
  misc_difference 21: note = May be absent
  misc_difference 22: note = May be absent
  misc_difference 23: note = May be absent
  misc_difference 24: note = May be absent
  misc_difference 25: note = May be absent
  misc_difference 26: note = May be absent
  misc_difference 27: note = May be absent
  misc_difference 28: note = May be absent
  misc_difference 29: note = May be absent
  misc_difference 30: note = May be absent
  misc_difference 31: note = a, c, g, u, unknown, other, or absent
  misc_difference 32: note = a, c, g, u, unknown, other, or absent
  misc_difference 33: note = May be absent
  misc_difference 34: note = a, c, g, u, unknown, other, or absent
  misc_difference 35: note = May be absent
  misc_difference 36: note = May be absent
  misc_difference 37: note = a, c, g, u, unknown, other, or absent
  misc_difference 38: note = May be absent
  misc_difference 39: note = May be absent
  misc_difference 40: note = May be absent
  misc_difference 41: note = May be absent
  misc_difference 42: note = a, c, g, u, unknown, other, or absent
  misc_difference 43: note = a, c, g, u, unknown, other, or absent
  misc_difference 44: note = a, c, g, u, unknown, other, or absent
  misc_difference 45: note = a, c, g, u, unknown, other, or absent
  misc_difference 46: note = a, c, g, u, unknown, other, or absent
  misc_difference 47: note = a, c, g, u, unknown, other, or absent
  misc_difference 48: note = a, c, g, u, unknown, other, or absent
  misc_difference 49: note = a, c, g, u, unknown, other, or absent
  misc_difference 50: note = a, c, g, u, unknown, other, or absent
  misc_difference 51: note = a, c, g, u, unknown, other, or absent
  misc_difference 52: note = a, c, g, u, unknown, other, or absent
  misc_difference 53: note = a, c, g, u, unknown, other, or absent
  misc_difference 54: note = a, c, g, u, unknown, other, or absent
  misc_difference 55: note = a, c, g, u, unknown, other, or absent
  misc_difference 56: note = a, c, g, u, unknown, other, or absent
  misc_difference 57: note = a, c, g, u, unknown, other, or absent
  misc_difference 58: note = a, c, g, u, unknown, other, or absent
  misc_difference 59: note = a, c, g, u, unknown, other, or absent
  misc_difference 60: note = a, c, g, u, unknown, other, or absent
  misc_difference 61: note = a, c, g, u, unknown, other, or absent
  misc_difference 62: note = a, c, g, u, unknown, other, or absent
  misc_difference 63: note = a, c, g, u, unknown, other, or absent
  misc_difference 64: note = a, c, g, u, unknown, other, or absent
  misc_difference 65: note = a, c, g, u, unknown, other, or absent
  misc_difference 66: note = a, c, g, u, unknown, other, or absent
  misc_difference 67: note = a, c, g, u, unknown, other, or absent
  misc_difference 68: note = a, c, g, u, unknown, other, or absent
  misc_difference 69: note = a, c, g, u, unknown, other, or absent
  misc_difference 70: note = a, c, g, u, unknown, other, or absent
  misc_difference 71: note = a, c, g, u, unknown, other, or absent
  misc_difference 72: note = a, c, g, u, unknown, other, or absent
  misc_difference 73: note = a, c, g, u, unknown, other, or absent
  misc_difference 74: note = a, c, g, u, unknown, other, or absent
  misc_difference 75: note = a, c, g, u, unknown, other, or absent
  misc_difference 76: note = a, c, g, u, unknown, other, or absent
  misc_difference 77: note = a, c, g, u, unknown, other, or absent
  misc_difference 78: note = a, c, g, u, unknown, other, or absent
  misc_difference 79: note = a, c, g, u, unknown, other, or absent
  misc_difference 80: note = a, c, g, u, unknown, other, or absent
  misc_difference 81: note = a, c, g, u, unknown, other, or absent
  misc_difference 82: note = a, c, g, u, unknown, other, or absent
  misc_difference 83: note = a, c, g, u, unknown, other, or absent
  misc_difference 84: note = a, c, g, u, unknown, other, or absent
  misc_difference 85: note = a, c, g, u, unknown, other, or absent
  misc_difference 86: note = a, c, g, u, unknown, other, or absent
  misc_difference 87: note = a, c, g, u, unknown, other, or absent
  misc_difference 88: note = a, c, g, u, unknown, other, or absent
  misc_difference 89: note = a, c, g, u, unknown, other, or absent
  misc_difference 90: note = a, c, g, u, unknown, other, or absent
  misc_difference 91: note = a, c, g, u, unknown, other, or absent
  misc_difference 92: note = a, c, g, u, unknown, other, or absent
  misc_difference 93: note = a, c, g, u, unknown, other, or absent
  misc_difference 94: note = a, c, g, u, unknown, other, or absent
  misc_difference 95: note = a, c, g, u, unknown, other, or absent
  misc_difference 96: note = a, c, g, u, unknown, other, or absent
  misc_difference 97: note = a, c, g, u, unknown, other, or absent
  misc_difference 98: note = a, c, g, u, unknown, other, or absent
  misc_difference 99: note = a, c, g, u, unknown, other, or absent
  misc_difference 100: note = a, c, g, u, unknown, other, or absent
  misc_difference 101: note = a, c, g, u, unknown, other, or absent
  misc_difference 102: note = a, c, g, u, unknown, other, or absent
  misc_difference 103: note = a, c, g, u, unknown, other, or absent
  misc_difference 104: note = a, c, g, u, unknown, other, or absent
  misc_difference 105: note = a, c, g, u, unknown, other, or absent
  misc_difference 106: note = a, c, g, u, unknown, other, or absent
  misc_difference 107: note = a, c, g, u, unknown, other, or absent
  misc_difference 108: note = a, c, g, u, unknown, other, or absent
  misc_difference 109: note = a, c, g, u, unknown, other, or absent
  misc_difference 110: note = a, c, g, u, unknown, other, or absent
  misc_difference 111: note = a, c, g, u, unknown, other, or absent
  misc_difference 112: note = a, c, g, u, unknown, other, or absent
  misc_difference 113: note = a, c, g, u, unknown, other, or absent
  misc_difference 114: note = a, c, g, u, unknown, other, or absent
  misc_difference 115: note = a, c, g, u, unknown, other, or absent
  misc_difference 116: note = a, c, g, u, unknown, other, or absent
  misc_difference 117: note = a, c, g, u, unknown, other, or absent
  misc_difference 118: note = a, c, g, u, unknown, other, or absent
  misc_difference 119: note = a, c, g, u, unknown, other, or absent
  misc_difference 120: note = a, c, g, u, unknown, other, or absent
  misc_difference 121: note = a, c, g, u, unknown, other, or absent
  misc_difference 122: note = a, c, g, u, unknown, other, or absent
  misc_difference 123: note = a, c, g, u, unknown, other, or absent
  misc_difference 124: note = a, c, g, u, unknown, other, or absent
  misc_difference 125: note = a, c, g, u, unknown, other, or absent
  misc_difference 126: note = a, c, g, u, unknown, other, or absent
  misc_difference 127: note = a, c, g, u, unknown, other, or absent
  misc_difference 128: note = a, c, g, u, unknown, other, or absent
  misc_difference 129: note = a, c, g, u, unknown, other, or absent
  misc_difference 130: note = a, c, g, u, unknown, other, or absent
  misc_difference 131: note = a, c, g, u, unknown, other, or absent
  misc_difference 132: note = a, c, g, u, unknown, other, or absent
  misc_difference 133: note = a, c, g, u, unknown, other, or absent
  misc_difference 134: note = a, c, g, u, unknown, other, or absent
  misc_difference 135: note = a, c, g, u, unknown, other, or absent
  misc_difference 136: note = a, c, g, u, unknown, other, or absent
  misc_difference 137: note = a, c, g, u, unknown, other, or absent
  misc_difference 138: note = a, c, g, u, unknown, other, or absent
  misc_difference 139: note = a, c, g, u, unknown, other, or absent
  misc_difference 140: note = a, c, g, u, unknown, other, or absent
  misc_difference 141: note = a, c, g, u, unknown, other, or absent
  misc_difference 142: note = a, c, g, u, unknown, other, or absent
  misc_difference 143: note = a, c, g, u, unknown, other, or absent
  misc_difference 144: note = a, c, g, u, unknown, other, or absent
  misc_difference 145: note = a, c, g, u, unknown, other, or absent
  misc_difference 146: note = a, c, g, u, unknown, other, or absent
  misc_difference 147: note = a, c, g, u, unknown, other, or absent
  misc_difference 148: note = a, c, g, u, unknown, other, or absent
  misc_difference 149: note = a, c, g, u, unknown, other, or absent
  misc_difference 150: note = a, c, g, u, unknown, other, or absent
  misc_difference 151: note = a, c, g, u, unknown, other, or absent
  misc_difference 152: note = a, c, g, u, unknown, other, or absent
  misc_difference 153: note = a, c, g, u, unknown, other, or absent
  misc_difference 154: note = a, c, g, u, unknown, other, or absent
  misc_difference 155: note = a, c, g, u, unknown, other, or absent
  misc_difference 156: note = a, c, g, u, unknown, other, or absent
  misc_difference 157: note = a, c, g, u, unknown, other, or absent
  misc_difference 158: note = a, c, g, u, unknown, other, or absent
  misc_difference 159: note = a, c, g, u, unknown, other, or absent
  misc_difference 160: note = a, c, g, u, unknown, other, or absent
  misc_difference 161: note = a, c, g, u, unknown, other, or absent
  misc_difference 162: note = a, c, g, u, unknown, other, or absent
  misc_difference 163: note = a, c, g, u, unknown, other, or absent
  misc_difference 164: note = a, c, g, u, unknown, other, or absent
  misc_difference 165: note = a, c, g, u, unknown, other, or absent
  misc_difference 166: note = a, c, g, u, unknown, other, or absent
  misc_difference 167: note = a, c, g, u, unknown, other, or absent
  misc_difference 168: note = a, c, g, u, unknown, other, or absent
  misc_difference 169: note = a, c, g, u, unknown, other, or absent
  misc_difference 170: note = a, c, g, u, unknown, other, or absent
  misc_difference 171: note = a, c, g, u, unknown, other, or absent
  misc_difference 172: note = a, c, g, u, unknown, other, or absent
  misc_difference 173: note = a, c, g, u, unknown, other, or absent
  misc_difference 174: note = a, c, g, u, unknown, other, or absent
  misc_difference 175: note = a, c, g, u, unknown, other, or absent
  misc_difference 176: note = a, c, g, u, unknown, other, or absent
  misc_difference 177: note = a, c, g, u, unknown, other, or absent
  misc_difference 178: note = a, c, g, u, unknown, other, or absent
  misc_difference 179: note = a, c, g, u, unknown, other, or absent
  misc_difference 180: note = a, c, g, u, unknown, other, or absent
  misc_difference 181: note = a, c, g, u, unknown, other, or absent
  misc_difference 182: note = a, c, g, u, unknown, other, or absent
  misc_difference 183: note = a, c, g, u, unknown, other, or absent
  misc_difference 184: note = a, c, g, u, unknown, other, or absent
  misc_difference 185: note = a, c, g, u, unknown, other, or absent
  misc_difference 186: note = a, c, g, u, unknown, other, or absent
  misc_difference 187: note = a, c, g, u, unknown, other, or absent
  misc_difference 188: note = a, c, g, u, unknown, other, or absent
  misc_difference 189: note = a, c, g, u, unknown, other, or absent
  misc_difference 190: note = a, c, g, u, unknown, other, or absent
  misc_difference 191: note = a, c, g, u, unknown, other, or absent
  misc_difference 192: note = a, c, g, u, unknown, other, or absent
  misc_difference 193: note = a, c, g, u, unknown, other, or absent
  misc_difference 194: note = a, c, g, u, unknown, other, or absent
  misc_difference 195: note = a, c, g, u, unknown, other, or absent
  misc_difference 196: note = a, c, g, u, unknown, other, or absent
  misc_difference 197: note = a, c, g, u, unknown, other, or absent
  misc_difference 198: note = a, c, g, u, unknown, other, or absent
  misc_difference 199: note = a, c, g, u, unknown, other, or absent
  misc_difference 200: note = a, c, g, u, unknown, other, or absent
  misc_difference 201: note = a, c, g, u, unknown, other, or absent
  misc_difference 202: note = a, c, g, u, unknown, other, or absent
  misc_difference 203: note = a, c, g, u, unknown, other, or absent
  misc_difference 204: note = a, c, g, u, unknown, other, or absent
  misc_difference 205: note = a, c, g, u, unknown, other, or absent
  misc_difference 206: note = a, c, g, u, unknown, other, or absent
  misc_difference 207: note = a, c, g, u, unknown, other, or absent
  misc_difference 208: note = a, c, g, u, unknown, other, or absent
  misc_difference 209: note = a, c, g, u, unknown, other, or absent
  misc_difference 210: note = a, c, g, u, unknown, other, or absent
  misc_difference 211: note = a, c, g, u, unknown, other, or absent
  misc_difference 212: note = a, c, g, u, unknown, other, or absent
  misc_difference 213: note = a, c, g, u, unknown, other, or absent
  misc_difference 214: note = a, c, g, u, unknown, other, or absent
  misc_difference 215: note = a, c, g, u, unknown, other, or absent
  misc_difference 216: note = a, c, g, u, unknown, other, or absent
  misc_difference 217: note = a, c, g, u, unknown, other, or absent
  misc_difference 218: note = a, c, g, u, unknown, other, or absent
  misc_difference 219: note = a, c, g, u, unknown, other, or absent
  misc_difference 220: note = a, c, g, u, unknown, other, or absent
  misc_difference 221: note = a, c, g, u, unknown, other, or absent
  misc_difference 222: note = a, c, g, u, unknown, other, or absent
  misc_difference 223: note = a, c, g, u, unknown, other, or absent
  misc_difference 224: note = a, c, g, u, unknown, other, or absent
  misc_difference 225: note = a, c, g, u, unknown, other, or absent
  misc_difference 226: note = a, c, g, u, unknown, other, or absent
  misc_difference 227: note = a, c, g, u, unknown, other, or absent
  misc_difference 228: note = a, c, g, u, unknown, other, or absent
  misc_difference 229: note = a, c, g, u, unknown, other, or absent
  misc_difference 230: note = a, c, g, u, unknown, other, or absent
  misc_difference 231: note = a, c, g, u, unknown, other, or absent
  misc_difference 232: note = a, c, g, u, unknown, other, or absent
  misc_difference 233: note = a, c, g, u, unknown, other, or absent
  misc_difference 234: note = a, c, g, u, unknown, other, or absent
  misc_difference 235: note = a, c, g, u, unknown, other, or absent
  misc_difference 236: note = a, c, g, u, unknown, other, or absent
  misc_difference 237: note = a, c, g, u, unknown, other, or absent
  misc_difference 238: note = a, c, g, u, unknown, other, or absent
  misc_difference 239: note = a, c, g, u, unknown, other, or absent
  misc_difference 240: note = a, c, g, u, unknown, other, or absent
  misc_difference 241: note = a, c, g, u, unknown, other, or absent
  misc_difference 242: note = a, c, g, u, unknown, other, or absent
  misc_difference 243: note = a, c, g, u, unknown, other, or absent
  misc_difference 244: note = a, c, g, u, unknown, other, or absent
  misc_difference 245: note = a, c, g, u, unknown, other, or absent
  misc_difference 246: note = a, c, g, u, unknown, other, or absent
  misc_difference 247: note = a, c, g, u, unknown, other, or absent
  misc_difference 248: note = a, c, g, u, unknown, other, or absent
  misc_difference 249: note = a, c, g, u, unknown, other, or absent
  misc_difference 250: note = a, c, g, u, unknown, other, or absent
  misc_difference 251: note = a, c, g, u, unknown, other, or absent
  misc_difference 252: note = a, c, g, u, unknown, other, or absent
  misc_difference 253: note = a, c, g, u, unknown, other, or absent
  misc_difference 254: note = a, c, g, u, unknown, other, or absent
  misc_difference 255: note = a, c, g, u, unknown, other, or absent
  misc_difference 256: note = a, c, g, u, unknown, other, or absent
  misc_difference 257: note = a, c, g, u, unknown, other, or absent
  misc_difference 258: note = a, c, g, u, unknown, other, or absent
  misc_difference 259: note = a, c, g, u, unknown, other, or absent
  misc_difference 260: note = a, c, g, u, unknown, other, or absent
  misc_difference 261: note = a, c, g, u, unknown, other, or absent
  misc_difference 262: note = a, c, g, u, unknown, other, or absent
  misc_difference 263: note = a, c, g, u, unknown, other, or absent
  misc_difference 264: note = a, c, g, u, unknown, other, or absent
  misc_difference 265: note = a, c, g, u, unknown, other, or absent
  misc_difference 266: note = a, c, g, u, unknown, other, or absent
  misc_difference 267: note = a, c, g, u, unknown, other, or absent
  misc_difference 268: note = a, c, g, u, unknown, other, or absent
  misc_difference 269: note = a, c, g, u, unknown, other, or absent
  misc_difference 270: note = a, c, g, u, unknown, other, or absent
  misc_difference 271: note = a, c, g, u, unknown, other, or absent
  misc_difference 272: note = a, c, g, u, unknown, other, or absent
  misc_difference 273: note = a, c, g, u, unknown, other, or absent
  misc_difference 274: note = a, c, g, u, unknown, other, or absent
  misc_difference 275: note = a, c, g, u, unknown, other, or absent
  misc_difference 276: note = a, c, g, u, unknown, other, or absent
  misc_difference 277: note = a, c, g, u, unknown, other, or absent
  misc_difference 278: note = a, c, g, u, unknown, other, or absent
  misc_difference 279: note = a, c, g, u, unknown, other, or absent
  misc_difference 280: note = a, c, g, u, unknown, other, or absent
  misc_difference 281: note = a, c, g, u, unknown, other, or absent
  misc_difference 282: note = a, c, g, u, unknown, other, or absent
  misc_difference 283: note = a, c, g, u, unknown, other, or absent
  misc_difference 284: note = a, c, g, u, unknown, other, or absent
  misc_difference 285: note = a, c, g, u, unknown, other, or absent
  misc_difference 286: note = a, c, g, u, unknown, other, or absent
  misc_difference 287: note = a, c, g, u, unknown, other, or absent
  misc_difference 288: note = a, c, g, u, unknown, other, or absent
  misc_difference 289: note = a, c, g, u, unknown, other, or absent
  misc_difference 290: note = a, c, g, u, unknown, other, or absent
  misc_difference 291: note = a, c, g, u, unknown, other, or absent
  misc_difference 292: note = a, c, g, u, unknown, other, or absent
  misc_difference 293: note = a, c, g, u, unknown, other, or absent
  misc_difference 294: note = a, c, g, u, unknown, other, or absent
  misc_difference 295: note = a, c, g, u, unknown, other, or absent
  misc_difference 296: note = a, c, g, u, unknown, other, or absent
  misc_difference 297: note = a, c, g, u, unknown, other, or absent
  misc_difference 298: note = a, c, g, u, unknown, other, or absent
  misc_difference 299: note = a, c, g, u, unknown, other, or absent
  misc_difference 300: note = a, c, g, u, unknown, other, or absent
  misc_difference 301: note = a, c, g, u, unknown, other, or absent
  misc_difference 302: note = a, c, g, u, unknown, other, or absent
  misc_difference 303: note = a, c, g, u, unknown, other, or absent
  misc_difference 304: note = a, c, g, u, unknown, other, or absent
  misc_difference 305: note = a, c, g, u, unknown, other, or absent
  misc_difference 306: note = a, c, g, u, unknown, other, or absent
  misc_difference 307: note = a, c, g, u, unknown, other, or absent
  misc_difference 308: note = a, c, g, u, unknown, other, or absent
  misc_difference 309: note = a, c, g, u, unknown, other, or absent
  misc_difference 310: note = a, c, g, u, unknown, other, or absent
  misc_difference 311: note = a, c, g, u, unknown, other, or absent
  misc_difference 312: note = a, c, g, u, unknown, other, or absent
  misc_difference 313: note = a, c, g, u, unknown, other, or absent
  misc_difference 314: note = a, c, g, u, unknown, other, or absent
  misc_difference 315: note = a, c, g, u, unknown, other, or absent
  misc_difference 316: note = a, c, g, u, unknown, other, or absent
  misc_difference 317: note = a, c, g, u, unknown, other, or absent
  misc_difference 318: note = a, c, g, u, unknown, other, or absent
  misc_difference 319: note = a, c, g, u, unknown, other, or absent
  misc_difference 320: note = a, c, g, u, unknown, other, or absent
  misc_difference 321: note = May be absent
  misc_difference 322: note = May be absent
  misc_difference 323: note = May be absent
  misc_difference 324: note = May be absent
  misc_difference 325: note = May be absent
  misc_difference 326: note = May be absent
  misc_difference 327: note = May be absent
  misc_difference 328: note = a, c, g, u, unknown, other, or absent
  misc_difference 329: note = a, c, g, u, unknown, other, or absent
  misc_difference 330: note = May be absent
  misc_difference 331: note = May be absent
  misc_difference 332: note = a, c, g, u, unknown, other, or absent
  misc_difference 333: note = a, c, g, u, unknown, other, or absent
  misc_difference 334: note = a, c, g, u, unknown, other, or absent
  misc_difference 335: note = May be absent
  misc_difference 336: note = a, c, g, u, unknown, other, or absent
  misc_difference 337: note = a, c, g, u, unknown, other, or absent
  misc_difference 338: note = a, c, g, u, unknown, other, or absent
  misc_difference 339: note = a, c, g, u, unknown, other, or absent
  misc_difference 340: note = May be absent
  misc_difference 341: note = May be absent
  misc_difference 342: note = May be absent
  misc_difference 42..313: note = This region may encompass 1-271 nucleotides
nvsnnbndtrgybyrrnywggbhrdvrydbnnbnytnatrannnnnnnnnnnnnnnnnnnnnnnnnnnnnnnnnnnnnnnnnnnnnnnnnnnnnnnnnnnnnnnnnnnnnnnnnnnnnnnnnnnnnnnnnnnnnnnnnnnnnnnnnnnnnnnnnnnnnnnnnnnnnnnnnnnnnnnnnnnnnnnnnnnnnnnnnnnnnnnnnnnnnnnnnnnnnnnnnnnnnnnnnnnnnnnnnnnnnnnnnnnnnnnnnnnnnnnnnnnnnnnnnnnnnnnnnnnnnnnnnnnnnnnnnnnnnnnnnnnnnnnnnnnnnnnnnnnnnnndsywydannchnnnhnnnnsba

SEQ ID NO: 590 - RNA, 340 nt, synthetic construct
  source 1..340: mol_type = other RNA
  misc_difference 1: note = May be absent
  misc_difference 2: note = May be absent
  misc_difference 3: note = May be absent
  misc_difference 4: note = May be absent
  misc_difference 5: note = May be absent
  misc_difference 6: note = May be absent
  misc_difference 7: note = May be absent
  misc_difference 8: note = May be absent
  misc_difference 9: note = May be absent
  misc_difference 10: note = May be absent
  misc_difference 11: note = May be absent
  misc_difference 12: note = May be absent
  misc_difference 13: note = May be absent
  misc_difference 14: note = May be absent
  misc_difference 15: note = May be absent
  misc_difference 16: note = May be absent
  misc_difference 17: note = May be absent
  misc_difference 18: note = May be absent
  misc_difference 19: note = May be absent
  misc_difference 20: note = May be absent
  misc_difference 21: note = May be absent
  misc_difference 22: note = May be absent
  misc_difference 23: note = May be absent
  misc_difference 24: note = May be absent
  misc_difference 25: note = May be absent
  misc_difference 26: note = May be absent
  misc_difference 27: note = May be absent
  misc_difference 28: note = May be absent
  misc_difference 29: note = May be absent
  misc_difference 30: note = May be absent
  misc_difference 31: note = May be absent
  misc_difference 32: note = May be absent
  misc_difference 33: note = May be absent
  misc_difference 34: note = May be absent
  misc_difference 35: note = May be absent
  misc_difference 36: note = May be absent
  misc_difference 37: note = May be absent
  misc_difference 38: note = May be absent
  misc_difference 39: note = May be absent
  misc_difference 40: note = May be absent
  misc_difference 41: note = May be absent
  misc_difference 42: note = May be absent
  misc_difference 43: note = May be absent
  misc_difference 44: note = May be absent
  misc_difference 45: note = a, c, g, u, unknown, other, or absent
  misc_difference 46: note = a, c, g, u, unknown, other, or absent
  misc_difference 47: note = a, c, g, u, unknown, other, or absent
  misc_difference 48: note = a, c, g, u, unknown, other, or absent
  misc_difference 49: note = a, c, g, u, unknown, other, or absent
  misc_difference 50: note = a, c, g, u, unknown, other, or absent
  misc_difference 51: note = a, c, g, u, unknown, other, or absent
  misc_difference 52: note = a, c, g, u, unknown, other, or absent
  misc_difference 53: note = a, c, g, u, unknown, other, or absent
  misc_difference 54: note = a, c, g, u, unknown, other, or absent
  misc_difference 55: note = a, c, g, u, unknown, other, or absent
  misc_difference 56: note = a, c, g, u, unknown, other, or absent
  misc_difference 57: note = a, c, g, u, unknown, other, or absent
  misc_difference 58: note = a, c, g, u, unknown, other, or absent
  misc_difference 59: note = a, c, g, u, unknown, other, or absent
  misc_difference 60: note = a, c, g, u, unknown, other, or absent
  misc_difference 61: note = a, c, g, u, unknown, other, or absent
  misc_difference 62: note = a, c, g, u, unknown, other, or absent
  misc_difference 63: note = a, c, g, u, unknown, other, or absent
  misc_difference 64: note = a, c, g, u, unknown, other, or absent
  misc_difference 65: note = a, c, g, u, unknown, other, or absent
  misc_difference 66: note = a, c, g, u, unknown, other, or absent
  misc_difference 67: note = a, c, g, u, unknown, other, or absent
  misc_difference 68: note = a, c, g, u, unknown, other, or absent
  misc_difference 69: note = a, c, g, u, unknown, other, or absent
  misc_difference 70: note = a, c, g, u, unknown, other, or absent
  misc_difference 71: note = a, c, g, u, unknown, other, or absent
  misc_difference 72: note = a, c, g, u, unknown, other, or absent
  misc_difference 73: note = a, c, g, u, unknown, other, or absent
  misc_difference 74: note = a, c, g, u, unknown, other, or absent
  misc_difference 75: note = a, c, g, u, unknown, other, or absent
  misc_difference 76: note = a, c, g, u, unknown, other, or absent
  misc_difference 77: note = a, c, g, u, unknown, other, or absent
  misc_difference 78: note = a, c, g, u, unknown, other, or absent
  misc_difference 79: note = a, c, g, u, unknown, other, or absent
  misc_difference 80: note = a, c, g, u, unknown, other, or absent
  misc_difference 81: note = a, c, g, u, unknown, other, or absent
  misc_difference 82: note = a, c, g, u, unknown, other, or absent
  misc_difference 83: note = a, c, g, u, unknown, other, or absent
  misc_difference 84: note = a, c, g, u, unknown, other, or absent
  misc_difference 85: note = a, c, g, u, unknown, other, or absent
  misc_difference 86: note = a, c, g, u, unknown, other, or absent
  misc_difference 87: note = a, c, g, u, unknown, other, or absent
  misc_difference 88: note = a, c, g, u, unknown, other, or absent
  misc_difference 89: note = a, c, g, u, unknown, other, or absent
  misc_difference 90: note = a, c, g, u, unknown, other, or absent
  misc_difference 91: note = a, c, g, u, unknown, other, or absent
  misc_difference 92: note = a, c, g, u, unknown, other, or absent
  misc_difference 93: note = a, c, g, u, unknown, other, or absent
  misc_difference 94: note = a, c, g, u, unknown, other, or absent
  misc_difference 95: note = a, c, g, u, unknown, other, or absent
  misc_difference 96: note = a, c, g, u, unknown, other, or absent
  misc_difference 97: note = a, c, g, u, unknown, other, or absent
  misc_difference 98: note = a, c, g, u, unknown, other, or absent
  misc_difference 99: note = a, c, g, u, unknown, other, or absent
  misc_difference 100: note = a, c, g, u, unknown, other, or absent
  misc_difference 101: note = a, c, g, u, unknown, other, or absent
  misc_difference 102: note = a, c, g, u, unknown, other, or absent
  misc_difference 103: note = a, c, g, u, unknown, other, or absent
  misc_difference 104: note = a, c, g, u, unknown, other, or absent
  misc_difference 105: note = a, c, g, u, unknown, other, or absent
  misc_difference 106: note = a, c, g, u, unknown, other, or absent
  misc_difference 107: note = a, c, g, u, unknown, other, or absent
  misc_difference 108: note = a, c, g, u, unknown, other, or absent
  misc_difference 109: note = a, c, g, u, unknown, other, or absent
  misc_difference 110: note = a, c, g, u, unknown, other, or absent
  misc_difference 111: note = a, c, g, u, unknown, other, or absent
  misc_difference 112: note = a, c, g, u, unknown, other, or absent
  misc_difference 113: note = a, c, g, u, unknown, other, or absent
  misc_difference 114: note = a, c, g, u, unknown, other, or absent
  misc_difference 115: note = a, c, g, u, unknown, other, or absent
  misc_difference 116: note = a, c, g, u, unknown, other, or absent
  misc_difference 117: note = a, c, g, u, unknown, other, or absent
  misc_difference 118: note = a, c, g, u, unknown, other, or absent
  misc_difference 119: note = a, c, g, u, unknown, other, or absent
  misc_difference 120: note = a, c, g, u, unknown, other, or absent
  misc_difference 121: note = a, c, g, u, unknown, other, or absent
  misc_difference 122: note = a, c, g, u, unknown, other, or absent
  misc_difference 123: note = a, c, g, u, unknown, other, or absent
  misc_difference 124: note = a, c, g, u, unknown, other, or absent
  misc_difference 125: note = a, c, g, u, unknown, other, or absent
  misc_difference 126: note = a, c, g, u, unknown, other, or absent
  misc_difference 127: note = a, c, g, u, unknown, other, or absent
  misc_difference 128: note = a, c, g, u, unknown, other, or absent
  misc_difference 129: note = a, c, g, u, unknown, other, or absent
  misc_difference 130: note = a, c, g, u, unknown, other, or absent
  misc_difference 131: note = a, c, g, u, unknown, other, or absent
  misc_difference 132: note = a, c, g, u, unknown, other, or absent
  misc_difference 133: note = a, c, g, u, unknown, other, or absent
  misc_difference 134: note = a, c, g, u, unknown, other, or absent
  misc_difference 135: note = a, c, g, u, unknown, other, or absent
  misc_difference 136: note = a, c, g, u, unknown, other, or absent
  misc_difference 137: note = a, c, g, u, unknown, other, or absent
  misc_difference 138: note = a, c, g, u, unknown, other, or absent
  misc_difference 139: note = a, c, g, u, unknown, other, or absent
  misc_difference 140: note = a, c, g, u, unknown, other, or absent
  misc_difference 141: note = a, c, g, u, unknown, other, or absent
  misc_difference 142: note = a, c, g, u, unknown, other, or absent
  misc_difference 143: note = a, c, g, u, unknown, other, or absent
  misc_difference 144: note = a, c, g, u, unknown, other, or absent
  misc_difference 145: note = a, c, g, u, unknown, other, or absent
  misc_difference 146: note = a, c, g, u, unknown, other, or absent
  misc_difference 147: note = a, c, g, u, unknown, other, or absent
  misc_difference 148: note = a, c, g, u, unknown, other, or absent
  misc_difference 149: note = a, c, g, u, unknown, other, or absent
  misc_difference 150: note = a, c, g, u, unknown, other, or absent
  misc_difference 151: note = a, c, g, u, unknown, other, or absent
  misc_difference 152: note = a, c, g, u, unknown, other, or absent
  misc_difference 153: note = a, c, g, u, unknown, other, or absent
  misc_difference 154: note = a, c, g, u, unknown, other, or absent
  misc_difference 155: note = a, c, g, u, unknown, other, or absent
  misc_difference 156: note = a, c, g, u, unknown, other, or absent
  misc_difference 157: note = a, c, g, u, unknown, other, or absent
  misc_difference 158: note = a, c, g, u, unknown, other, or absent
  misc_difference 159: note = a, c, g, u, unknown, other, or absent
  misc_difference 160: note = a, c, g, u, unknown, other, or absent
  misc_difference 161: note = a, c, g, u, unknown, other, or absent
  misc_difference 162: note = a, c, g, u, unknown, other, or absent
  misc_difference 163: note = a, c, g, u, unknown, other, or absent
  misc_difference 164: note = a, c, g, u, unknown, other, or absent
  misc_difference 165: note = a, c, g, u, unknown, other, or absent
  misc_difference 166: note = a, c, g, u, unknown, other, or absent
  misc_difference 167: note = a, c, g, u, unknown, other, or absent
  misc_difference 168: note = a, c, g, u, unknown, other, or absent
  misc_difference 169: note = a, c, g, u, unknown, other, or absent
  misc_difference 170: note = a, c, g, u, unknown, other, or absent
  misc_difference 171: note = a, c, g, u, unknown, other, or absent
  misc_difference 172: note = a, c, g, u, unknown, other, or absent
  misc_difference 173: note = a, c, g, u, unknown, other, or absent
  misc_difference 174: note = a, c, g, u, unknown, other, or absent
  misc_difference 175: note = a, c, g, u, unknown, other, or absent
  misc_difference 176: note = a, c, g, u, unknown, other, or absent
  misc_difference 177: note = a, c, g, u, unknown, other, or absent
  misc_difference 178: note = a, c, g, u, unknown, other, or absent
  misc_difference 179: note = a, c, g, u, unknown, other, or absent
  misc_difference 180: note = a, c, g, u, unknown, other, or absent
  misc_difference 181: note = a, c, g, u, unknown, other, or absent
  misc_difference 182: note = a, c, g, u, unknown, other, or absent
  misc_difference 183: note = a, c, g, u, unknown, other, or absent
  misc_difference 184: note = a, c, g, u, unknown, other, or absent
  misc_difference 185: note = a, c, g, u, unknown, other, or absent
  misc_difference 186: note = a, c, g, u, unknown, other, or absent
  misc_difference 187: note = a, c, g, u, unknown, other, or absent
  misc_difference 188: note = a, c, g, u, unknown, other, or absent
  misc_difference 189: note = a, c, g, u, unknown, other, or absent
  misc_difference 190: note = a, c, g, u, unknown, other, or absent
  misc_difference 191: note = a, c, g, u, unknown, other, or absent
  misc_difference 192: note = a, c, g, u, unknown, other, or absent
  misc_difference 193: note = a, c, g, u, unknown, other, or absent
  misc_difference 194: note = a, c, g, u, unknown, other, or absent
  misc_difference 195: note = a, c, g, u, unknown, other, or absent
  misc_difference 196: note = a, c, g, u, unknown, other, or absent
  misc_difference 197: note = a, c, g, u, unknown, other, or absent
  misc_difference 198: note = a, c, g, u, unknown, other, or absent
  misc_difference 199: note = a, c, g, u, unknown, other, or absent
  misc_difference 200: note = a, c, g, u, unknown, other, or absent
  misc_difference 201: note = a, c, g, u, unknown, other, or absent
  misc_difference 202: note = a, c, g, u, unknown, other, or absent
  misc_difference 203: note = a, c, g, u, unknown, other, or absent
  misc_difference 204: note = a, c, g, u, unknown, other, or absent
  misc_difference 205: note = a, c, g, u, unknown, other, or absent
  misc_difference 206: note = a, c, g, u, unknown, other, or absent
  misc_difference 207: note = a, c, g, u, unknown, other, or absent
  misc_difference 208: note = a, c, g, u, unknown, other, or absent
  misc_difference 209: note = a, c, g, u, unknown, other, or absent
  misc_difference 210: note = a, c, g, u, unknown, other, or absent
  misc_difference 211: note = a, c, g, u, unknown, other, or absent
  misc_difference 212: note = a, c, g, u, unknown, other, or absent
  misc_difference 213: note = a, c, g, u, unknown, other, or absent
  misc_difference 214: note = a, c, g, u, unknown, other, or absent
  misc_difference 215: note = a, c, g, u, unknown, other, or absent
  misc_difference 216: note = a, c, g, u, unknown, other, or absent
  misc_difference 217: note = a, c, g, u, unknown, other, or absent
  misc_difference 218: note = a, c, g, u, unknown, other, or absent
  misc_difference 219: note = a, c, g, u, unknown, other, or absent
  misc_difference 220: note = a, c, g, u, unknown, other, or absent
  misc_difference 221: note = a, c, g, u, unknown, other, or absent
  misc_difference 222: note = a, c, g, u, unknown, other, or absent
  misc_difference 223: note = a, c, g, u, unknown, other, or absent
  misc_difference 224: note = a, c, g, u, unknown, other, or absent
  misc_difference 225: note = a, c, g, u, unknown, other, or absent
  misc_difference 226: note = a, c, g, u, unknown, other, or absent
  misc_difference 227: note = a, c, g, u, unknown, other, or absent
  misc_difference 228: note = a, c, g, u, unknown, other, or absent
  misc_difference 229: note = a, c, g, u, unknown, other, or absent
  misc_difference 230: note = a, c, g, u, unknown, other, or absent
  misc_difference 231: note = a, c, g, u, unknown, other, or absent
  misc_difference 232: note = a, c, g, u, unknown, other, or absent
  misc_difference 233: note = a, c, g, u, unknown, other, or absent
  misc_difference 234: note = a, c, g, u, unknown, other, or absent
  misc_difference 235: note = a, c, g, u, unknown, other, or absent
  misc_difference 236: note = a, c, g, u, unknown, other, or absent
  misc_difference 237: note = a, c, g, u, unknown, other, or absent
  misc_difference 238: note = a, c, g, u, unknown, other, or absent
  misc_difference 239: note = a, c, g, u, unknown, other, or absent
  misc_difference 240: note = a, c, g, u, unknown, other, or absent
  misc_difference 241: note = a, c, g, u, unknown, other, or absent
  misc_difference 242: note = a, c, g, u, unknown, other, or absent
  misc_difference 243: note = a, c, g, u, unknown, other, or absent
  misc_difference 244: note = a, c, g, u, unknown, other, or absent
  misc_difference 245: note = a, c, g, u, unknown, other, or absent
  misc_difference 246: note = a, c, g, u, unknown, other, or absent
  misc_difference 247: note = a, c, g, u, unknown, other, or absent
  misc_difference 248: note = a, c, g, u, unknown, other, or absent
  misc_difference 249: note = a, c, g, u, unknown, other, or absent
  misc_difference 250: note = a, c, g, u, unknown, other, or absent
  misc_difference 251: note = a, c, g, u, unknown, other, or absent
  misc_difference 252: note = a, c, g, u, unknown, other, or absent
  misc_difference 253: note = a, c, g, u, unknown, other, or absent
  misc_difference 254: note = a, c, g, u, unknown, other, or absent
  misc_difference 255: note = a, c, g, u, unknown, other, or absent
  misc_difference 256: note = a, c, g, u, unknown, other, or absent
  misc_difference 257: note = a, c, g, u, unknown, other, or absent
  misc_difference 258: note = a, c, g, u, unknown, other, or absent
  misc_difference 259: note = a, c, g, u, unknown, other, or absent
  misc_difference 260: note = a, c, g, u, unknown, other, or absent
  misc_difference 261: note = a, c, g, u, unknown, other, or absent
  misc_difference 262: note = a, c, g, u, unknown, other, or absent
  misc_difference 263: note = a, c, g, u, unknown, other, or absent
  misc_difference 264: note = a, c, g, u, unknown, other, or absent
  misc_difference 265: note = a, c, g, u, unknown, other, or absent
  misc_difference 266: note = a, c, g, u, unknown, other, or absent
  misc_difference 267: note = a, c, g, u, unknown, other, or absent
  misc_difference 268: note = a, c, g, u, unknown, other, or absent
  misc_difference 269: note = a, c, g, u, unknown, other, or absent
  misc_difference 270: note = a, c, g, u, unknown, other, or absent
  misc_difference 271: note = a, c, g, u, unknown, other, or absent
  misc_difference 272: note = a, c, g, u, unknown, other, or absent
  misc_difference 273: note = a, c, g, u, unknown, other, or absent
  misc_difference 274: note = a, c, g, u, unknown, other, or absent
  misc_difference 275: note = a, c, g, u, unknown, other, or absent
  misc_difference 276: note = a, c, g, u, unknown, other, or absent
  misc_difference 277: note = a, c, g, u, unknown, other, or absent
  misc_difference 278: note = a, c, g, u, unknown, other, or absent
  misc_difference 279: note = a, c, g, u, unknown, other, or absent
  misc_difference 280: note = a, c, g, u, unknown, other, or absent
  misc_difference 281: note = a, c, g, u, unknown, other, or absent
  misc_difference 282: note = a, c, g, u, unknown, other, or absent
  misc_difference 283: note = a, c, g, u, unknown, other, or absent
  misc_difference 284: note = a, c, g, u, unknown, other, or absent
  misc_difference 285: note = a, c, g, u, unknown, other, or absent
  misc_difference 286: note = a, c, g, u, unknown, other, or absent
  misc_difference 287: note = a, c, g, u, unknown, other, or absent
  misc_difference 288: note = a, c, g, u, unknown, other, or absent
  misc_difference 289: note = a, c, g, u, unknown, other, or absent
  misc_difference 290: note = a, c, g, u, unknown, other, or absent
  misc_difference 291: note = a, c, g, u, unknown, other, or absent
  misc_difference 292: note = a, c, g, u, unknown, other, or absent
  misc_difference 293: note = a, c, g, u, unknown, other, or absent
  misc_difference 294: note = a, c, g, u, unknown, other, or absent
  misc_difference 295: note = a, c, g, u, unknown, other, or absent
  misc_difference 296: note = a, c, g, u, unknown, other, or absent
  misc_difference 297: note = a, c, g, u, unknown, other, or absent
  misc_difference 298: note = a, c, g, u, unknown, other, or absent
  misc_difference 299: note = a, c, g, u, unknown, other, or absent
  misc_difference 300: note = a, c, g, u, unknown, other, or absent
  misc_difference 301: note = a, c, g, u, unknown, other, or absent
  misc_difference 302: note = a, c, g, u, unknown, other, or absent
  misc_difference 303: note = a, c, g, u, unknown, other, or absent
  misc_difference 304: note = a, c, g, u, unknown, other, or absent
  misc_difference 305: note = a, c, g, u, unknown, other, or absent
  misc_difference 306: note = a, c, g, u, unknown, other, or absent
  misc_difference 307: note = a, c, g, u, unknown, other, or absent
  misc_difference 308: note = a, c, g, u, unknown, other, or absent
  misc_difference 309: note = a, c, g, u, unknown, other, or absent
  misc_difference 310: note = a, c, g, u, unknown, other, or absent
  misc_difference 311: note = a, c, g, u, unknown, other, or absent
  misc_difference 312: note = a, c, g, u, unknown, other, or absent
  misc_difference 313: note = a, c, g, u, unknown, other, or absent
  misc_difference 314: note = a, c, g, u, unknown, other, or absent
  misc_difference 315: note = a, c, g, u, unknown, other, or absent
  misc_difference 316: note = May be absent
  misc_difference 317: note = May be absent
  misc_difference 318: note = May be absent
  misc_difference 319: note = May be absent
  misc_difference 320: note = May be absent
  misc_difference 321: note = May be absent
  misc_difference 322: note = May be absent
  misc_difference 323: note = May be absent
  misc_difference 324: note = May be absent
  misc_difference 325: note = May be absent
  misc_difference 326: note = a, c, g, u, unknown, other, or absent
  misc_difference 327: note = a, c, g, u, unknown, other, or absent
  misc_difference 328: note = May be absent
  misc_difference 329: note = May be absent
  misc_difference 330: note = May be absent
  misc_difference 331: note = May be absent
  misc_difference 332: note = May be absent
  misc_difference 333: note = May be absent
  misc_difference 334: note = May be absent
  misc_difference 335: note = a, c, g, u, unknown, other, or absent
  misc_difference 336: note = May be absent
  misc_difference 337: note = May be absent
  misc_difference 338: note = May be absent
  misc_difference 339: note = May be absent
  misc_difference 340: note = May be absent
  misc_difference 45..316: note = This region may encompass 1-271 nucleotides
gsyybrktrgykyrrtyggyhagmgcrygktrctdataayryyrnnnnnnnnnnnnnnnnnnnnnnnnnnnnnnnnnnnnnnnnnnnnnnnnnnnnnnnnnnnnnnnnnnnnnnnnnnnnnnnnnnnnnnnnnnnnnnnnnnnnnnnnnnnnnnnnnnnnnnnnnnnnnnnnnnnnnnnnnnnnnnnnnnnnnnnnnnnnnnnnnnnnnnnnnnnnnnnnnnnnnnnnnnnnnnnnnnnnnnnnnnnnnnnnnnnnnnnnnnnnnnnnnnnnnnnnnnnnnnnnnnnnnnnnnnnnnnnnnnnnnnnnnnnnnnnryrrsywydanncycrymyngrsca

SEQ ID NO: 591 - RNA, 340 nt, synthetic construct
  source 1..340: mol_type = other RNA
  misc_difference 1: note = May be absent
  misc_difference 2: note = May be absent
  misc_difference 3: note = May be absent
  misc_difference 4: note = May be absent
  misc_difference 5: note = May be absent
  misc_difference 6: note = May be absent
  misc_difference 7: note = May be absent
  misc_difference 8: note = May be absent
  misc_difference 9: note = May be absent
  misc_difference 10: note = May be absent
  misc_difference 11: note = May be absent
  misc_difference 12: note = May be absent
  misc_difference 13: note = May be absent
  misc_difference 14: note = May be absent
  misc_difference 15: note = May be absent
  misc_difference 16: note = May be absent
  misc_difference 17: note = May be absent
  misc_difference 18: note = May be absent
  misc_difference 19: note = May be absent
  misc_difference 20: note = May be absent
  misc_difference 21: note = May be absent
  misc_difference 22: note = May be absent
  misc_difference 23: note = May be absent
  misc_difference 24: note = May be absent
  misc_difference 25: note = May be absent
  misc_difference 26: note = May be absent
  misc_difference 27: note = May be absent
  misc_difference 28: note = May be absent
  misc_difference 29: note = May be absent
  misc_difference 30: note = May be absent
  misc_difference 31: note = May be absent
  misc_difference 32: note = May be absent
  misc_difference 33: note = May be absent
  misc_difference 34: note = May be absent
  misc_difference 35: note = May be absent
  misc_difference 36: note = May be absent
  misc_difference 37: note = May be absent
  misc_difference 38: note = May be absent
  misc_difference 39: note = May be absent
  misc_difference 40: note = May be absent
  misc_difference 41: note = May be absent
  misc_difference 42: note = May be absent
  misc_difference 43: note = May be absent
  misc_difference 44: note = May be absent
  misc_difference 45: note = a, c, g, u, unknown, other, or absent
  misc_difference 46: note = a, c, g, u, unknown, other, or absent
  misc_difference 47: note = a, c, g, u, unknown, other, or absent
  misc_difference 48: note = a, c, g, u, unknown, other, or absent
  misc_difference 49: note = a, c, g, u, unknown, other, or absent
  misc_difference 50: note = a, c, g, u, unknown, other, or absent
  misc_difference 51: note = a, c, g, u, unknown, other, or absent
  misc_difference 52: note = a, c, g, u, unknown, other, or absent
  misc_difference 53: note = a, c, g, u, unknown, other, or absent
  misc_difference 54: note = a, c, g, u, unknown, other, or absent
  misc_difference 55: note = a, c, g, u, unknown, other, or absent
  misc_difference 56: note = a, c, g, u, unknown, other, or absent
  misc_difference 57: note = a, c, g, u, unknown, other, or absent
  misc_difference 58: note = a, c, g, u, unknown, other, or absent
  misc_difference 59: note = a, c, g, u, unknown, other, or absent
  misc_difference 60: note = a, c, g, u, unknown, other, or absent
  misc_difference 61: note = a, c, g, u, unknown, other, or absent
  misc_difference 62: note = a, c, g, u, unknown, other, or absent
  misc_difference 63: note = a, c, g, u, unknown, other, or absent
  misc_difference 64: note = a, c, g, u, unknown, other, or absent
  misc_difference 65: note = a, c, g, u, unknown, other, or absent
  misc_difference 66: note = a, c, g, u, unknown, other, or absent
  misc_difference 67: note = a, c, g, u, unknown, other, or absent
  misc_difference 68: note = a, c, g, u, unknown, other, or absent
  misc_difference 69: note = a, c, g, u, unknown, other, or absent
  misc_difference 70: note = a, c, g, u, unknown, other, or absent
  misc_difference 71: note = a, c, g, u, unknown, other, or absent
  misc_difference 72: note = a, c, g, u, unknown, other, or absent
  misc_difference 73: note = a, c, g, u, unknown, other, or absent
  misc_difference 74: note = a, c, g, u, unknown, other, or absent
  misc_difference 75: note = a, c, g, u, unknown, other, or absent
  misc_difference 76: note = a, c, g, u, unknown, other, or absent
  misc_difference 77: note = a, c, g, u, unknown, other, or absent
  misc_difference 78: note = a, c, g, u, unknown, other, or absent
  misc_difference 79: note = a, c, g, u, unknown, other, or absent
  misc_difference 80: note = a, c, g, u, unknown, other, or absent
  misc_difference 81: note = a, c, g, u, unknown, other, or absent
  misc_difference 82: note = a, c, g, u, unknown, other, or absent
  misc_difference 83: note = a, c, g, u, unknown, other, or absent
  misc_difference 84: note = a, c, g, u, unknown, other, or absent
  misc_difference 85: note = a, c, g, u, unknown, other, or absent
  misc_difference 86: note = a, c, g, u, unknown, other, or absent
  misc_difference 87: note = a, c, g, u, unknown, other, or absent
  misc_difference 88: note = a, c, g, u, unknown, other, or absent
  misc_difference 89: note = a, c, g, u, unknown, other, or absent
  misc_difference 90: note = a, c, g, u, unknown, other, or absent
  misc_difference 91: note = a, c, g, u, unknown, other, or absent
  misc_difference 92: note = a, c, g, u, unknown, other, or absent
  misc_difference 93: note = a, c, g, u, unknown, other, or absent
  misc_difference 94: note = a, c, g, u, unknown, other, or absent
  misc_difference 95: note = a, c, g, u, unknown, other, or absent
  misc_difference 96: note = a, c, g, u, unknown, other, or absent
  misc_difference 97: note = a, c, g, u, unknown, other, or absent
  misc_difference 98: note = a, c, g, u, unknown, other, or absent
  misc_difference 99: note = a, c, g, u, unknown, other, or absent
  misc_difference 100: note = a, c, g, u, unknown, other, or absent
  misc_difference 101: note = a, c, g, u, unknown, other, or absent
  misc_difference 102: note = a, c, g, u, unknown, other, or absent
  misc_difference 103: note = a, c, g, u, unknown, other, or absent
  misc_difference 104: note = a, c, g, u, unknown, other, or absent
  misc_difference 105: note = a, c, g, u, unknown, other, or absent
  misc_difference 106: note = a, c, g, u, unknown, other, or absent
  misc_difference 107: note = a, c, g, u, unknown, other, or absent
  misc_difference 108: note = a, c, g, u, unknown, other, or absent
  misc_difference 109: note = a, c, g, u, unknown, other, or absent
  misc_difference 110: note = a, c, g, u, unknown, other, or absent
  misc_difference 111: note = a, c, g, u, unknown, other, or absent
  misc_difference 112: note = a, c, g, u, unknown, other, or absent
  misc_difference 113: note = a, c, g, u, unknown, other, or absent
  misc_difference 114: note = a, c, g, u, unknown, other, or absent
  misc_difference 115: note = a, c, g, u, unknown, other, or absent
  misc_difference 116: note = a, c, g, u, unknown, other, or absent
  misc_difference 117: note = a, c, g, u, unknown, other, or absent
  misc_difference 118: note = a, c, g, u, unknown, other, or absent
  misc_difference 119: note = a, c, g, u, unknown, other, or absent
  misc_difference 120: note = a, c, g, u, unknown, other, or absent
  misc_difference 121: note = a, c, g, u, unknown, other, or absent
  misc_difference 122: note = a, c, g, u, unknown, other, or absent
  misc_difference 123: note = a, c, g, u, unknown, other, or absent
  misc_difference 124: note = a, c, g, u, unknown, other, or absent
  misc_difference 125: note = a, c, g, u, unknown, other, or absent
  misc_difference 126: note = a, c, g, u, unknown, other, or absent
  misc_difference 127: note = a, c, g, u, unknown, other, or absent
  misc_difference 128: note = a, c, g, u, unknown, other, or absent
  misc_difference 129: note = a, c, g, u, unknown, other, or absent
  misc_difference 130: note = a, c, g, u, unknown, other, or absent
  misc_difference 131: note = a, c, g, u, unknown, other, or absent
  misc_difference 132: note = a, c, g, u, unknown, other, or absent
  misc_difference 133: note = a, c, g, u, unknown, other, or absent
  misc_difference 134: note = a, c, g, u, unknown, other, or absent
  misc_difference 135: note = a, c, g, u, unknown, other, or absent
  misc_difference 136: note = a, c, g, u, unknown, other, or absent
  misc_difference 137: note = a, c, g, u, unknown, other, or absent
  misc_difference 138: note = a, c, g, u, unknown, other, or absent
  misc_difference 139: note = a, c, g, u, unknown, other, or absent
  misc_difference 140: note = a, c, g, u, unknown, other, or absent
  misc_difference 141: note = a, c, g, u, unknown, other, or absent
  misc_difference 142: note = a, c, g, u, unknown, other, or absent
  misc_difference 143: note = a, c, g, u, unknown, other, or absent
  misc_difference 144: note = a, c, g, u, unknown, other, or absent
  misc_difference 145: note = a, c, g, u, unknown, other, or absent
  misc_difference 146: note = a, c, g, u, unknown, other, or absent
  misc_difference 147: note = a, c, g, u, unknown, other, or absent
  misc_difference 148: note = a, c, g, u, unknown, other, or absent
  misc_difference 149: note = a, c, g, u, unknown, other, or absent
  misc_difference 150: note = a, c, g, u, unknown, other, or absent
  misc_difference 151: note = a, c, g, u, unknown, other, or absent
  misc_difference 152: note = a, c, g, u, unknown, other, or absent
  misc_difference 153: note = a, c, g, u, unknown, other, or absent
  misc_difference 154: note = a, c, g, u, unknown, other, or absent
  misc_difference 155: note = a, c, g, u, unknown, other, or absent
  misc_difference 156: note = a, c, g, u, unknown, other, or absent
  misc_difference 157: note = a, c, g, u, unknown, other, or absent
  misc_difference 158: note = a, c, g, u, unknown, other, or absent
  misc_difference 159: note = a, c, g, u, unknown, other, or absent
  misc_difference 160: note = a, c, g, u, unknown, other, or absent
  misc_difference 161: note = a, c, g, u, unknown, other, or absent
  misc_difference 162: note = a, c, g, u, unknown, other, or absent
  misc_difference 163: note = a, c, g, u, unknown, other, or absent
  misc_difference 164: note = a, c, g, u, unknown, other, or absent
  misc_difference 165: note = a, c, g, u, unknown, other, or absent
  misc_difference 166: note = a, c, g, u, unknown, other, or absent
  misc_difference 167: note = a, c, g, u, unknown, other, or absent
  misc_difference 168: note = a, c, g, u, unknown, other, or absent
  misc_difference 169: note = a, c, g, u, unknown, other, or absent
  misc_difference 170: note = a, c, g, u, unknown, other, or absent
  misc_difference 171: note = a, c, g, u, unknown, other, or absent
  misc_difference 172: note = a, c, g, u, unknown, other, or absent
  misc_difference 173: note = a, c, g, u, unknown, other, or absent
  misc_difference 174: note = a, c, g, u, unknown, other, or absent
  misc_difference 175: note = a, c, g, u, unknown, other, or absent
  misc_difference 176: note = a, c, g, u, unknown, other, or absent
  misc_difference 177: note = a, c, g, u, unknown, other, or absent
  misc_difference 178: note = a, c, g, u, unknown, other, or absent
  misc_difference 179: note = a, c, g, u, unknown, other, or absent
  misc_difference 180: note = a, c, g, u, unknown, other, or absent
  misc_difference 181: note = a, c, g, u, unknown, other, or absent
  misc_difference 182: note = a, c, g, u, unknown, other, or absent
  misc_difference 183: note = a, c, g, u, unknown, other, or absent
  misc_difference 184: note = a, c, g, u, unknown, other, or absent
  misc_difference 185: note = a, c, g, u, unknown, other, or absent
  misc_difference 186: note = a, c, g, u, unknown, other, or absent
  misc_difference 187: note = a, c, g, u, unknown, other, or absent
  misc_difference 188: note = a, c, g, u, unknown, other, or absent
  misc_difference 189: note = a, c, g, u, unknown, other, or absent
  misc_difference 190: note = a, c, g, u, unknown, other, or absent
  misc_difference 191: note = a, c, g, u, unknown, other, or absent
  misc_difference 192: note = a, c, g, u, unknown, other, or absent
  misc_difference 193: note = a, c, g, u, unknown, other, or absent
  misc_difference 194: note = a, c, g, u, unknown, other, or absent
  misc_difference 195: note = a, c, g, u, unknown, other, or absent
  misc_difference 196: note = a, c, g, u, unknown, other, or absent
  misc_difference 197: note = a, c, g, u, unknown, other, or absent
  misc_difference 198: note = a, c, g, u, unknown, other, or absent
  misc_difference 199: note = a, c, g, u, unknown, other, or absent
  misc_difference 200: note = a, c, g, u, unknown, other, or absent
  misc_difference 201: note = a, c, g, u, unknown, other, or absent
  misc_difference 202: note = a, c, g, u, unknown, other, or absent
  misc_difference 203: note = a, c, g, u, unknown, other, or absent
  misc_difference 204: note = a, c, g, u, unknown, other, or absent
  misc_difference 205: note = a, c, g, u, unknown, other, or absent
  misc_difference 206: note = a, c, g, u, unknown, other, or absent
  misc_difference 207: note = a, c, g, u, unknown, other, or absent
  misc_difference 208: note = a, c, g, u, unknown, other, or absent
  misc_difference 209: note = a, c, g, u, unknown, other, or absent
  misc_difference 210: note = a, c, g, u, unknown, other, or absent
  misc_difference 211: note = a, c, g, u, unknown, other, or absent
  misc_difference 212: note = a, c, g, u, unknown, other, or absent
  misc_difference 213: note = a, c, g, u, unknown, other, or absent
  misc_difference 214: note = a, c, g, u, unknown, other, or absent
  misc_difference 215: note = a, c, g, u, unknown, other, or absent
  misc_difference 216: note = a, c, g, u, unknown, other, or absent
  misc_difference 217: note = a, c, g, u, unknown, other, or absent
  misc_difference 218: note = a, c, g, u, unknown, other, or absent
  misc_difference 219: note = a, c, g, u, unknown, other, or absent
  misc_difference 220: note = a, c, g, u, unknown, other, or absent
  misc_difference 221: note = a, c, g, u, unknown, other, or absent
  misc_difference 222: note = a, c, g, u, unknown, other, or absent
  misc_difference 223: note = a, c, g, u, unknown, other, or absent
  misc_difference 224: note = a, c, g, u, unknown, other, or absent
  misc_difference 225: note = a, c, g, u, unknown, other, or absent
  misc_difference 226: note = a, c, g, u, unknown, other, or absent
  misc_difference 227: note = a, c, g, u, unknown, other, or absent
  misc_difference 228: note = a, c, g, u, unknown, other, or absent
  misc_difference 229: note = a, c, g, u, unknown, other, or absent
  misc_difference 230: note = a, c, g, u, unknown, other, or absent
  misc_difference 231: note = a, c, g, u, unknown, other, or absent
  misc_difference 232: note = a, c, g, u, unknown, other, or absent
  misc_difference 233: note = a, c, g, u, unknown, other, or absent
  misc_difference 234: note = a, c, g, u, unknown, other, or absent
  misc_difference 235: note = a, c, g, u, unknown, other, or absent
  misc_difference 236: note = a, c, g, u, unknown, other, or absent
  misc_difference 237: note = a, c, g, u, unknown, other, or absent
  misc_difference 238: note = a, c, g, u, unknown, other, or absent
  misc_difference 239: note = a, c, g, u, unknown, other, or absent
  misc_difference 240: note = a, c, g, u, unknown, other, or absent
  misc_difference 241: note = a, c, g, u, unknown, other, or absent
  misc_difference 242: note = a, c, g, u, unknown, other, or absent
  misc_difference 243: note = a, c, g, u, unknown, other, or absent
  misc_difference 244: note = a, c, g, u, unknown, other, or absent
  misc_difference 245: note = a, c, g, u, unknown, other, or absent
  misc_difference 246: note = a, c, g, u, unknown, other, or absent
  misc_difference 247: note = a, c, g, u, unknown, other, or absent
  misc_difference 248: note = a, c, g, u, unknown, other, or absent
  misc_difference 249: note = a, c, g, u, unknown, other, or absent
  misc_difference 250: note = a, c, g, u, unknown, other, or absent
  misc_difference 251: note = a, c, g, u, unknown, other, or absent
  misc_difference 252: note = a, c, g, u, unknown, other, or absent
  misc_difference 253: note = a, c, g, u, unknown, other, or absent
  misc_difference 254: note = a, c, g, u, unknown, other, or absent
  misc_difference 255: note = a, c, g, u, unknown, other, or absent
  misc_difference 256: note = a, c, g, u, unknown, other, or absent
  misc_difference 257: note = a, c, g, u, unknown, other, or absent
  misc_difference 258: note = a, c, g, u, unknown, other, or absent
  misc_difference 259: note = a, c, g, u, unknown, other, or absent
  misc_difference 260: note = a, c, g, u, unknown, other, or absent
  misc_difference 261: note = a, c, g, u, unknown, other, or absent
  misc_difference 262: note = a, c, g, u, unknown, other, or absent
  misc_difference 263: note = a, c, g, u, unknown, other, or absent
  misc_difference 264: note = a, c, g, u, unknown, other, or absent
  misc_difference 265: note = a, c, g, u, unknown, other, or absent
  misc_difference 266: note = a, c, g, u, unknown, other, or absent
  misc_difference 267: note = a, c, g, u, unknown, other, or absent
  misc_difference 268: note = a, c, g, u, unknown, other, or absent
  misc_difference 269: note = a, c, g, u, unknown, other, or absent
  misc_difference 270: note = a, c, g, u, unknown, other, or absent
  misc_difference 271: note = a, c, g, u, unknown, other, or absent
  misc_difference 272: note = a, c, g, u, unknown, other, or absent
  misc_difference 273: note = a, c, g, u, unknown, other, or absent
  misc_difference 274: note = a, c, g, u, unknown, other, or absent
  misc_difference 275: note = a, c, g, u, unknown, other, or absent
  misc_difference 276: note = a, c, g, u, unknown, other, or absent
  misc_difference 277: note = a, c, g, u, unknown, other, or absent
  misc_difference 278: note = a, c, g, u, unknown, other, or absent
  misc_difference 279: note = a, c, g, u, unknown, other, or absent
  misc_difference 280: note = a, c, g, u, unknown, other, or absent
  misc_difference 281: note = a, c, g, u, unknown, other, or absent
  misc_difference 282: note = a, c, g, u, unknown, other, or absent
  misc_difference 283: note = a, c, g, u, unknown, other, or absent
  misc_difference 284: note = a, c, g, u, unknown, other, or absent
  misc_difference 285: note = a, c, g, u, unknown, other, or absent
  misc_difference 286: note = a, c, g, u, unknown, other, or absent
  misc_difference 287: note = a, c, g, u, unknown, other, or absent
  misc_difference 288: note = a, c, g, u, unknown, other, or absent
  misc_difference 289: note = a, c, g, u, unknown, other, or absent
  misc_difference 290: note = a, c, g, u, unknown, other, or absent
  misc_difference 291: note = a, c, g, u, unknown, other, or absent
  misc_difference 292: note = a, c, g, u, unknown, other, or absent
  misc_difference 293: note = a, c, g, u, unknown, other, or absent
  misc_difference 294: note = a, c, g, u, unknown, other, or absent
  misc_difference 295: note = a, c, g, u, unknown, other, or absent
  misc_difference 296: note = a, c, g, u, unknown, other, or absent
  misc_difference 297: note = a, c, g, u, unknown, other, or absent
  misc_difference 298: note = a, c, g, u, unknown, other, or absent
  misc_difference 299: note = a, c, g, u, unknown, other, or absent
  misc_difference 300: note = a, c, g, u, unknown, other, or absent
  misc_difference 301: note = a, c, g, u, unknown, other, or absent
  misc_difference 302: note = a, c, g, u, unknown, other, or absent
  misc_difference 303: note = a, c, g, u, unknown, other, or absent
  misc_difference 304: note = a, c, g, u, unknown, other, or absent
  misc_difference 305: note = a, c, g, u, unknown, other, or absent
  misc_difference 306: note = a, c, g, u, unknown, other, or absent
  misc_difference 307: note = a, c, g, u, unknown, other, or absent
  misc_difference 308: note = a, c, g, u, unknown, other, or absent
  misc_difference 309: note = a, c, g, u, unknown, other, or absent
  misc_difference 310: note = a, c, g, u, unknown, other, or absent
  misc_difference 311: note = a, c, g, u, unknown, other, or absent
  misc_difference 312: note = a, c, g, u, unknown, other, or absent
  misc_difference 313: note = a, c, g, u, unknown, other, or absent
  misc_difference 314: note = a, c, g, u, unknown, other, or absent
  misc_difference 315: note = a, c, g, u, unknown, other, or absent
  misc_difference 316: note = May be absent
  misc_difference 317: note = May be absent
  misc_difference 318: note = May be absent
  misc_difference 319: note = May be absent
  misc_difference 320: note = May be absent
  misc_difference 321: note = May be absent
  misc_difference 322: note = May be absent
  misc_difference 323: note = May be absent
  misc_difference 324: note = May be absent
  misc_difference 325: note = May be absent
  misc_difference 326: note = May be absent
  misc_difference 327: note = May be absent
  misc_difference 328: note = May be absent
  misc_difference 329: note = May be absent
  misc_difference 330: note = May be absent
  misc_difference 331: note = May be absent
  misc_difference 332: note = May be absent
  misc_difference 333: note = May be absent
  misc_difference 334: note = May be absent
  misc_difference 335: note = May be absent
  misc_difference 336: note = May be absent
  misc_difference 337: note = May be absent
  misc_difference 338: note = May be absent
  misc_difference 339: note = May be absent
  misc_difference 340: note = May be absent
  misc_difference 45..316: note = This region may encompass 1-271 nucleotides
gsyysrktrgykcartyggyhagmgcgyggtrctdataayrcyrnnnnnnnnnnnnnnnnnnnnnnnnnnnnnnnnnnnnnnnnnnnnnnnnnnnnnnnnnnnnnnnnnnnnnnnnnnnnnnnnnnnnnnnnnnnnnnnnnnnnnnnnnnnnnnnnnnnnnnnnnnnnnnnnnnnnnnnnnnnnnnnnnnnnnnnnnnnnnnnnnnnnnnnnnnnnnnnnnnnnnnnnnnnnnnnnnnnnnnnnnnnnnnnnnnnnnnnnnnnnnnnnnnnnnnnnnnnnnnnnnnnnnnnnnnnnnnnnnnnnnnnnnnnnnnngygrgytcrabhcycrymybgrsca

SEQ ID NO: 592 - RNA, 341 nt, synthetic construct
  source 1..341: mol_type = other RNA
  misc_difference 1: note = a, c, g, u, unknown, other, or absent
  misc_difference 2: note = May be absent
  misc_difference 3: note = a, c, g, u, unknown, other, or absent
  misc_difference 4: note = a, c, g, u, unknown, other, or absent
  misc_difference 5: note = a, c, g, u, unknown, other, or absent
  misc_difference 6: note = a, c, g, u, unknown, other, or absent
  misc_difference 7: note = May be absent
  misc_difference 8: note = May be absent
  misc_difference 9: note = May be absent
  misc_difference 10: note = May be absent
  misc_difference 11: note = a, c, g, u, unknown, other, or absent
  misc_difference 12: note = a, c, g, u, unknown, other, or absent
  misc_difference 13: note = May be absent
  misc_difference 14: note = May be absent
  misc_difference 15: note = May be absent
  misc_difference 16: note = a, c, g, u, unknown, other, or absent
  misc_difference 17: note = a, c, g, u, unknown, other, or absent
  misc_difference 18: note = May be absent
  misc_difference 19: note = May be absent
  misc_difference 20: note = May be absent
  misc_difference 21: note = a, c, g, u, unknown, other, or absent
  misc_difference 22: note = a, c, g, u, unknown, other, or absent
  misc_difference 23: note = May be absent
  misc_difference 24: note = May be absent
  misc_difference 25: note = a, c, g, u, unknown, other, or absent
  misc_difference 26: note = a, c, g, u, unknown, other, or absent
  misc_difference 27: note = May be absent
  misc_difference 28: note = a, c, g, u, unknown, other, or absent
  misc_difference 29: note = a, c, g, u, unknown, other, or absent
  misc_difference 30: note = a, c, g, u, unknown, other, or absent
  misc_difference 31: note = a, c, g, u, unknown, other, or absent
  misc_difference 32: note = May be absent
  misc_difference 33: note = May be absent
  misc_difference 34: note = May be absent
  misc_difference 35: note = May be absent
  misc_difference 36: note = May be absent
  misc_difference 37: note = May be absent
  misc_difference 38: note = May be absent
  misc_difference 39: note = May be absent
  misc_difference 40: note = May be absent
  misc_difference 41: note = a, c, g, u, unknown, other, or absent
  misc_difference 42: note = May be absent
  misc_difference 43: note = a, c, g, u, unknown, other, or absent
  misc_difference 44: note = a, c, g, u, unknown, other, or absent
  misc_difference 45: note = a, c, g, u, unknown, other, or absent
  misc_difference 46: note = a, c, g, u, unknown, other, or absent
  misc_difference 47: note = a, c, g, u, unknown, other, or absent
  misc_difference 48: note = a, c, g, u, unknown, other, or absent
  misc_difference 49: note = a, c, g, u, unknown, other, or absent
  misc_difference 50: note = a, c, g, u, unknown, other, or absent
  misc_difference 51: note = a, c, g, u, unknown, other, or absent
  misc_difference 52: note = a, c, g, u, unknown, other, or absent
  misc_difference 53: note = a, c, g, u, unknown, other, or absent
  misc_difference 54: note = a, c, g, u, unknown, other, or absent
  misc_difference 55: note = a, c, g, u, unknown, other, or absent
  misc_difference 56: note = a, c, g, u, unknown, other, or absent
  misc_difference 57: note = a, c, g, u, unknown, other, or absent
  misc_difference 58: note = a, c, g, u, unknown, other, or absent
  misc_difference 59: note = a, c, g, u, unknown, other, or absent
  misc_difference 60: note = a, c, g, u, unknown, other, or absent
  misc_difference 61: note = a, c, g, u, unknown, other, or absent
  misc_difference 62: note = a, c, g, u, unknown, other, or absent
  misc_difference 63: note = a, c, g, u, unknown, other, or absent
  misc_difference 64: note = a, c, g, u, unknown, other, or absent
  misc_difference 65: note = a, c, g, u, unknown, other, or absent
  misc_difference 66: note = a, c, g, u, unknown, other, or absent
  misc_difference 67: note = a, c, g, u, unknown, other, or absent
  misc_difference 68: note = a, c, g, u, unknown, other, or absent
  misc_difference 69: note = a, c, g, u, unknown, other, or absent
  misc_difference 70: note = a, c, g, u, unknown, other, or absent
  misc_difference 71: note = a, c, g, u, unknown, other, or absent
  misc_difference 72: note = a, c, g, u, unknown, other, or absent
  misc_difference 73: note = a, c, g, u, unknown, other, or absent
  misc_difference 74: note = a, c, g, u, unknown, other, or absent
  misc_difference 75: note = a, c, g, u, unknown, other, or absent
  misc_difference 76: note = a, c, g, u, unknown, other, or absent
  misc_difference 77: note = a, c, g, u, unknown, other, or absent
  misc_difference 78: note = a, c, g, u, unknown, other, or absent
  misc_difference 79: note = a, c, g, u, unknown, other, or absent
  misc_difference 80: note = a, c, g, u, unknown, other, or absent
  misc_difference 81: note = a, c, g, u, unknown, other, or absent
  misc_difference 82: note = a, c, g, u, unknown, other, or absent
  misc_difference 83: note = a, c, g, u, unknown, other, or absent
  misc_difference 84: note = a, c, g, u, unknown, other, or absent
  misc_difference 85: note = a, c, g, u, unknown, other, or absent
  misc_difference 86: note = a, c, g, u, unknown, other, or absent
  misc_difference 87: note = a, c, g, u, unknown, other, or absent
  misc_difference 88: note = a, c, g, u, unknown, other, or absent
  misc_difference 89: note = a, c, g, u, unknown, other, or absent
  misc_difference 90: note = a, c, g, u, unknown, other, or absent
  misc_difference 91: note = a, c, g, u, unknown, other, or absent
  misc_difference 92: note = a, c, g, u, unknown, other, or absent
  misc_difference 93: note = a, c, g, u, unknown, other, or absent
  misc_difference 94: note = a, c, g, u, unknown, other, or absent
  misc_difference 95: note = a, c, g, u, unknown, other, or absent
  misc_difference 96: note = a, c, g, u, unknown, other, or absent
  misc_difference 97: note = a, c, g, u, unknown, other, or absent
  misc_difference 98: note = a, c, g, u, unknown, other, or absent
  misc_difference 99: note = a, c, g, u, unknown, other, or absent
  misc_difference 100: note = a, c, g, u, unknown, other, or absent
  misc_difference 101: note = a, c, g, u, unknown, other, or absent
  misc_difference 102: note = a, c, g, u, unknown, other, or absent
  misc_difference 103: note = a, c, g, u, unknown, other, or absent
  misc_difference 104: note = a, c, g, u, unknown, other, or absent
  misc_difference 105: note = a, c, g, u, unknown, other, or absent
  misc_difference 106: note = a, c, g, u, unknown, other, or absent
  misc_difference 107: note = a, c, g, u, unknown, other, or absent
  misc_difference 108: note = a, c, g, u, unknown, other, or absent
  misc_difference 109: note = a, c, g, u, unknown, other, or absent
  misc_difference 110: note = a, c, g, u, unknown, other, or absent
  misc_difference 111: note = a, c, g, u, unknown, other, or absent
  misc_difference 112: note = a, c, g, u, unknown, other, or absent
  misc_difference 113: note = a, c, g, u, unknown, other, or absent
  misc_difference 114: note = a, c, g, u, unknown, other, or absent
  misc_difference 115: note = a, c, g, u, unknown, other, or absent
  misc_difference 116: note = a, c, g, u, unknown, other, or absent
  misc_difference 117: note = a, c, g, u, unknown, other, or absent
  misc_difference 118: note = a, c, g, u, unknown, other, or absent
  misc_difference 119: note = a, c, g, u, unknown, other, or absent
  misc_difference 120: note = a, c, g, u, unknown, other, or absent
  misc_difference 121: note = a, c, g, u, unknown, other, or absent
  misc_difference 122: note = a, c, g, u, unknown, other, or absent
  misc_difference 123: note = a, c, g, u, unknown, other, or absent
  misc_difference 124: note = a, c, g, u, unknown, other, or absent
  misc_difference 125: note = a, c, g, u, unknown, other, or absent
  misc_difference 126: note = a, c, g, u, unknown, other, or absent
  misc_difference 127: note = a, c, g, u, unknown, other, or absent
  misc_difference 128: note = a, c, g, u, unknown, other, or absent
  misc_difference 129: note = a, c, g, u, unknown, other, or absent
  misc_difference 130: note = a, c, g, u, unknown, other, or absent
  misc_difference 131: note = a, c, g, u, unknown, other, or absent
  misc_difference 132: note = a, c, g, u, unknown, other, or absent
  misc_difference 133: note = a, c, g, u, unknown, other, or absent
  misc_difference 134: note = a, c, g, u, unknown, other, or absent
  misc_difference 135: note = a, c, g, u, unknown, other, or absent
  misc_difference 136: note = a, c, g, u, unknown, other, or absent
  misc_difference 137: note = a, c, g, u, unknown, other, or absent
  misc_difference 138: note = a, c, g, u, unknown, other, or absent
  misc_difference 139: note = a, c, g, u, unknown, other, or absent
  misc_difference 140: note = a, c, g, u, unknown, other, or absent
  misc_difference 141: note = a, c, g, u, unknown, other, or absent
  misc_difference 142: note = a, c, g, u, unknown, other, or absent
  misc_difference 143: note = a, c, g, u, unknown, other, or absent
  misc_difference 144: note = a, c, g, u, unknown, other, or absent
  misc_difference 145: note = a, c, g, u, unknown, other, or absent
  misc_difference 146: note = a, c, g, u, unknown, other, or absent
  misc_difference 147: note = a, c, g, u, unknown, other, or absent
  misc_difference 148: note = a, c, g, u, unknown, other, or absent
  misc_difference 149: note = a, c, g, u, unknown, other, or absent
  misc_difference 150: note = a, c, g, u, unknown, other, or absent
  misc_difference 151: note = a, c, g, u, unknown, other, or absent
  misc_difference 152: note = a, c, g, u, unknown, other, or absent
  misc_difference 153: note = a, c, g, u, unknown, other, or absent
  misc_difference 154: note = a, c, g, u, unknown, other, or absent
  misc_difference 155: note = a, c, g, u, unknown, other, or absent
  misc_difference 156: note = a, c, g, u, unknown, other, or absent
  misc_difference 157: note = a, c, g, u, unknown, other, or absent
  misc_difference 158: note = a, c, g, u, unknown, other, or absent
  misc_difference 159: note = a, c, g, u, unknown, other, or absent
  misc_difference 160: note = a, c, g, u, unknown, other, or absent
  misc_difference 161: note = a, c, g, u, unknown, other, or absent
  misc_difference 162: note = a, c, g, u, unknown, other, or absent
  misc_difference 163: note = a, c, g, u, unknown, other, or absent
  misc_difference 164: note = a, c, g, u, unknown, other, or absent
  misc_difference 165: note = a, c, g, u, unknown, other, or absent
  misc_difference 166: note = a, c, g, u, unknown, other, or absent
  misc_difference 167: note = a, c, g, u, unknown, other, or absent
  misc_difference 168: note = a, c, g, u, unknown, other, or absent
  misc_difference 169: note = a, c, g, u, unknown, other, or absent
  misc_difference 170: note = a, c, g, u, unknown, other, or absent
  misc_difference 171: note = a, c, g, u, unknown, other, or absent
  misc_difference 172: note = a, c, g, u, unknown, other, or absent
  misc_difference 173: note = a, c, g, u, unknown, other, or absent
  misc_difference 174: note = a, c, g, u, unknown, other, or absent
  misc_difference 175: note = a, c, g, u, unknown, other, or absent
  misc_difference 176: note = a, c, g, u, unknown, other, or absent
  misc_difference 177: note = a, c, g, u, unknown, other, or absent
  misc_difference 178: note = a, c, g, u, unknown, other, or absent
  misc_difference 179: note = a, c, g, u, unknown, other, or absent
  misc_difference 180: note = a, c, g, u, unknown, other, or absent
  misc_difference 181: note = a, c, g, u, unknown, other, or absent
  misc_difference 182: note = a, c, g, u, unknown, other, or absent
  misc_difference 183: note = a, c, g, u, unknown, other, or absent
  misc_difference 184: note = a, c, g, u, unknown, other, or absent
  misc_difference 185: note = a, c, g, u, unknown, other, or absent
  misc_difference 186: note = a, c, g, u, unknown, other, or absent
  misc_difference 187: note = a, c, g, u, unknown, other, or absent
  misc_difference 188: note = a, c, g, u, unknown, other, or absent
  misc_difference 189: note = a, c, g, u, unknown, other, or absent
  misc_difference 190: note = a, c, g, u, unknown, other, or absent
  misc_difference 191: note = a, c, g, u, unknown, other, or absent
  misc_difference 192: note = a, c, g, u, unknown, other, or absent
  misc_difference 193: note = a, c, g, u, unknown, other, or absent
  misc_difference 194: note = a, c, g, u, unknown, other, or absent
  misc_difference 195: note = a, c, g, u, unknown, other, or absent
  misc_difference 196: note = a, c, g, u, unknown, other, or absent
  misc_difference 197: note = a, c, g, u, unknown, other, or absent
  misc_difference 198: note = a, c, g, u, unknown, other, or absent
  misc_difference 199: note = a, c, g, u, unknown, other, or absent
  misc_difference 200: note = a, c, g, u, unknown, other, or absent
  misc_difference 201: note = a, c, g, u, unknown, other, or absent
  misc_difference 202: note = a, c, g, u, unknown, other, or absent
  misc_difference 203: note = a, c, g, u, unknown, other, or absent
  misc_difference 204: note = a, c, g, u, unknown, other, or absent
  misc_difference 205: note = a, c, g, u, unknown, other, or absent
  misc_difference 206: note = a, c, g, u, unknown, other, or absent
  misc_difference 207: note = a, c, g, u, unknown, other, or absent
  misc_difference 208: note = a, c, g, u, unknown, other, or absent
  misc_difference 209: note = a, c, g, u, unknown, other, or absent
  misc_difference 210: note = a, c, g, u, unknown, other, or absent
  misc_difference 211: note = a, c, g, u, unknown, other, or absent
  misc_difference 212: note = a, c, g, u, unknown, other, or absent
  misc_difference 213: note = a, c, g, u, unknown, other, or absent
  misc_difference 214: note = a, c, g, u, unknown, other, or absent
  misc_difference 215: note = a, c, g, u, unknown, other, or absent
  misc_difference 216: note = a, c, g, u, unknown, other, or absent
  misc_difference 217: note = a, c, g, u, unknown, other, or absent
  misc_difference 218: note = a, c, g, u, unknown, other, or absent
  misc_difference 219: note = a, c, g, u, unknown, other, or absent
  misc_difference 220: note = a, c, g, u, unknown, other, or absent
  misc_difference 221: note = a, c, g, u, unknown, other, or absent
  misc_difference 222: note = a, c, g, u, unknown, other, or absent
  misc_difference 223: note = a, c, g, u, unknown, other, or absent
  misc_difference 224: note = a, c, g, u, unknown, other, or absent
  misc_difference 225: note = a, c, g, u, unknown, other, or absent
  misc_difference 226: note = a, c, g, u, unknown, other, or absent
  misc_difference 227: note = a, c, g, u, unknown, other, or absent
  misc_difference 228: note = a, c, g, u, unknown, other, or absent
  misc_difference 229: note = a, c, g, u, unknown, other, or absent
  misc_difference 230: note = a, c, g, u, unknown, other, or absent
  misc_difference 231: note = a, c, g, u, unknown, other, or absent
  misc_difference 232: note = a, c, g, u, unknown, other, or absent
  misc_difference 233: note = a, c, g, u, unknown, other, or absent
  misc_difference 234: note = a, c, g, u, unknown, other, or absent
  misc_difference 235: note = a, c, g, u, unknown, other, or absent
  misc_difference 236: note = a, c, g, u, unknown, other, or absent
  misc_difference 237: note = a, c, g, u, unknown, other, or absent
  misc_difference 238: note = a, c, g, u, unknown, other, or absent
  misc_difference 239: note = a, c, g, u, unknown, other, or absent
  misc_difference 240: note = a, c, g, u, unknown, other, or absent
  misc_difference 241: note = a, c, g, u, unknown, other, or absent
  misc_difference 242: note = a, c, g, u, unknown, other, or absent
  misc_difference 243: note = a, c, g, u, unknown, other, or absent
  misc_difference 244: note = a, c, g, u, unknown, other, or absent
  misc_difference 245: note = a, c, g, u, unknown, other, or absent
  misc_difference 246: note = a, c, g, u, unknown, other, or absent
  misc_difference 247: note = a, c, g, u, unknown, other, or absent
  misc_difference 248: note = a, c, g, u, unknown, other, or absent
  misc_difference 249: note = a, c, g, u, unknown, other, or absent
  misc_difference 250: note = a, c, g, u, unknown, other, or absent
  misc_difference 251: note = a, c, g, u, unknown, other, or absent
  misc_difference 252: note = a, c, g, u, unknown, other, or absent
  misc_difference 253: note = a, c, g, u, unknown, other, or absent
  misc_difference 254: note = a, c, g, u, unknown, other, or absent
  misc_difference 255: note = a, c, g, u, unknown, other, or absent
  misc_difference 256: note = a, c, g, u, unknown, other, or absent
  misc_difference 257: note = a, c, g, u, unknown, other, or absent
  misc_difference 258: note = a, c, g, u, unknown, other, or absent
  misc_difference 259: note = a, c, g, u, unknown, other, or absent
  misc_difference 260: note = a, c, g, u, unknown, other, or absent
  misc_difference 261: note = a, c, g, u, unknown, other, or absent
  misc_difference 262: note = a, c, g, u, unknown, other, or absent
  misc_difference 263: note = a, c, g, u, unknown, other, or absent
  misc_difference 264: note = a, c, g, u, unknown, other, or absent
  misc_difference 265: note = a, c, g, u, unknown, other, or absent
  misc_difference 266: note = a, c, g, u, unknown, other, or absent
  misc_difference 267: note = a, c, g, u, unknown, other, or absent
  misc_difference 268: note = a, c, g, u, unknown, other, or absent
  misc_difference 269: note = a, c, g, u, unknown, other, or absent
  misc_difference 270: note = a, c, g, u, unknown, other, or absent
  misc_difference 271: note = a, c, g, u, unknown, other, or absent
  misc_difference 272: note = a, c, g, u, unknown, other, or absent
  misc_difference 273: note = a, c, g, u, unknown, other, or absent
  misc_difference 274: note = a, c, g, u, unknown, other, or absent
  misc_difference 275: note = a, c, g, u, unknown, other, or absent
  misc_difference 276: note = a, c, g, u, unknown, other, or absent
  misc_difference 277: note = a, c, g, u, unknown, other, or absent
  misc_difference 278: note = a, c, g, u, unknown, other, or absent
  misc_difference 279: note = a, c, g, u, unknown, other, or absent
  misc_difference 280: note = a, c, g, u, unknown, other, or absent
  misc_difference 281: note = a, c, g, u, unknown, other, or absent
  misc_difference 282: note = a, c, g, u, unknown, other, or absent
  misc_difference 283: note = a, c, g, u, unknown, other, or absent
  misc_difference 284: note = a, c, g, u, unknown, other, or absent
  misc_difference 285: note = a, c, g, u, unknown, other, or absent
  misc_difference 286: note = a, c, g, u, unknown, other, or absent
  misc_difference 287: note = a, c, g, u, unknown, other, or absent
  misc_difference 288: note = a, c, g, u, unknown, other, or absent
  misc_difference 289: note = a, c, g, u, unknown, other, or absent
  misc_difference 290: note = a, c, g, u, unknown, other, or absent
  misc_difference 291: note = a, c, g, u, unknown, other, or absent
  misc_difference 292: note = a, c, g, u, unknown, other, or absent
  misc_difference 293: note = a, c, g, u, unknown, other, or absent
  misc_difference 294: note = a, c, g, u, unknown, other, or absent
  misc_difference 295: note = a, c, g, u, unknown, other, or absent
  misc_difference 296: note = a, c, g, u, unknown, other, or absent
  misc_difference 297: note = a, c, g, u, unknown, other, or absent
  misc_difference 298: note = a, c, g, u, unknown, other, or absent
  misc_difference 299: note = a, c, g, u, unknown, other, or absent
  misc_difference 300: note = a, c, g, u, unknown, other, or absent
  misc_difference 301: note = a, c, g, u, unknown, other, or absent
  misc_difference 302: note = a, c, g, u, unknown, other, or absent
  misc_difference 303: note = a, c, g, u, unknown, other, or absent
  misc_difference 304: note = a, c, g, u, unknown, other, or absent
  misc_difference 305: note = a, c, g, u, unknown, other, or absent
  misc_difference 306: note = a, c, g, u, unknown, other, or absent
  misc_difference 307: note = a, c, g, u, unknown, other, or absent
  misc_difference 308: note = a, c, g, u, unknown, other, or absent
  misc_difference 309: note = a, c, g, u, unknown, other, or absent
  misc_difference 310: note = a, c, g, u, unknown, other, or absent
  misc_difference 311: note = a, c, g, u, unknown, other, or absent
  misc_difference 312: note = a, c, g, u, unknown, other, or absent
  misc_difference 313: note = a, c, g, u, unknown, other, or absent
  misc_difference 314: note = a, c, g, u, unknown, other, or absent
  misc_difference 315: note = a, c, g, u, unknown, other, or absent
  misc_difference 316: note = a, c, g, u, unknown, other, or absent
  misc_difference 317: note = May be absent
  misc_difference 318: note = a, c, g, u, unknown, other, or absent
  misc_difference 319: note = a, c, g, u, unknown, other, or absent
  misc_difference 320: note = May be absent
  misc_difference 321: note = May be absent
  misc_difference 322: note = May be absent
  misc_difference 323: note = May be absent
  misc_difference 324: note = May be absent
  misc_difference 325: note = May be absent
  misc_difference 326: note = May be absent
  misc_difference 327: note = a, c, g, u, unknown, other, or absent
  misc_difference 328: note = May be absent
  misc_difference 329: note = May be absent
  misc_difference 330: note = May be absent
  misc_difference 331: note = a, c, g, u, unknown, other, or absent
  misc_difference 332: note = a, c, g, u, unknown, other, or absent
  misc_difference 333: note = May be absent
  misc_difference 334: note = May be absent
  misc_difference 335: note = a, c, g, u, unknown, other, or absent
  misc_difference 336: note = a, c, g, u, unknown, other, or absent
  misc_difference 337: note = a, c, g, u, unknown, other, or absent
  misc_difference 338: note = a, c, g, u, unknown, other, or absent
  misc_difference 339: note = May be absent
  misc_difference 340: note = a, c, g, u, unknown, other, or absent
  misc_difference 341: note = May be absent
  misc_difference 43..314: note = This region may encompass 1-271 nucleotides
nbnnnndtrsnnbarnnhggnnddnnbnnnnvdhycatahnbnnnnnnnnnnnnnnnnnnnnnnnnnnnnnnnnnnnnnnnnnnnnnnnnnnnnnnnnnnnnnnnnnnnnnnnnnnnnnnnnnnnnnnnnnnnnnnnnnnnnnnnnnnnnnnnnnnnnnnnnnnnnnnnnnnnnnnnnnnnnnnnnnnnnnnnnnnnnnnnnnnnnnnnnnnnnnnnnnnnnnnnnnnnnnnnnnnnnnnnnnnnnnnnnnnnnnnnnnnnnnnnnnnnnnnnnnnnnnnnnnnnnnnnnnnnnnnnnnnnnnnnnnnnnnnnnnnvnnrgdtsdanhmynnbhnnnnvnw

SEQ ID NO: 593 - RNA, 339 nt, synthetic construct
  source 1..339: mol_type = other RNA
  misc_difference 1: note = May be absent
  misc_difference 2: note = May be absent
  misc_difference 3: note = May be absent
  misc_difference 4: note = a, c, g, u, unknown, other, or absent
  misc_difference 5: note = May be absent
  misc_difference 6: note = May be absent
  misc_difference 7: note = May be absent
  misc_difference 8: note = May be absent
  misc_difference 9: note = May be absent
  misc_difference 10: note = May be absent
  misc_difference 11: note = May be absent
  misc_difference 12: note = May be absent
  misc_difference 13: note = May be absent
  misc_difference 14: note = May be absent
  misc_difference 15: note = May be absent
  misc_difference 16: note = May be absent
  misc_difference 17: note = May be absent
  misc_difference 18: note = May be absent
  misc_difference 19: note = May be absent
  misc_difference 20: note = May be absent
  misc_difference 21: note = May be absent
  misc_difference 22: note = May be absent
  misc_difference 23: note = May be absent
  misc_difference 24: note = May be absent
  misc_difference 25: note = May be absent
  misc_difference 26: note = May be absent
  misc_difference 27: note = May be absent
  misc_difference 28: note = May be absent
  misc_difference 29: note = May be absent
  misc_difference 30: note = May be absent
  misc_difference 31: note = May be absent
  misc_difference 32: note = May be absent
  misc_difference 33: note = May be absent
  misc_difference 34: note = May be absent
  misc_difference 35: note = May be absent
  misc_difference 36: note = May be absent
  misc_difference 37: note = May be absent
  misc_difference 38: note = May be absent
  misc_difference 39: note = May be absent
  misc_difference 40: note = May be absent
  misc_difference 41: note = May be absent
  misc_difference 42: note = May be absent
  misc_difference 43: note = May be absent
  misc_difference 44: note = a, c, g, u, unknown, other, or absent
  misc_difference 45: note = a, c, g, u, unknown, other, or absent
  misc_difference 46: note = a, c, g, u, unknown, other, or absent
  misc_difference 47: note = a, c, g, u, unknown, other, or absent
  misc_difference 48: note = a, c, g, u, unknown, other, or absent
  misc_difference 49: note = a, c, g, u, unknown, other, or absent
  misc_difference 50: note = a, c, g, u, unknown, other, or absent
  misc_difference 51: note = a, c, g, u, unknown, other, or absent
  misc_difference 52: note = a, c, g, u, unknown, other, or absent
  misc_difference 53: note = a, c, g, u, unknown, other, or absent
  misc_difference 54: note = a, c, g, u, unknown, other, or absent
  misc_difference 55: note = a, c, g, u, unknown, other, or absent
  misc_difference 56: note = a, c, g, u, unknown, other, or absent
  misc_difference 57: note = a, c, g, u, unknown, other, or absent
  misc_difference 58: note = a, c, g, u, unknown, other, or absent
  misc_difference 59: note = a, c, g, u, unknown, other, or absent
  misc_difference 60: note = a, c, g, u, unknown, other, or absent
  misc_difference 61: note = a, c, g, u, unknown, other, or absent
  misc_difference 62: note = a, c, g, u, unknown, other, or absent
  misc_difference 63: note = a, c, g, u, unknown, other, or absent
  misc_difference 64: note = a, c, g, u, unknown, other, or absent
  misc_difference 65: note = a, c, g, u, unknown, other, or absent
  misc_difference 66: note = a, c, g, u, unknown, other, or absent
  misc_difference 67: note = a, c, g, u, unknown, other, or absent
  misc_difference 68: note = a, c, g, u, unknown, other, or absent
  misc_difference 69: note = a, c, g, u, unknown, other, or absent
  misc_difference 70: note = a, c, g, u, unknown, other, or absent
  misc_difference 71: note = a, c, g, u, unknown, other, or absent
  misc_difference 72: note = a, c, g, u, unknown, other, or absent
  misc_difference 73: note = a, c, g, u, unknown, other, or absent
  misc_difference 74: note = a, c, g, u, unknown, other, or absent
  misc_difference 75: note = a, c, g, u, unknown, other, or absent
  misc_difference 76: note = a, c, g, u, unknown, other, or absent
  misc_difference 77: note = a, c, g, u, unknown, other, or absent
  misc_difference 78: note = a, c, g, u, unknown, other, or absent
  misc_difference 79: note = a, c, g, u, unknown, other, or absent
  misc_difference 80: note = a, c, g, u, unknown, other, or absent
  misc_difference 81: note = a, c, g, u, unknown, other, or absent
  misc_difference 82: note = a, c, g, u, unknown, other, or absent
  misc_difference 83: note = a, c, g, u, unknown, other, or absent
  misc_difference 84: note = a, c, g, u, unknown, other, or absent
  misc_difference 85: note = a, c, g, u, unknown, other, or absent
  misc_difference 86: note = a, c, g, u, unknown, other, or absent
  misc_difference 87: note = a, c, g, u, unknown, other, or absent
  misc_difference 88: note = a, c, g, u, unknown, other, or absent
  misc_difference 89: note = a, c, g, u, unknown, other, or absent
  misc_difference 90: note = a, c, g, u, unknown, other, or absent
  misc_difference 91: note = a, c, g, u, unknown, other, or absent
  misc_difference 92: note = a, c, g, u, unknown, other, or absent
  misc_difference 93: note = a, c, g, u, unknown, other, or absent
  misc_difference 94: note = a, c, g, u, unknown, other, or absent
  misc_difference 95: note = a, c, g, u, unknown, other, or absent
  misc_difference 96: note = a, c, g, u, unknown, other, or absent
  misc_difference 97: note = a, c, g, u, unknown, other, or absent
  misc_difference 98: note = a, c, g, u, unknown, other, or absent
  misc_difference 99: note = a, c, g, u, unknown, other, or absent
  misc_difference 100: note = a, c, g, u, unknown, other, or absent
  misc_difference 101: note = a, c, g, u, unknown, other, or absent
  misc_difference 102: note = a, c, g, u, unknown, other, or absent
  misc_difference 103: note = a, c, g, u, unknown, other, or absent
  misc_difference 104: note = a, c, g, u, unknown, other, or absent
  misc_difference 105: note = a, c, g, u, unknown, other, or absent
  misc_difference 106: note = a, c, g, u, unknown, other, or absent
  misc_difference 107: note = a, c, g, u, unknown, other, or absent
  misc_difference 108: note = a, c, g, u, unknown, other, or absent
  misc_difference 109: note = a, c, g, u, unknown, other, or absent
  misc_difference 110: note = a, c, g, u, unknown, other, or absent
  misc_difference 111: note = a, c, g, u, unknown, other, or absent
  misc_difference 112: note = a, c, g, u, unknown, other, or absent
  misc_difference 113: note = a, c, g, u, unknown, other, or absent
  misc_difference 114: note = a, c, g, u, unknown, other, or absent
  misc_difference 115: note = a, c, g, u, unknown, other, or absent
  misc_difference 116: note = a, c, g, u, unknown, other, or absent
  misc_difference 117: note = a, c, g, u, unknown, other, or absent
  misc_difference 118: note = a, c, g, u, unknown, other, or absent
  misc_difference 119: note = a, c, g, u, unknown, other, or absent
  misc_difference 120: note = a, c, g, u, unknown, other, or absent
  misc_difference 121: note = a, c, g, u, unknown, other, or absent
  misc_difference 122: note = a, c, g, u, unknown, other, or absent
  misc_difference 123: note = a, c, g, u, unknown, other, or absent
  misc_difference 124: note = a, c, g, u, unknown, other, or absent
  misc_difference 125: note = a, c, g, u, unknown, other, or absent
  misc_difference 126: note = a, c, g, u, unknown, other, or absent
  misc_difference 127: note = a, c, g, u, unknown, other, or absent
  misc_difference 128: note = a, c, g, u, unknown, other, or absent
  misc_difference 129: note = a, c, g, u, unknown, other, or absent
  misc_difference 130: note = a, c, g, u, unknown, other, or absent
  misc_difference 131: note = a, c, g, u, unknown, other, or absent
  misc_difference 132: note = a, c, g, u, unknown, other, or absent
  misc_difference 133: note = a, c, g, u, unknown, other, or absent
  misc_difference 134: note = a, c, g, u, unknown, other, or absent
  misc_difference 135: note = a, c, g, u, unknown, other, or absent
  misc_difference 136: note = a, c, g, u, unknown, other, or absent
  misc_difference 137: note = a, c, g, u, unknown, other, or absent
  misc_difference 138: note = a, c, g, u, unknown, other, or absent
  misc_difference 139: note = a, c, g, u, unknown, other, or absent
  misc_difference 140: note = a, c, g, u, unknown, other, or absent
  misc_difference 141: note = a, c, g, u, unknown, other, or absent
  misc_difference 142: note = a, c, g, u, unknown, other, or absent
  misc_difference 143: note = a, c, g, u, unknown, other, or absent
  misc_difference 144: note = a, c, g, u, unknown, other, or absent
  misc_difference 145: note = a, c, g, u, unknown, other, or absent
  misc_difference 146: note = a, c, g, u, unknown, other, or absent
  misc_difference 147: note = a, c, g, u, unknown, other, or absent
  misc_difference 148: note = a, c, g, u, unknown, other, or absent
  misc_difference 149: note = a, c, g, u, unknown, other, or absent
  misc_difference 150: note = a, c, g, u, unknown, other, or absent
  misc_difference 151: note = a, c, g, u, unknown, other, or absent
  misc_difference 152: note = a, c, g, u, unknown, other, or absent
  misc_difference 153: note = a, c, g, u, unknown, other, or absent
  misc_difference 154: note = a, c, g, u, unknown, other, or absent
  misc_difference 155: note = a, c, g, u, unknown, other, or absent
  misc_difference 156: note = a, c, g, u, unknown, other, or absent
  misc_difference 157: note = a, c, g, u, unknown, other, or absent
  misc_difference 158: note = a, c, g, u, unknown, other, or absent
  misc_difference 159: note = a, c, g, u, unknown, other, or absent
  misc_difference 160: note = a, c, g, u, unknown, other, or absent
  misc_difference 161: note = a, c, g, u, unknown, other, or absent
  misc_difference 162: note = a, c, g, u, unknown, other, or absent
  misc_difference 163: note = a, c, g, u, unknown, other, or absent
  misc_difference 164: note = a, c, g, u, unknown, other, or absent
  misc_difference 165: note = a, c, g, u, unknown, other, or absent
  misc_difference 166: note = a, c, g, u, unknown, other, or absent
  misc_difference 167: note = a, c, g, u, unknown, other, or absent
  misc_difference 168: note = a, c, g, u, unknown, other, or absent
  misc_difference 169: note = a, c, g, u, unknown, other, or absent
  misc_difference 170: note = a, c, g, u, unknown, other, or absent
  misc_difference 171: note = a, c, g, u, unknown, other, or absent
  misc_difference 172: note = a, c, g, u, unknown, other, or absent
  misc_difference 173: note = a, c, g, u, unknown, other, or absent
  misc_difference 174: note = a, c, g, u, unknown, other, or absent
  misc_difference 175: note = a, c, g, u, unknown, other, or absent
  misc_difference 176: note = a, c, g, u, unknown, other, or absent
  misc_difference 177: note = a, c, g, u, unknown, other, or absent
  misc_difference 178: note = a, c, g, u, unknown, other, or absent
  misc_difference 179: note = a, c, g, u, unknown, other, or absent
  misc_difference 180: note = a, c, g, u, unknown, other, or absent
  misc_difference 181: note = a, c, g, u, unknown, other, or absent
  misc_difference 182: note = a, c, g, u, unknown, other, or absent
  misc_difference 183: note = a, c, g, u, unknown, other, or absent
  misc_difference 184: note = a, c, g, u, unknown, other, or absent
  misc_difference 185: note = a, c, g, u, unknown, other, or absent
  misc_difference 186: note = a, c, g, u, unknown, other, or absent
  misc_difference 187: note = a, c, g, u, unknown, other, or absent
  misc_difference 188: note = a, c, g, u, unknown, other, or absent
  misc_difference 189: note = a, c, g, u, unknown, other, or absent
  misc_difference 190: note = a, c, g, u, unknown, other, or absent
  misc_difference 191: note = a, c, g, u, unknown, other, or absent
  misc_difference 192: note = a, c, g, u, unknown, other, or absent
  misc_difference 193: note = a, c, g, u, unknown, other, or absent
  misc_difference 194: note = a, c, g, u, unknown, other, or absent
  misc_difference 195: note = a, c, g, u, unknown, other, or absent
  misc_difference 196: note = a, c, g, u, unknown, other, or absent
  misc_difference 197: note = a, c, g, u, unknown, other, or absent
  misc_difference 198: note = a, c, g, u, unknown, other, or absent
  misc_difference 199: note = a, c, g, u, unknown, other, or absent
  misc_difference 200: note = a, c, g, u, unknown, other, or absent
  misc_difference 201: note = a, c, g, u, unknown, other, or absent
  misc_difference 202: note = a, c, g, u, unknown, other, or absent
  misc_difference 203: note = a, c, g, u, unknown, other, or absent
  misc_difference 204: note = a, c, g, u, unknown, other, or absent
  misc_difference 205: note = a, c, g, u, unknown, other, or absent
  misc_difference 206: note = a, c, g, u, unknown, other, or absent
  misc_difference 207: note = a, c, g, u, unknown, other, or absent
  misc_difference 208: note = a, c, g, u, unknown, other, or absent
  misc_difference 209: note = a, c, g, u, unknown, other, or absent
  misc_difference 210: note = a, c, g, u, unknown, other, or absent
  misc_difference 211: note = a, c, g, u, unknown, other, or absent
  misc_difference 212: note = a, c, g, u, unknown, other, or absent
  misc_difference 213: note = a, c, g, u, unknown, other, or absent
  misc_difference 214: note = a, c, g, u, unknown, other, or absent
  misc_difference 215: note = a, c, g, u, unknown, other, or absent
  misc_difference 216: note = a, c, g, u, unknown, other, or absent
  misc_difference 217: note = a, c, g, u, unknown, other, or absent
  misc_difference 218: note = a, c, g, u, unknown, other, or absent
  misc_difference 219: note = a, c, g, u, unknown, other, or absent
  misc_difference 220: note = a, c, g, u, unknown, other, or absent
  misc_difference 221: note = a, c, g, u, unknown, other, or absent
  misc_difference 222: note = a, c, g, u, unknown, other, or absent
  misc_difference 223: note = a, c, g, u, unknown, other, or absent
  misc_difference 224: note = a, c, g, u, unknown, other, or absent
  misc_difference 225: note = a, c, g, u, unknown, other, or absent
  misc_difference 226: note = a, c, g, u, unknown, other, or absent
  misc_difference 227: note = a, c, g, u, unknown, other, or absent
  misc_difference 228: note = a, c, g, u, unknown, other, or absent
  misc_difference 229: note = a, c, g, u, unknown, other, or absent
  misc_difference 230: note = a, c, g, u, unknown, other, or absent
  misc_difference 231: note = a, c, g, u, unknown, other, or absent
  misc_difference 232: note = a, c, g, u, unknown, other, or absent
  misc_difference 233: note = a, c, g, u, unknown, other, or absent
  misc_difference 234: note = a, c, g, u, unknown, other, or absent
  misc_difference 235: note = a, c, g, u, unknown, other, or absent
  misc_difference 236: note = a, c, g, u, unknown, other, or absent
  misc_difference 237: note = a, c, g, u, unknown, other, or absent
  misc_difference 238: note = a, c, g, u, unknown, other, or absent
  misc_difference 239: note = a, c, g, u, unknown, other, or absent
  misc_difference 240: note = a, c, g, u, unknown, other, or absent
  misc_difference 241: note = a, c, g, u, unknown, other, or absent
  misc_difference 242: note = a, c, g, u, unknown, other, or absent
  misc_difference 243: note = a, c, g, u, unknown, other, or absent
  misc_difference 244: note = a, c, g, u, unknown, other, or absent
  misc_difference 245: note = a, c, g, u, unknown, other, or absent
  misc_difference 246: note = a, c, g, u, unknown, other, or absent
  misc_difference 247: note = a, c, g, u, unknown, other, or absent
  misc_difference 248: note = a, c, g, u, unknown, other, or absent
  misc_difference 249: note = a, c, g, u, unknown, other, or absent
  misc_difference 250: note = a, c, g, u, unknown, other, or absent
  misc_difference 251: note = a, c, g, u, unknown, other, or absent
  misc_difference 252: note = a, c, g, u, unknown, other, or absent
  misc_difference 253: note = a, c, g, u, unknown, other, or absent
  misc_difference 254: note = a, c, g, u, unknown, other, or absent
  misc_difference 255: note = a, c, g, u, unknown, other, or absent
  misc_difference 256: note = a, c, g, u, unknown, other, or absent
  misc_difference 257: note = a, c, g, u, unknown, other, or absent
  misc_difference 258: note = a, c, g, u, unknown, other, or absent
  misc_difference 259: note = a, c, g, u, unknown, other, or absent
  misc_difference 260: note = a, c, g, u, unknown, other, or absent
  misc_difference 261: note = a, c, g, u, unknown, other, or absent
  misc_difference 262: note = a, c, g, u, unknown, other, or absent
  misc_difference 263: note = a, c, g, u, unknown, other, or absent
  misc_difference 264: note = a, c, g, u, unknown, other, or absent
  misc_difference 265: note = a, c, g, u, unknown, other, or absent
  misc_difference 266: note = a, c, g, u, unknown, other, or absent
  misc_difference 267: note = a, c, g, u, unknown, other, or absent
  misc_difference 268: note = a, c, g, u, unknown, other, or absent
  misc_difference 269: note = a, c, g, u, unknown, other, or absent
  misc_difference 270: note = a, c, g, u, unknown, other, or absent
  misc_difference 271: note = a, c, g, u, unknown, other, or absent
  misc_difference 272: note = a, c, g, u, unknown, other, or absent
  misc_difference 273: note = a, c, g, u, unknown, other, or absent
  misc_difference 274: note = a, c, g, u, unknown, other, or absent
  misc_difference 275: note = a, c, g, u, unknown, other, or absent
  misc_difference 276: note = a, c, g, u, unknown, other, or absent
  misc_difference 277: note = a, c, g, u, unknown, other, or absent
  misc_difference 278: note = a, c, g, u, unknown, other, or absent
  misc_difference 279: note = a, c, g, u, unknown, other, or absent
  misc_difference 280: note = a, c, g, u, unknown, other, or absent
  misc_difference 281: note = a, c, g, u, unknown, other, or absent
  misc_difference 282: note = a, c, g, u, unknown, other, or absent
  misc_difference 283: note = a, c, g, u, unknown, other, or absent
  misc_difference 284: note = a, c, g, u, unknown, other, or absent
  misc_difference 285: note = a, c, g, u, unknown, other, or absent
  misc_difference 286: note = a, c, g, u, unknown, other, or absent
  misc_difference 287: note = a, c, g, u, unknown, other, or absent
  misc_difference 288: note = a, c, g, u, unknown, other, or absent
  misc_difference 289: note = a, c, g, u, unknown, other, or absent
  misc_difference 290: note = a, c, g, u, unknown, other, or absent
  misc_difference 291: note = a, c, g, u, unknown, other, or absent
  misc_difference 292: note = a, c, g, u, unknown, other, or absent
  misc_difference 293: note = a, c, g, u, unknown, other, or absent
  misc_difference 294: note = a, c, g, u, unknown, other, or absent
  misc_difference 295: note = a, c, g, u, unknown, other, or absent
  misc_difference 296: note = a, c, g, u, unknown, other, or absent
  misc_difference 297: note = a, c, g, u, unknown, other, or absent
  misc_difference 298: note = a, c, g, u, unknown, other, or absent
  misc_difference 299: note = a, c, g, u, unknown, other, or absent
  misc_difference 300: note = a, c, g, u, unknown, other, or absent
  misc_difference 301: note = a, c, g, u, unknown, other, or absent
  misc_difference 302: note = a, c, g, u, unknown, other, or absent
  misc_difference 303: note = a, c, g, u, unknown, other, or absent
  misc_difference 304: note = a, c, g, u, unknown, other, or absent
  misc_difference 305: note = a, c, g, u, unknown, other, or absent
  misc_difference 306: note = a, c, g, u, unknown, other, or absent
  misc_difference 307: note = a, c, g, u, unknown, other, or absent
  misc_difference 308: note = a, c, g, u, unknown, other, or absent
  misc_difference 309: note = a, c, g, u, unknown, other, or absent
  misc_difference 310: note = a, c, g, u, unknown, other, or absent
  misc_difference 311: note = a, c, g, u, unknown, other, or absent
  misc_difference 312: note = a, c, g, u, unknown, other, or absent
  misc_difference 313: note = a, c, g, u, unknown, other, or absent
  misc_difference 314: note = a, c, g, u, unknown, other, or absent
  misc_difference 315: note = May be absent
  misc_difference 316: note = May be absent
  misc_difference 317: note = May be absent
  misc_difference 318: note = May be absent
  misc_difference 319: note = May be absent
  misc_difference 320: note = May be absent
  misc_difference 321: note = May be absent
  misc_difference 322: note = May be absent
  misc_difference 323: note = May be absent
  misc_difference 324: note = May be absent
  misc_difference 325: note = May be absent
  misc_difference 326: note = May be absent
  misc_difference 327: note = May be absent
  misc_difference 328: note = May be absent
  misc_difference 329: note = May be absent
  misc_difference 330: note = May be absent
  misc_difference 331: note = May be absent
  misc_difference 332: note = May be absent
  misc_difference 333: note = May be absent
  misc_difference 334: note = May be absent
  misc_difference 335: note = May be absent
  misc_difference 336: note = May be absent
  misc_difference 337: note = May be absent
  misc_difference 338: note = May be absent
  misc_difference 339: note = May be absent
  misc_difference 44..315: note = This region may encompass 1-271 nucleotides
rbcnbvktrgygcagydgghagyryryyrgkyycataahyyvrnnnnnnnnnnnnnnnnnnnnnnnnnnnnnnnnnnnnnnnnnnnnnnnnnnnnnnnnnnnnnnnnnnnnnnnnnnnnnnnnnnnnnnnnnnnnnnnnnnnnnnnnnnnnnnnnnnnnnnnnnnnnnnnnnnnnnnnnnnnnnnnnnnnnnnnnnnnnnnnnnnnnnnnnnnnnnnnnnnnnnnnnnnnnnnnnnnnnnnnnnnnnnnnnnnnnnnnnnnnnnnnnnnnnnnnnnnnnnnnnnnnnnnnnnnnnnnnnnnnnnnnnnnnnnnnsdkrgdtsdadmmymwsmbvbgsya

SEQ ID NO: 594 - RNA, 339 nt, synthetic construct
  source 1..339: mol_type = other RNA
  misc_difference 1: note = May be absent
  misc_difference 2: note = May be absent
  misc_difference 3: note = May be absent
  misc_difference 4: note = May be absent
  misc_difference 5: note = May be absent
  misc_difference 6: note = May be absent
  misc_difference 7: note = May be absent
  misc_difference 8: note = May be absent
  misc_difference 9: note = May be absent
  misc_difference 10: note = May be absent
  misc_difference 11: note = May be absent
  misc_difference 12: note = May be absent
  misc_difference 13: note = May be absent
  misc_difference 14: note = May be absent
  misc_difference 15: note = May be absent
  misc_difference 16: note = May be absent
  misc_difference 17: note = May be absent
  misc_difference 18: note = May be absent
  misc_difference 19: note = May be absent
  misc_difference 20: note = May be absent
  misc_difference 21: note = May be absent
  misc_difference 22: note = May be absent
  misc_difference 23: note = May be absent
  misc_difference 24: note = May be absent
  misc_difference 25: note = May be absent
  misc_difference 26: note = May be absent
  misc_difference 27: note = May be absent
  misc_difference 28: note = May be absent
  misc_difference 29: note = May be absent
  misc_difference 30: note = May be absent
  misc_difference 31: note = May be absent
  misc_difference 32: note = May be absent
  misc_difference 33: note = May be absent
  misc_difference 34: note = May be absent
  misc_difference 35: note = May be absent
  misc_difference 36: note = May be absent
  misc_difference 37: note = May be absent
  misc_difference 38: note = May be absent
  misc_difference 39: note = May be absent
  misc_difference 40: note = May be absent
  misc_difference 41: note = May be absent
  misc_difference 42: note = May be absent
  misc_difference 43: note = May be absent
  misc_difference 44: note = a, c, g, u, unknown, other, or absent
  misc_difference 45: note = a, c, g, u, unknown, other, or absent
  misc_difference 46: note = a, c, g, u, unknown, other, or absent
  misc_difference 47: note = a, c, g, u, unknown, other, or absent
  misc_difference 48: note = a, c, g, u, unknown, other, or absent
  misc_difference 49: note = a, c, g, u, unknown, other, or absent
  misc_difference 50: note = a, c, g, u, unknown, other, or absent
  misc_difference 51: note = a, c, g, u, unknown, other, or absent
  misc_difference 52: note = a, c, g, u, unknown, other, or absent
  misc_difference 53: note = a, c, g, u, unknown, other, or absent
  misc_difference 54: note = a, c, g, u, unknown, other, or absent
  misc_difference 55: note = a, c, g, u, unknown, other, or absent
  misc_difference 56: note = a, c, g, u, unknown, other, or absent
  misc_difference 57: note = a, c, g, u, unknown, other, or absent
  misc_difference 58: note = a, c, g, u, unknown, other, or absent
  misc_difference 59: note = a, c, g, u, unknown, other, or absent
  misc_difference 60: note = a, c, g, u, unknown, other, or absent
  misc_difference 61: note = a, c, g, u, unknown, other, or absent
  misc_difference 62: note = a, c, g, u, unknown, other, or absent
  misc_difference 63: note = a, c, g, u, unknown, other, or absent
  misc_difference 64: note = a, c, g, u, unknown, other, or absent
  misc_difference 65: note = a, c, g, u, unknown, other, or absent
  misc_difference 66: note = a, c, g, u, unknown, other, or absent
  misc_difference 67: note = a, c, g, u, unknown, other, or absent
  misc_difference 68: note = a, c, g, u, unknown, other, or absent
  misc_difference 69: note = a, c, g, u, unknown, other, or absent
  misc_difference 70: note = a, c, g, u, unknown, other, or absent
  misc_difference 71: note = a, c, g, u, unknown, other, or absent
  misc_difference 72: note = a, c, g, u, unknown, other, or absent
  misc_difference 73: note = a, c, g, u, unknown, other, or absent
  misc_difference 74: note = a, c, g, u, unknown, other, or absent
  misc_difference 75: note = a, c, g, u, unknown, other, or absent
  misc_difference 76: note = a, c, g, u, unknown, other, or absent
  misc_difference 77: note = a, c, g, u, unknown, other, or absent
  misc_difference 78: note = a, c, g, u, unknown, other, or absent
  misc_difference 79: note = a, c, g, u, unknown, other, or absent
  misc_difference 80: note = a, c, g, u, unknown, other, or absent
  misc_difference 81: note = a, c, g, u, unknown, other, or absent
  misc_difference 82: note = a, c, g, u, unknown, other, or absent
  misc_difference 83: note = a, c, g, u, unknown, other, or absent
  misc_difference 84: note = a, c, g, u, unknown, other, or absent
  misc_difference 85: note = a, c, g, u, unknown, other, or absent
  misc_difference 86: note = a, c, g, u, unknown, other, or absent
  misc_difference 87: note = a, c, g, u, unknown, other, or absent
  misc_difference 88: note = a, c, g, u, unknown, other, or absent
  misc_difference 89: note = a, c, g, u, unknown, other, or absent
  misc_difference 90: note = a, c, g, u, unknown, other, or absent
  misc_difference 91: note = a, c, g, u, unknown, other, or absent
  misc_difference 92: note = a, c, g, u, unknown, other, or absent
  misc_difference 93: note = a, c, g, u, unknown, other, or absent
  misc_difference 94: note = a, c, g, u, unknown, other, or absent
  misc_difference 95: note = a, c, g, u, unknown, other, or absent
  misc_difference 96: note = a, c, g, u, unknown, other, or absent
  misc_difference 97: note = a, c, g, u, unknown, other, or absent
  misc_difference 98: note = a, c, g, u, unknown, other, or absent
  misc_difference 99: note = a, c, g, u, unknown, other, or absent
  misc_difference 100: note = a, c, g, u, unknown, other, or absent
  misc_difference 101: note = a, c, g, u, unknown, other, or absent
  misc_difference 102: note = a, c, g, u, unknown, other, or absent
  misc_difference 103: note = a, c, g, u, unknown, other, or absent
  misc_difference 104: note = a, c, g, u, unknown, other, or absent
  misc_difference 105: note = a, c, g, u, unknown, other, or absent
  misc_difference 106: note = a, c, g, u, unknown, other, or absent
  misc_difference 107: note = a, c, g, u, unknown, other, or absent
  misc_difference 108: note = a, c, g, u, unknown, other, or absent
  misc_difference 109: note = a, c, g, u, unknown, other, or absent
  misc_difference 110: note = a, c, g, u, unknown, other, or absent
  misc_difference 111: note = a, c, g, u, unknown, other, or absent
  misc_difference 112: note = a, c, g, u, unknown, other, or absent
  misc_difference 113: note = a, c, g, u, unknown, other, or absent
  misc_difference 114: note = a, c, g, u, unknown, other, or absent
  misc_difference 115: note = a, c, g, u, unknown, other, or absent
  misc_difference 116: note = a, c, g, u, unknown, other, or absent
  misc_difference 117: note = a, c, g, u, unknown, other, or absent
  misc_difference 118: note = a, c, g, u, unknown, other, or absent
  misc_difference 119: note = a, c, g, u, unknown, other, or absent
  misc_difference 120: note = a, c, g, u, unknown, other, or absent
  misc_difference 121: note = a, c, g, u, unknown, other, or absent
  misc_difference 122: note = a, c, g, u, unknown, other, or absent
  misc_difference 123: note = a, c, g, u, unknown, other, or absent
  misc_difference 124: note = a, c, g, u, unknown, other, or absent
  misc_difference 125: note = a, c, g, u, unknown, other, or absent
  misc_difference 126: note = a, c, g, u, unknown, other, or absent
  misc_difference 127: note = a, c, g, u, unknown, other, or absent
  misc_difference 128: note = a, c, g, u, unknown, other, or absent
  misc_difference 129: note = a, c, g, u, unknown, other, or absent
  misc_difference 130: note = a, c, g, u, unknown, other, or absent
  misc_difference 131: note = a, c, g, u, unknown, other, or absent
  misc_difference 132: note = a, c, g, u, unknown, other, or absent
  misc_difference 133: note = a, c, g, u, unknown, other, or absent
  misc_difference 134: note = a, c, g, u, unknown, other, or absent
  misc_difference 135: note = a, c, g, u, unknown, other, or absent
  misc_difference 136: note = a, c, g, u, unknown, other, or absent
  misc_difference 137: note = a, c, g, u, unknown, other, or absent
  misc_difference 138: note = a, c, g, u, unknown, other, or absent
  misc_difference 139: note = a, c, g, u, unknown, other, or absent
  misc_difference 140: note = a, c, g, u, unknown, other, or absent
  misc_difference 141: note = a, c, g, u, unknown, other, or absent
  misc_difference 142: note = a, c, g, u, unknown, other, or absent
  misc_difference 143: note = a, c, g, u, unknown, other, or absent
  misc_difference 144: note = a, c, g, u, unknown, other, or absent
  misc_difference 145: note = a, c, g, u, unknown, other, or absent
  misc_difference 146: note = a, c, g, u, unknown, other, or absent
  misc_difference 147: note = a, c, g, u, unknown, other, or absent
  misc_difference 148: note = a, c, g, u, unknown, other, or absent
  misc_difference 149: note = a, c, g, u, unknown, other, or absent
  misc_difference 150: note = a, c, g, u, unknown, other, or absent
  misc_difference 151: note = a, c, g, u, unknown, other, or absent
  misc_difference 152: note = a, c, g, u, unknown, other, or absent
  misc_difference 153: note = a, c, g, u, unknown, other, or absent
  misc_difference 154: note = a, c, g, u, unknown, other, or absent
  misc_difference 155: note = a, c, g, u, unknown, other, or absent
  misc_difference 156: note = a, c, g, u, unknown, other, or absent
  misc_difference 157: note = a, c, g, u, unknown, other, or absent
  misc_difference 158: note = a, c, g, u, unknown, other, or absent
  misc_difference 159: note = a, c, g, u, unknown, other, or absent
  misc_difference 160: note = a, c, g, u, unknown, other, or absent
  misc_difference 161: note = a, c, g, u, unknown, other, or absent
  misc_difference 162: note = a, c, g, u, unknown, other, or absent
  misc_difference 163: note = a, c, g, u, unknown, other, or absent
  misc_difference 164: note = a, c, g, u, unknown, other, or absent
  misc_difference 165: note = a, c, g, u, unknown, other, or absent
  misc_difference 166: note = a, c, g, u, unknown, other, or absent
  misc_difference 167: note = a, c, g, u, unknown, other, or absent
  misc_difference 168: note = a, c, g, u, unknown, other, or absent
  misc_difference 169: note = a, c, g, u, unknown, other, or absent
  misc_difference 170: note = a, c, g, u, unknown, other, or absent
  misc_difference 171: note = a, c, g, u, unknown, other, or absent
  misc_difference 172: note = a, c, g, u, unknown, other, or absent
  misc_difference 173: note = a, c, g, u, unknown, other, or absent
  misc_difference 174: note = a, c, g, u, unknown, other, or absent
  misc_difference 175: note = a, c, g, u, unknown, other, or absent
  misc_difference 176: note = a, c, g, u, unknown, other, or absent
  misc_difference 177: note = a, c, g, u, unknown, other, or absent
  misc_difference 178: note = a, c, g, u, unknown, other, or absent
  misc_difference 179: note = a, c, g, u, unknown, other, or absent
  misc_difference 180: note = a, c, g, u, unknown, other, or absent
  misc_difference 181: note = a, c, g, u, unknown, other, or absent
  misc_difference 182: note = a, c, g, u, unknown, other, or absent
  misc_difference 183: note = a, c, g, u, unknown, other, or absent
  misc_difference 184: note = a, c, g, u, unknown, other, or absent
  misc_difference 185: note = a, c, g, u, unknown, other, or absent
  misc_difference 186: note = a, c, g, u, unknown, other, or absent
  misc_difference 187: note = a, c, g, u, unknown, other, or absent
  misc_difference 188: note = a, c, g, u, unknown, other, or absent
  misc_difference 189: note = a, c, g, u, unknown, other, or absent
  misc_difference 190: note = a, c, g, u, unknown, other, or absent
  misc_difference 191: note = a, c, g, u, unknown, other, or absent
  misc_difference 192: note = a, c, g, u, unknown, other, or absent
  misc_difference 193: note = a, c, g, u, unknown, other, or absent
  misc_difference 194: note = a, c, g, u, unknown, other, or absent
  misc_difference 195: note = a, c, g, u, unknown, other, or absent
  misc_difference 196: note = a, c, g, u, unknown, other, or absent
  misc_difference 197: note = a, c, g, u, unknown, other, or absent
  misc_difference 198: note = a, c, g, u, unknown, other, or absent
  misc_difference 199: note = a, c, g, u, unknown, other, or absent
  misc_difference 200: note = a, c, g, u, unknown, other, or absent
  misc_difference 201: note = a, c, g, u, unknown, other, or absent
  misc_difference 202: note = a, c, g, u, unknown, other, or absent
  misc_difference 203: note = a, c, g, u, unknown, other, or absent
  misc_difference 204: note = a, c, g, u, unknown, other, or absent
  misc_difference 205: note = a, c, g, u, unknown, other, or absent
  misc_difference 206: note = a, c, g, u, unknown, other, or absent
  misc_difference 207: note = a, c, g, u, unknown, other, or absent
  misc_difference 208: note = a, c, g, u, unknown, other, or absent
  misc_difference 209: note = a, c, g, u, unknown, other, or absent
  misc_difference 210: note = a, c, g, u, unknown, other, or absent
  misc_difference 211: note = a, c, g, u, unknown, other, or absent
  misc_difference 212: note = a, c, g, u, unknown, other, or absent
  misc_difference 213: note = a, c, g, u, unknown, other, or absent
  misc_difference 214: note = a, c, g, u, unknown, other, or absent
  misc_difference 215: note = a, c, g, u, unknown, other, or absent
  misc_difference 216: note = a, c, g, u, unknown, other, or absent
  misc_difference 217: note = a, c, g, u, unknown, other, or absent
  misc_difference 218: note = a, c, g, u, unknown, other, or absent
  misc_difference 219: note = a, c, g, u, unknown, other, or absent
  misc_difference 220: note = a, c, g, u, unknown, other, or absent
  misc_difference 221: note = a, c, g, u, unknown, other, or absent
  misc_difference 222: note = a, c, g, u, unknown, other, or absent
  misc_difference 223: note = a, c, g, u, unknown, other, or absent
  misc_difference 224: note = a, c, g, u, unknown, other, or absent
  misc_difference 225: note = a, c, g, u, unknown, other, or absent
  misc_difference 226: note = a, c, g, u, unknown, other, or absent
  misc_difference 227: note = a, c, g, u, unknown, other, or absent
  misc_difference 228: note = a, c, g, u, unknown, other, or absent
  misc_difference 229: note = a, c, g, u, unknown, other, or absent
  misc_difference 230: note = a, c, g, u, unknown, other, or absent
  misc_difference 231: note = a, c, g, u, unknown, other, or absent
  misc_difference 232: note = a, c, g, u, unknown, other, or absent
  misc_difference 233: note = a, c, g, u, unknown, other, or absent
  misc_difference 234: note = a, c, g, u, unknown, other, or absent
  misc_difference 235: note = a, c, g, u, unknown, other, or absent
  misc_difference 236: note = a, c, g, u, unknown, other, or absent
  misc_difference 237: note = a, c, g, u, unknown, other, or absent
  misc_difference 238: note = a, c, g, u, unknown, other, or absent
  misc_difference 239: note = a, c, g, u, unknown, other, or absent
  misc_difference 240: note = a, c, g, u, unknown, other, or absent
  misc_difference 241: note = a, c, g, u, unknown, other, or absent
  misc_difference 242: note = a, c, g, u, unknown, other, or absent
  misc_difference 243: note = a, c, g, u, unknown, other, or absent
  misc_difference 244: note = a, c, g, u, unknown, other, or absent
  misc_difference 245: note = a, c, g, u, unknown, other, or absent
  misc_difference 246: note = a, c, g, u, unknown, other, or absent
  misc_difference 247: note = a, c, g, u, unknown, other, or absent
  misc_difference 248: note = a, c, g, u, unknown, other, or absent
  misc_difference 249: note = a, c, g, u, unknown, other, or absent
  misc_difference 250: note = a, c, g, u, unknown, other, or absent
  misc_difference 251: note = a, c, g, u, unknown, other, or absent
  misc_difference 252: note = a, c, g, u, unknown, other, or absent
  misc_difference 253: note = a, c, g, u, unknown, other, or absent
  misc_difference 254: note = a, c, g, u, unknown, other, or absent
  misc_difference 255: note = a, c, g, u, unknown, other, or absent
  misc_difference 256: note = a, c, g, u, unknown, other, or absent
  misc_difference 257: note = a, c, g, u, unknown, other, or absent
  misc_difference 258: note = a, c, g, u, unknown, other, or absent
  misc_difference 259: note = a, c, g, u, unknown, other, or absent
  misc_difference 260: note = a, c, g, u, unknown, other, or absent
  misc_difference 261: note = a, c, g, u, unknown, other, or absent
  misc_difference 262: note = a, c, g, u, unknown, other, or absent
  misc_difference 263: note = a, c, g, u, unknown, other, or absent
  misc_difference 264: note = a, c, g, u, unknown, other, or absent
  misc_difference 265: note = a, c, g, u, unknown, other, or absent
  misc_difference 266: note = a, c, g, u, unknown, other, or absent
  misc_difference 267: note = a, c, g, u, unknown, other, or absent
  misc_difference 268: note = a, c, g, u, unknown, other, or absent
  misc_difference 269: note = a, c, g, u, unknown, other, or absent
  misc_difference 270: note = a, c, g, u, unknown, other, or absent
  misc_difference 271: note = a, c, g, u, unknown, other, or absent
  misc_difference 272: note = a, c, g, u, unknown, other, or absent
  misc_difference 273: note = a, c, g, u, unknown, other, or absent
  misc_difference 274: note = a, c, g, u, unknown, other, or absent
  misc_difference 275: note = a, c, g, u, unknown, other, or absent
  misc_difference 276: note = a, c, g, u, unknown, other, or absent
  misc_difference 277: note = a, c, g, u, unknown, other, or absent
  misc_difference 278: note = a, c, g, u, unknown, other, or absent
  misc_difference 279: note = a, c, g, u, unknown, other, or absent
  misc_difference 280: note = a, c, g, u, unknown, other, or absent
  misc_difference 281: note = a, c, g, u, unknown, other, or absent
  misc_difference 282: note = a, c, g, u, unknown, other, or absent
  misc_difference 283: note = a, c, g, u, unknown, other, or absent
  misc_difference 284: note = a, c, g, u, unknown, other, or absent
  misc_difference 285: note = a, c, g, u, unknown, other, or absent
  misc_difference 286: note = a, c, g, u, unknown, other, or absent
  misc_difference 287: note = a, c, g, u, unknown, other, or absent
  misc_difference 288: note = a, c, g, u, unknown, other, or absent
  misc_difference 289: note = a, c, g, u, unknown, other, or absent
  misc_difference 290: note = a, c, g, u, unknown, other, or absent
  misc_difference 291: note = a, c, g, u, unknown, other, or absent
  misc_difference 292: note = a, c, g, u, unknown, other, or absent
  misc_difference 293: note = a, c, g, u, unknown, other, or absent
  misc_difference 294: note = a, c, g, u, unknown, other, or absent
  misc_difference 295: note = a, c, g, u, unknown, other, or absent
  misc_difference 296: note = a, c, g, u, unknown, other, or absent
  misc_difference 297: note = a, c, g, u, unknown, other, or absent
  misc_difference 298: note = a, c, g, u, unknown, other, or absent
  misc_difference 299: note = a, c, g, u, unknown, other, or absent
  misc_difference 300: note = a, c, g, u, unknown, other, or absent
  misc_difference 301: note = a, c, g, u, unknown, other, or absent
  misc_difference 302: note = a, c, g, u, unknown, other, or absent
  misc_difference 303: note = a, c, g, u, unknown, other, or absent
  misc_difference 304: note = a, c, g, u, unknown, other, or absent
  misc_difference 305: note = a, c, g, u, unknown, other, or absent
  misc_difference 306: note = a, c, g, u, unknown, other, or absent
  misc_difference 307: note = a, c, g, u, unknown, other, or absent
  misc_difference 308: note = a, c, g, u, unknown, other, or absent
  misc_difference 309: note = a, c, g, u, unknown, other, or absent
  misc_difference 310: note = a, c, g, u, unknown, other, or absent
  misc_difference 311: note = a, c, g, u, unknown, other, or absent
  misc_difference 312: note = a, c, g, u, unknown, other, or absent
  misc_difference 313: note = a, c, g, u, unknown, other, or absent
  misc_difference 314: note = a, c, g, u, unknown, other, or absent
  misc_difference 315: note = May be absent
  misc_difference 316: note = May be absent
  misc_difference 317: note = May be absent
  misc_difference 318: note = May be absent
  misc_difference 319: note = May be absent
  misc_difference 320: note = May be absent
  misc_difference 321: note = May be absent
  misc_difference 322: note = May be absent
  misc_difference 323: note = May be absent
  misc_difference 324: note = May be absent
  misc_difference 325: note = May be absent
  misc_difference 326: note = May be absent
  misc_difference 327: note = May be absent
  misc_difference 328: note = May be absent
  misc_difference 329: note = May be absent
  misc_difference 330: note = May be absent
  misc_difference 331: note = May be absent
  misc_difference 332: note = May be absent
  misc_difference 333: note = May be absent
  misc_difference 334: note = May be absent
  misc_difference 335: note = May be absent
  misc_difference 336: note = May be absent
  misc_difference 337: note = May be absent
  misc_difference 338: note = May be absent
  misc_difference 339: note = May be absent
  misc_difference 44..315: note = This region may encompass 1-271 nucleotides
rschbvktrgygcagydgghagcryryyrgkyycataaycyrrnnnnnnnnnnnnnnnnnnnnnnnnnnnnnnnnnnnnnnnnnnnnnnnnnnnnnnnnnnnnnnnnnnnnnnnnnnnnnnnnnnnnnnnnnnnnnnnnnnnnnnnnnnnnnnnnnnnnnnnnnnnnnnnnnnnnnnnnnnnnnnnnnnnnnnnnnnnnnnnnnnnnnnnnnnnnnnnnnnnnnnnnnnnnnnnnnnnnnnnnnnnnnnnnnnnnnnnnnnnnnnnnnnnnnnnnnnnnnnnnnnnnnnnnnnnnnnnnnnnnnnnnnnnnnnnswkrgwtsdadmcymwsmbvkgsya

SEQ ID NO: 595 - RNA, 342 nt, synthetic construct
  source 1..342: mol_type = other RNA
  misc_difference 1: note = May be absent
  misc_difference 2: note = a, c, g, u, unknown, other, or absent
  misc_difference 3: note = a, c, g, u, unknown, other, or absent
  misc_difference 4: note = a, c, g, u, unknown, other, or absent
  misc_difference 5: note = a, c, g, u, unknown, other, or absent
  misc_difference 6: note = a, c, g, u, unknown, other, or absent
  misc_difference 7: note = a, c, g, u, unknown, other, or absent
  misc_difference 8: note = May be absent
  misc_difference 9: note = a, c, g, u, unknown, other, or absent
  misc_difference 10: note = a, c, g, u, unknown, other, or absent
  misc_difference 11: note = a, c, g, u, unknown, other, or absent
  misc_difference 12: note = a, c, g, u, unknown, other, or absent
  misc_difference 13: note = May be absent
  misc_difference 14: note = May be absent
  misc_difference 15: note = May be absent
  misc_difference 16: note = a, c, g, u, unknown, other, or absent
  misc_difference 17: note = May be absent
  misc_difference 18: note = May be absent
  misc_difference 19: note = May be absent
  misc_difference 20: note = May be absent
  misc_difference 21: note = May be absent
  misc_difference 22: note = May be absent
  misc_difference 23: note = a, c, g, u, unknown, other, or absent
  misc_difference 24: note = May be absent
  misc_difference 25: note = May be absent
  misc_difference 26: note = a, c, g, u, unknown, other, or absent
  misc_difference 27: note = May be absent
  misc_difference 28: note = a, c, g, u, unknown, other, or absent
  misc_difference 29: note = a, c, g, u, unknown, other, or absent
  misc_difference 30: note = a, c, g, u, unknown, other, or absent
  misc_difference 31: note = a, c, g, u, unknown, other, or absent
  misc_difference 32: note = a, c, g, u, unknown, other, or absent
  misc_difference 33: note = a, c, g, u, unknown, other, or absent
  misc_difference 34: note = a, c, g, u, unknown, other, or absent
  misc_difference 35: note = May be absent
  misc_difference 36: note = May be absent
  misc_difference 37: note = a, c, g, u, unknown, other, or absent
  misc_difference 38: note = May be absent
  misc_difference 39: note = May be absent
  misc_difference 40: note = May be absent
  misc_difference 41: note = a, c, g, u, unknown, other, or absent
  misc_difference 42: note = a, c, g, u, unknown, other, or absent
  misc_difference 43: note = a, c, g, u, unknown, other, or absent
  misc_difference 44: note = a, c, g, u, unknown, other, or absent
  misc_difference 45: note = a, c, g, u, unknown, other, or absent
  misc_difference 46: note = a, c, g, u, unknown, other, or absent
  misc_difference 47: note = a, c, g, u, unknown, other, or absent
  misc_difference 48: note = a, c, g, u, unknown, other, or absent
  misc_difference 49: note = a, c, g, u, unknown, other, or absent
  misc_difference 50: note = a, c, g, u, unknown, other, or absent
  misc_difference 51: note = a, c, g, u, unknown, other, or absent
  misc_difference 52: note = a, c, g, u, unknown, other, or absent
  misc_difference 53: note = a, c, g, u, unknown, other, or absent
  misc_difference 54: note = a, c, g, u, unknown, other, or absent
  misc_difference 55: note = a, c, g, u, unknown, other, or absent
  misc_difference 56: note = a, c, g, u, unknown, other, or absent
  misc_difference 57: note = a, c, g, u, unknown, other, or absent
  misc_difference 58: note = a, c, g, u, unknown, other, or absent
  misc_difference 59: note = a, c, g, u, unknown, other, or absent
  misc_difference 60: note = a, c, g, u, unknown, other, or absent
  misc_difference 61: note = a, c, g, u, unknown, other, or absent
  misc_difference 62: note = a, c, g, u, unknown, other, or absent
  misc_difference 63: note = a, c, g, u, unknown, other, or absent
  misc_difference 64: note = a, c, g, u, unknown, other, or absent
  misc_difference 65: note = a, c, g, u, unknown, other, or absent
  misc_difference 66: note = a, c, g, u, unknown, other, or absent
  misc_difference 67: note = a, c, g, u, unknown, other, or absent
  misc_difference 68: note = a, c, g, u, unknown, other, or absent
  misc_difference 69: note = a, c, g, u, unknown, other, or absent
  misc_difference 70: note = a, c, g, u, unknown, other, or absent
  misc_difference 71: note = a, c, g, u, unknown, other, or absent
  misc_difference 72: note = a, c, g, u, unknown, other, or absent
  misc_difference 73: note = a, c, g, u, unknown, other, or absent
  misc_difference 74: note = a, c, g, u, unknown, other, or absent
  misc_difference 75: note = a, c, g, u, unknown, other, or absent
  misc_difference 76: note = a, c, g, u, unknown, other, or absent
  misc_difference 77: note = a, c, g, u, unknown, other, or absent
  misc_difference 78: note = a, c, g, u, unknown, other, or absent
  misc_difference 79: note = a, c, g, u, unknown, other, or absent
  misc_difference 80: note = a, c, g, u, unknown, other, or absent
  misc_difference 81: note = a, c, g, u, unknown, other, or absent
  misc_difference 82: note = a, c, g, u, unknown, other, or absent
  misc_difference 83: note = a, c, g, u, unknown, other, or absent
  misc_difference 84: note = a, c, g, u, unknown, other, or absent
  misc_difference 85: note = a, c, g, u, unknown, other, or absent
  misc_difference 86: note = a, c, g, u, unknown, other, or absent
  misc_difference 87: note = a, c, g, u, unknown, other, or absent
  misc_difference 88: note = a, c, g, u, unknown, other, or absent
  misc_difference 89: note = a, c, g, u, unknown, other, or absent
  misc_difference 90: note = a, c, g, u, unknown, other, or absent
  misc_difference 91: note = a, c, g, u, unknown, other, or absent
  misc_difference 92: note = a, c, g, u, unknown, other, or absent
  misc_difference 93: note = a, c, g, u, unknown, other, or absent
  misc_difference 94: note = a, c, g, u, unknown, other, or absent
  misc_difference 95: note = a, c, g, u, unknown, other, or absent
  misc_difference 96: note = a, c, g, u, unknown, other, or absent
  misc_difference 97: note = a, c, g, u, unknown, other, or absent
  misc_difference 98: note = a, c, g, u, unknown, other, or absent
  misc_difference 99: note = a, c, g, u, unknown, other, or absent
  misc_difference 100: note = a, c, g, u, unknown, other, or absent
  misc_difference 101: note = a, c, g, u, unknown, other, or absent
  misc_difference 102: note = a, c, g, u, unknown, other, or absent
  misc_difference 103: note = a, c, g, u, unknown, other, or absent
  misc_difference 104: note = a, c, g, u, unknown, other, or absent
  misc_difference 105: note = a, c, g, u, unknown, other, or absent
  misc_difference 106: note = a, c, g, u, unknown, other, or absent
  misc_difference 107: note = a, c, g, u, unknown, other, or absent
  misc_difference 108: note = a, c, g, u, unknown, other, or absent
  misc_difference 109: note = a, c, g, u, unknown, other, or absent
  misc_difference 110: note = a, c, g, u, unknown, other, or absent
  misc_difference 111: note = a, c, g, u, unknown, other, or absent
  misc_difference 112: note = a, c, g, u, unknown, other, or absent
  misc_difference 113: note = a, c, g, u, unknown, other, or absent
  misc_difference 114: note = a, c, g, u, unknown, other, or absent
  misc_difference 115: note = a, c, g, u, unknown, other, or absent
  misc_difference 116: note = a, c, g, u, unknown, other, or absent
  misc_difference 117: note = a, c, g, u, unknown, other, or absent
  misc_difference 118: note = a, c, g, u, unknown, other, or absent
  misc_difference 119: note = a, c, g, u, unknown, other, or absent
  misc_difference 120: note = a, c, g, u, unknown, other, or absent
  misc_difference 121: note = a, c, g, u, unknown, other, or absent
  misc_difference 122: note = a, c, g, u, unknown, other, or absent
  misc_difference 123: note = a, c, g, u, unknown, other, or absent
  misc_difference 124: note = a, c, g, u, unknown, other, or absent
  misc_difference 125: note = a, c, g, u, unknown, other, or absent
  misc_difference 126: note = a, c, g, u, unknown, other, or absent
  misc_difference 127: note = a, c, g, u, unknown, other, or absent
  misc_difference 128: note = a, c, g, u, unknown, other, or absent
  misc_difference 129: note = a, c, g, u, unknown, other, or absent
  misc_difference 130: note = a, c, g, u, unknown, other, or absent
  misc_difference 131: note = a, c, g, u, unknown, other, or absent
  misc_difference 132: note = a, c, g, u, unknown, other, or absent
  misc_difference 133: note = a, c, g, u, unknown, other, or absent
  misc_difference 134: note = a, c, g, u, unknown, other, or absent
  misc_difference 135: note = a, c, g, u, unknown, other, or absent
  misc_difference 136: note = a, c, g, u, unknown, other, or absent
  misc_difference 137: note = a, c, g, u, unknown, other, or absent
  misc_difference 138: note = a, c, g, u, unknown, other, or absent
  misc_difference 139: note = a, c, g, u, unknown, other, or absent
  misc_difference 140: note = a, c, g, u, unknown, other, or absent
  misc_difference 141: note = a, c, g, u, unknown, other, or absent
  misc_difference 142: note = a, c, g, u, unknown, other, or absent
  misc_difference 143: note = a, c, g, u, unknown, other, or absent
  misc_difference 144: note = a, c, g, u, unknown, other, or absent
  misc_difference 145: note = a, c, g, u, unknown, other, or absent
  misc_difference 146: note = a, c, g, u, unknown, other, or absent
  misc_difference 147: note = a, c, g, u, unknown, other, or absent
  misc_difference 148: note = a, c, g, u, unknown, other, or absent
  misc_difference 149: note = a, c, g, u, unknown, other, or absent
  misc_difference 150: note = a, c, g, u, unknown, other, or absent
  misc_difference 151: note = a, c, g, u, unknown, other, or absent
  misc_difference 152: note = a, c, g, u, unknown, other, or absent
  misc_difference 153: note = a, c, g, u, unknown, other, or absent
  misc_difference 154: note = a, c, g, u, unknown, other, or absent
  misc_difference 155: note = a, c, g, u, unknown, other, or absent
  misc_difference 156: note = a, c, g, u, unknown, other, or absent
  misc_difference 157: note = a, c, g, u, unknown, other, or absent
  misc_difference 158: note = a, c, g, u, unknown, other, or absent
  misc_difference 159: note = a, c, g, u, unknown, other, or absent
  misc_difference 160: note = a, c, g, u, unknown, other, or absent
  misc_difference 161: note = a, c, g, u, unknown, other, or absent
  misc_difference 162: note = a, c, g, u, unknown, other, or absent
  misc_difference 163: note = a, c, g, u, unknown, other, or absent
  misc_difference 164: note = a, c, g, u, unknown, other, or absent
  misc_difference 165: note = a, c, g, u, unknown, other, or absent
  misc_difference 166: note = a, c, g, u, unknown, other, or absent
  misc_difference 167: note = a, c, g, u, unknown, other, or absent
  misc_difference 168: note = a, c, g, u, unknown, other, or absent
  misc_difference 169: note = a, c, g, u, unknown, other, or absent
  misc_difference 170: note = a, c, g, u, unknown, other, or absent
  misc_difference 171: note = a, c, g, u, unknown, other, or absent
  misc_difference 172: note = a, c, g, u, unknown, other, or absent
  misc_difference 173: note = a, c, g, u, unknown, other, or absent
  misc_difference 174: note = a, c, g, u, unknown, other, or absent
  misc_difference 175: note = a, c, g, u, unknown, other, or absent
  misc_difference 176: note = a, c, g, u, unknown, other, or absent
  misc_difference 177: note = a, c, g, u, unknown, other, or absent
  misc_difference 178: note = a, c, g, u, unknown, other, or absent
  misc_difference 179: note = a, c, g, u, unknown, other, or absent
  misc_difference 180: note = a, c, g, u, unknown, other, or absent
  misc_difference 181: note = a, c, g, u, unknown, other, or absent
  misc_difference 182: note = a, c, g, u, unknown, other, or absent
  misc_difference 183: note = a, c, g, u, unknown, other, or absent
  misc_difference 184: note = a, c, g, u, unknown, other, or absent
  misc_difference 185: note = a, c, g, u, unknown, other, or absent
  misc_difference 186: note = a, c, g, u, unknown, other, or absent
  misc_difference 187: note = a, c, g, u, unknown, other, or absent
  misc_difference 188: note = a, c, g, u, unknown, other, or absent
  misc_difference 189: note = a, c, g, u, unknown, other, or absent
  misc_difference 190: note = a, c, g, u, unknown, other, or absent
  misc_difference 191: note = a, c, g, u, unknown, other, or absent
  misc_difference 192: note = a, c, g, u, unknown, other, or absent
  misc_difference 193: note = a, c, g, u, unknown, other, or absent
  misc_difference 194: note = a, c, g, u, unknown, other, or absent
  misc_difference 195: note = a, c, g, u, unknown, other, or absent
  misc_difference 196: note = a, c, g, u, unknown, other, or absent
  misc_difference 197: note = a, c, g, u, unknown, other, or absent
  misc_difference 198: note = a, c, g, u, unknown, other, or absent
  misc_difference 199: note = a, c, g, u, unknown, other, or absent
  misc_difference 200: note = a, c, g, u, unknown, other, or absent
  misc_difference 201: note = a, c, g, u, unknown, other, or absent
  misc_difference 202: note = a, c, g, u, unknown, other, or absent
  misc_difference 203: note = a, c, g, u, unknown, other, or absent
  misc_difference 204: note = a, c, g, u, unknown, other, or absent
  misc_difference 205: note = a, c, g, u, unknown, other, or absent
  misc_difference 206: note = a, c, g, u, unknown, other, or absent
  misc_difference 207: note = a, c, g, u, unknown, other, or absent
  misc_difference 208: note = a, c, g, u, unknown, other, or absent
  misc_difference 209: note = a, c, g, u, unknown, other, or absent
  misc_difference 210: note = a, c, g, u, unknown, other, or absent
  misc_difference 211: note = a, c, g, u, unknown, other, or absent
  misc_difference 212: note = a, c, g, u, unknown, other, or absent
  misc_difference 213: note = a, c, g, u, unknown, other, or absent
  misc_difference 214: note = a, c, g, u, unknown, other, or absent
  misc_difference 215: note = a, c, g, u, unknown, other, or absent
  misc_difference 216: note = a, c, g, u, unknown, other, or absent
  misc_difference 217: note = a, c, g, u, unknown, other, or absent
  misc_difference 218: note = a, c, g, u, unknown, other, or absent
  misc_difference 219: note = a, c, g, u, unknown, other, or absent
  misc_difference 220: note = a, c, g, u, unknown, other, or absent
  misc_difference 221: note = a, c, g, u, unknown, other, or absent
  misc_difference 222: note = a, c, g, u, unknown, other, or absent
  misc_difference 223: note = a, c, g, u, unknown, other, or absent
  misc_difference 224: note = a, c, g, u, unknown, other, or absent
  misc_difference 225: note = a, c, g, u, unknown, other, or absent
  misc_difference 226: note = a, c, g, u, unknown, other, or absent
  misc_difference 227: note = a, c, g, u, unknown, other, or absent
  misc_difference 228: note = a, c, g, u, unknown, other, or absent
  misc_difference 229: note = a, c, g, u, unknown, other, or absent
  misc_difference 230: note = a, c, g, u, unknown, other, or absent
  misc_difference 231: note = a, c, g, u, unknown, other, or absent
  misc_difference 232: note = a, c, g, u, unknown, other, or absent
  misc_difference 233: note = a, c, g, u, unknown, other, or absent
  misc_difference 234: note = a, c, g, u, unknown, other, or absent
  misc_difference 235: note = a, c, g, u, unknown, other, or absent
  misc_difference 236: note = a, c, g, u, unknown, other, or absent
  misc_difference 237: note = a, c, g, u, unknown, other, or absent
  misc_difference 238: note = a, c, g, u, unknown, other, or absent
  misc_difference 239: note = a, c, g, u, unknown, other, or absent
  misc_difference 240: note = a, c, g, u, unknown, other, or absent
  misc_difference 241: note = a, c, g, u, unknown, other, or absent
  misc_difference 242: note = a, c, g, u, unknown, other, or absent
  misc_difference 243: note = a, c, g, u, unknown, other, or absent
  misc_difference 244: note = a, c, g, u, unknown, other, or absent
  misc_difference 245: note = a, c, g, u, unknown, other, or absent
  misc_difference 246: note = a, c, g, u, unknown, other, or absent
  misc_difference 247: note = a, c, g, u, unknown, other, or absent
  misc_difference 248: note = a, c, g, u, unknown, other, or absent
  misc_difference 249: note = a, c, g, u, unknown, other, or absent
  misc_difference 250: note = a, c, g, u, unknown, other, or absent
  misc_difference 251: note = a, c, g, u, unknown, other, or absent
  misc_difference 252: note = a, c, g, u, unknown, other, or absent
  misc_difference 253: note = a, c, g, u, unknown, other, or absent
  misc_difference 254: note = a, c, g, u, unknown, other, or absent
  misc_difference 255: note = a, c, g, u, unknown, other, or absent
  misc_difference 256: note = a, c, g, u, unknown, other, or absent
  misc_difference 257: note = a, c, g, u, unknown, other, or absent
  misc_difference 258: note = a, c, g, u, unknown, other, or absent
  misc_difference 259: note = a, c, g, u, unknown, other, or absent
  misc_difference 260: note = a, c, g, u, unknown, other, or absent
  misc_difference 261: note = a, c, g, u, unknown, other, or absent
  misc_difference 262: note = a, c, g, u, unknown, other, or absent
  misc_difference 263: note = a, c, g, u, unknown, other, or absent
  misc_difference 264: note = a, c, g, u, unknown, other, or absent
  misc_difference 265: note = a, c, g, u, unknown, other, or absent
  misc_difference 266: note = a, c, g, u, unknown, other, or absent
  misc_difference 267: note = a, c, g, u, unknown, other, or absent
  misc_difference 268: note = a, c, g, u, unknown, other, or absent
  misc_difference 269: note = a, c, g, u, unknown, other, or absent
  misc_difference 270: note = a, c, g, u, unknown, other, or absent
  misc_difference 271: note = a, c, g, u, unknown, other, or absent
  misc_difference 272: note = a, c, g, u, unknown, other, or absent
  misc_difference 273: note = a, c, g, u, unknown, other, or absent
  misc_difference 274: note = a, c, g, u, unknown, other, or absent
  misc_difference 275: note = a, c, g, u, unknown, other, or absent
  misc_difference 276: note = a, c, g, u, unknown, other, or absent
  misc_difference 277: note = a, c, g, u, unknown, other, or absent
  misc_difference 278: note = a, c, g, u, unknown, other, or absent
  misc_difference 279: note = a, c, g, u, unknown, other, or absent
  misc_difference 280: note = a, c, g, u, unknown, other, or absent
  misc_difference 281: note = a, c, g, u, unknown, other, or absent
  misc_difference 282: note = a, c, g, u, unknown, other, or absent
  misc_difference 283: note = a, c, g, u, unknown, other, or absent
  misc_difference 284: note = a, c, g, u, unknown, other, or absent
  misc_difference 285: note = a, c, g, u, unknown, other, or absent
  misc_difference 286: note = a, c, g, u, unknown, other, or absent
  misc_difference 287: note = a, c, g, u, unknown, other, or absent
  misc_difference 288: note = a, c, g, u, unknown, other, or absent
  misc_difference 289: note = a, c, g, u, unknown, other, or absent
  misc_difference 290: note = a, c, g, u, unknown, other, or absent
  misc_difference 291: note = a, c, g, u, unknown, other, or absent
  misc_difference 292: note = a, c, g, u, unknown, other, or absent
  misc_difference 293: note = a, c, g, u, unknown, other, or absent
  misc_difference 294: note = a, c, g, u, unknown, other, or absent
  misc_difference 295: note = a, c, g, u, unknown, other, or absent
  misc_difference 296: note = a, c, g, u, unknown, other, or absent
  misc_difference 297: note = a, c, g, u, unknown, other, or absent
  misc_difference 298: note = a, c, g, u, unknown, other, or absent
  misc_difference 299: note = a, c, g, u, unknown, other, or absent
  misc_difference 300: note = a, c, g, u, unknown, other, or absent
  misc_difference 301: note = a, c, g, u, unknown, other, or absent
  misc_difference 302: note = a, c, g, u, unknown, other, or absent
  misc_difference 303: note = a, c, g, u, unknown, other, or absent
  misc_difference 304: note = a, c, g, u, unknown, other, or absent
  misc_difference 305: note = a, c, g, u, unknown, other, or absent
  misc_difference 306: note = a, c, g, u, unknown, other, or absent
  misc_difference 307: note = a, c, g, u, unknown, other, or absent
  misc_difference 308: note = a, c, g, u, unknown, other, or absent
  misc_difference 309: note = a, c, g, u, unknown, other, or absent
  misc_difference 310: note = a, c, g, u, unknown, other, or absent
  misc_difference 311: note = a, c, g, u, unknown, other, or absent
  misc_difference 312: note = a, c, g, u, unknown, other, or absent
  misc_difference 313: note = a, c, g, u, unknown, other, or absent
  misc_difference 314: note = a, c, g, u, unknown, other, or absent
  misc_difference 315: note = a, c, g, u, unknown, other, or absent
  misc_difference 316: note = a, c, g, u, unknown, other, or absent
  misc_difference 317: note = a, c, g, u, unknown, other, or absent
  misc_difference 318: note = May be absent
  misc_difference 319: note = a, c, g, u, unknown, other, or absent
  misc_difference 320: note = a, c, g, u, unknown, other, or absent
  misc_difference 321: note = May be absent
  misc_difference 322: note = May be absent
  misc_difference 323: note = May be absent
  misc_difference 324: note = May be absent
  misc_difference 325: note = May be absent
  misc_difference 326: note = May be absent
  misc_difference 327: note = May be absent
  misc_difference 328: note = a, c, g, u, unknown, other, or absent
  misc_difference 329: note = May be absent
  misc_difference 330: note = May be absent
  misc_difference 331: note = May be absent
  misc_difference 332: note = a, c, g, u, unknown, other, or absent
  misc_difference 333: note = a, c, g, u, unknown, other, or absent
  misc_difference 334: note = May be absent
  misc_difference 335: note = a, c, g, u, unknown, other, or absent
  misc_difference 336: note = a, c, g, u, unknown, other, or absent
  misc_difference 337: note = a, c, g, u, unknown, other, or absent
  misc_difference 338: note = a, c, g, u, unknown, other, or absent
  misc_difference 339: note = a, c, g, u, unknown, other, or absent
  misc_difference 340: note = a, c, g, u, unknown, other, or absent
  misc_difference 341: note = May be absent
  misc_difference 342: note = May be absent
  misc_difference 41..312: note = This region may encompass 1-271 nucleotides
vnnnnnntnnnnvrrnhhgkhhndhnvnnnnnnnhynardnnnnnnnnnnnnnnnnnnnnnnnnnnnnnnnnnnnnnnnnnnnnnnnnnnnnnnnnnnnnnnnnnnnnnnnnnnnnnnnnnnnnnnnnnnnnnnnnnnnnnnnnnnnnnnnnnnnnnnnnnnnnnnnnnnnnnnnnnnnnnnnnnnnnnnnnnnnnnnnnnnnnnnnnnnnnnnnnnnnnnnnnnnnnnnnnnnnnnnnnnnnnnnnnnnnnnnnnnnnnnnnnnnnnnnnnnnnnnnnnnnnnnnnnnnnnnnnnnnnnnnnnnnnnnnnnnnnnnvnnvbythvanymbnnbnnnnnnbr

SEQ ID NO: 596 - RNA, 342 nt, synthetic construct
  source 1..342: mol_type = other RNA
  misc_difference 1: note = May be absent
  misc_difference 2: note = May be absent
  misc_difference 3: note = May be absent
  misc_difference 4: note = May be absent
  misc_difference 5: note = May be absent
  misc_difference 6: note = a, c, g, u, unknown, other, or absent
  misc_difference 7: note = May be absent
  misc_difference 8: note = May be absent
  misc_difference 9: note = May be absent
  misc_difference 10: note = May be absent
  misc_difference 11: note = May be absent
  misc_difference 12: note = May be absent
  misc_difference 13: note = May be absent
  misc_difference 14: note = May be absent
  misc_difference 15: note = May be absent
  misc_difference 16: note = May be absent
  misc_difference 17: note = May be absent
  misc_difference 18: note = May be absent
  misc_difference 19: note = May be absent
  misc_difference 20: note = May be absent
  misc_difference 21: note = May be absent
  misc_difference 22: note = May be absent
  misc_difference 23: note = May be absent
  misc_difference 24: note = May be absent
  misc_difference 25: note = May be absent
  misc_difference 26: note = May be absent
  misc_difference 27: note = May be absent
  misc_difference 28: note = May be absent
  misc_difference 29: note = May be absent
  misc_difference 30: note = May be absent
  misc_difference 31: note = May be absent
  misc_difference 32: note = May be absent
  misc_difference 33: note = a, c, g, u, unknown, other, or absent
  misc_difference 34: note = May be absent
  misc_difference 35: note = May be absent
  misc_difference 36: note = May be absent
  misc_difference 37: note = May be absent
  misc_difference 38: note = May be absent
  misc_difference 39: note = May be absent
  misc_difference 40: note = May be absent
  misc_difference 41: note = a, c, g, u, unknown, other, or absent
  misc_difference 42: note = May be absent
  misc_difference 43: note = a, c, g, u, unknown, other, or absent
  misc_difference 44: note = May be absent
  misc_difference 45: note = May be absent
  misc_difference 46: note = a, c, g, u, unknown, other, or absent
  misc_difference 47: note = a, c, g, u, unknown, other, or absent
  misc_difference 48: note = a, c, g, u, unknown, other, or absent
  misc_difference 49: note = a, c, g, u, unknown, other, or absent
  misc_difference 50: note = a, c, g, u, unknown, other, or absent
  misc_difference 51: note = a, c, g, u, unknown, other, or absent
  misc_difference 52: note = a, c, g, u, unknown, other, or absent
  misc_difference 53: note = a, c, g, u, unknown, other, or absent
  misc_difference 54: note = a, c, g, u, unknown, other, or absent
  misc_difference 55: note = a, c, g, u, unknown, other, or absent
  misc_difference 56: note = a, c, g, u, unknown, other, or absent
  misc_difference 57: note = a, c, g, u, unknown, other, or absent
  misc_difference 58: note = a, c, g, u, unknown, other, or absent
  misc_difference 59: note = a, c, g, u, unknown, other, or absent
  misc_difference 60: note = a, c, g, u, unknown, other, or absent
  misc_difference 61: note = a, c, g, u, unknown, other, or absent
  misc_difference 62: note = a, c, g, u, unknown, other, or absent
  misc_difference 63: note = a, c, g, u, unknown, other, or absent
  misc_difference 64: note = a, c, g, u, unknown, other, or absent
  misc_difference 65: note = a, c, g, u, unknown, other, or absent
  misc_difference 66: note = a, c, g, u, unknown, other, or absent
  misc_difference 67: note = a, c, g, u, unknown, other, or absent
  misc_difference 68: note = a, c, g, u, unknown, other, or absent
  misc_difference 69: note = a, c, g, u, unknown, other, or absent
  misc_difference 70: note = a, c, g, u, unknown, other, or absent
  misc_difference 71: note = a, c, g, u, unknown, other, or absent
  misc_difference 72: note = a, c, g, u, unknown, other, or absent
  misc_difference 73: note = a, c, g, u, unknown, other, or absent
  misc_difference 74: note = a, c, g, u, unknown, other, or absent
  misc_difference 75: note = a, c, g, u, unknown, other, or absent
  misc_difference 76: note = a, c, g, u, unknown, other, or absent
  misc_difference 77: note = a, c, g, u, unknown, other, or absent
  misc_difference 78: note = a, c, g, u, unknown, other, or absent
  misc_difference 79: note = a, c, g, u, unknown, other, or absent
  misc_difference 80: note = a, c, g, u, unknown, other, or absent
  misc_difference 81: note = a, c, g, u, unknown, other, or absent
  misc_difference 82: note = a, c, g, u, unknown, other, or absent
  misc_difference 83: note = a, c, g, u, unknown, other, or absent
  misc_difference 84: note = a, c, g, u, unknown, other, or absent
  misc_difference 85: note = a, c, g, u, unknown, other, or absent
  misc_difference 86: note = a, c, g, u, unknown, other, or absent
  misc_difference 87: note = a, c, g, u, unknown, other, or absent
  misc_difference 88: note = a, c, g, u, unknown, other, or absent
  misc_difference 89: note = a, c, g, u, unknown, other, or absent
  misc_difference 90: note = a, c, g, u, unknown, other, or absent
  misc_difference 91: note = a, c, g, u, unknown, other, or absent
  misc_difference 92: note = a, c, g, u, unknown, other, or absent
  misc_difference 93: note = a, c, g, u, unknown, other, or absent
  misc_difference 94: note = a, c, g, u, unknown, other, or absent
  misc_difference 95: note = a, c, g, u, unknown, other, or absent
  misc_difference 96: note = a, c, g, u, unknown, other, or absent
  misc_difference 97: note = a, c, g, u, unknown, other, or absent
  misc_difference 98: note = a, c, g, u, unknown, other, or absent
  misc_difference 99: note = a, c, g, u, unknown, other, or absent
  misc_difference 100: note = a, c, g, u, unknown, other, or absent
  misc_difference 101: note = a, c, g, u, unknown, other, or absent
  misc_difference 102: note = a, c, g, u, unknown, other, or absent
  misc_difference 103: note = a, c, g, u, unknown, other, or absent
  misc_difference 104: note = a, c, g, u, unknown, other, or absent
  misc_difference 105: note = a, c, g, u, unknown, other, or absent
  misc_difference 106: note = a, c, g, u, unknown, other, or absent
  misc_difference 107: note = a, c, g, u, unknown, other, or absent
  misc_difference 108: note = a, c, g, u, unknown, other, or absent
  misc_difference 109: note = a, c, g, u, unknown, other, or absent
  misc_difference 110: note = a, c, g, u, unknown, other, or absent
  misc_difference 111: note = a, c, g, u, unknown, other, or absent
  misc_difference 112: note = a, c, g, u, unknown, other, or absent
  misc_difference 113: note = a, c, g, u, unknown, other, or absent
  misc_difference 114: note = a, c, g, u, unknown, other, or absent
  misc_difference 115: note = a, c, g, u, unknown, other, or absent
  misc_difference 116: note = a, c, g, u, unknown, other, or absent
  misc_difference 117: note = a, c, g, u, unknown, other, or absent
  misc_difference 118: note = a, c, g, u, unknown, other, or absent
  misc_difference 119: note = a, c, g, u, unknown, other, or absent
  misc_difference 120: note = a, c, g, u, unknown, other, or absent
  misc_difference 121: note = a, c, g, u, unknown, other, or absent
  misc_difference 122: note = a, c, g, u, unknown, other, or absent
  misc_difference 123: note = a, c, g, u, unknown, other, or absent
  misc_difference 124: note = a, c, g, u, unknown, other, or absent
  misc_difference 125: note = a, c, g, u, unknown, other, or absent
  misc_difference 126: note = a, c, g, u, unknown, other, or absent
  misc_difference 127: note = a, c, g, u, unknown, other, or absent
  misc_difference 128: note = a, c, g, u, unknown, other, or absent
  misc_difference 129: note = a, c, g, u, unknown, other, or absent
  misc_difference 130: note = a, c, g, u, unknown, other, or absent
  misc_difference 131: note = a, c, g, u, unknown, other, or absent
  misc_difference 132: note = a, c, g, u, unknown, other, or absent
  misc_difference 133: note = a, c, g, u, unknown, other, or absent
  misc_difference 134: note = a, c, g, u, unknown, other, or absent
  misc_difference 135: note = a, c, g, u, unknown, other, or absent
  misc_difference 136: note = a, c, g, u, unknown, other, or absent
  misc_difference 137: note = a, c, g, u, unknown, other, or absent
  misc_difference 138: note = a, c, g, u, unknown, other, or absent
  misc_difference 139: note = a, c, g, u, unknown, other, or absent
  misc_difference 140: note = a, c, g, u, unknown, other, or absent
  misc_difference 141: note = a, c, g, u, unknown, other, or absent
  misc_difference 142: note = a, c, g, u, unknown, other, or absent
  misc_difference 143: note = a, c, g, u, unknown, other, or absent
  misc_difference 144: note = a, c, g, u, unknown, other, or absent
  misc_difference 145: note = a, c, g, u, unknown, other, or absent
  misc_difference 146: note = a, c, g, u, unknown, other, or absent
  misc_difference 147: note = a, c, g, u, unknown, other, or absent
  misc_difference 148: note = a, c, g, u, unknown, other, or absent
  misc_difference 149: note = a, c, g, u, unknown, other, or absent
  misc_difference 150: note = a, c, g, u, unknown, other, or absent
  misc_difference 151: note = a, c, g, u, unknown, other, or absent
  misc_difference 152: note = a, c, g, u, unknown, other, or absent
  misc_difference 153: note = a, c, g, u, unknown, other, or absent
  misc_difference 154: note = a, c, g, u, unknown, other, or absent
  misc_difference 155: note = a, c, g, u, unknown, other, or absent
  misc_difference 156: note = a, c, g, u, unknown, other, or absent
  misc_difference 157: note = a, c, g, u, unknown, other, or absent
  misc_difference 158: note = a, c, g, u, unknown, other, or absent
  misc_difference 159: note = a, c, g, u, unknown, other, or absent
  misc_difference 160: note = a, c, g, u, unknown, other, or absent
  misc_difference 161: note = a, c, g, u, unknown, other, or absent
  misc_difference 162: note = a, c, g, u, unknown, other, or absent
  misc_difference 163: note = a, c, g, u, unknown, other, or absent
  misc_difference 164: note = a, c, g, u, unknown, other, or absent
  misc_difference 165: note = a, c, g, u, unknown, other, or absent
  misc_difference 166: note = a, c, g, u, unknown, other, or absent
  misc_difference 167: note = a, c, g, u, unknown, other, or absent
  misc_difference 168: note = a, c, g, u, unknown, other, or absent
  misc_difference 169: note = a, c, g, u, unknown, other, or absent
  misc_difference 170: note = a, c, g, u, unknown, other, or absent
  misc_difference 171: note = a, c, g, u, unknown, other, or absent
  misc_difference 172: note = a, c, g, u, unknown, other, or absent
  misc_difference 173: note = a, c, g, u, unknown, other, or absent
  misc_difference 174: note = a, c, g, u, unknown, other, or absent
  misc_difference 175: note = a, c, g, u, unknown, other, or absent
  misc_difference 176: note = a, c, g, u, unknown, other, or absent
  misc_difference 177: note = a, c, g, u, unknown, other, or absent
  misc_difference 178: note = a, c, g, u, unknown, other, or absent
  misc_difference 179: note = a, c, g, u, unknown, other, or absent
  misc_difference 180: note = a, c, g, u, unknown, other, or absent
  misc_difference 181: note = a, c, g, u, unknown, other, or absent
  misc_difference 182: note = a, c, g, u, unknown, other, or absent
  misc_difference 183: note = a, c, g, u, unknown, other, or absent
  misc_difference 184: note = a, c, g, u, unknown, other, or absent
  misc_difference 185: note = a, c, g, u, unknown, other, or absent
  misc_difference 186: note = a, c, g, u, unknown, other, or absent
  misc_difference 187: note = a, c, g, u, unknown, other, or absent
  misc_difference 188: note = a, c, g, u, unknown, other, or absent
  misc_difference 189: note = a, c, g, u, unknown, other, or absent
  misc_difference 190: note = a, c, g, u, unknown, other, or absent
  misc_difference 191: note = a, c, g, u, unknown, other, or absent
  misc_difference 192: note = a, c, g, u, unknown, other, or absent
  misc_difference 193: note = a, c, g, u, unknown, other, or absent
  misc_difference 194: note = a, c, g, u, unknown, other, or absent
  misc_difference 195: note = a, c, g, u, unknown, other, or absent
  misc_difference 196: note = a, c, g, u, unknown, other, or absent
  misc_difference 197: note = a, c, g, u, unknown, other, or absent
  misc_difference 198: note = a, c, g, u, unknown, other, or absent
  misc_difference 199: note = a, c, g, u, unknown, other, or absent
  misc_difference 200: note = a, c, g, u, unknown, other, or absent
  misc_difference 201: note = a, c, g, u, unknown, other, or absent
  misc_difference 202: note = a, c, g, u, unknown, other, or absent
  misc_difference 203: note = a, c, g, u, unknown, other, or absent
  misc_difference 204: note = a, c, g, u, unknown, other, or absent
  misc_difference 205: note = a, c, g, u, unknown, other, or absent
  misc_difference 206: note = a, c, g, u, unknown, other, or absent
  misc_difference 207: note = a, c, g, u, unknown, other, or absent
  misc_difference 208: note = a, c, g, u, unknown, other, or absent
  misc_difference 209: note = a, c, g, u, unknown, other, or absent
  misc_difference 210: note = a, c, g, u, unknown, other, or absent
  misc_difference 211: note = a, c, g, u, unknown, other, or absent
  misc_difference 212: note = a, c, g, u, unknown, other, or absent
  misc_difference 213: note = a, c, g, u, unknown, other, or absent
  misc_difference 214: note = a, c, g, u, unknown, other, or absent
  misc_difference 215: note = a, c, g, u, unknown, other, or absent
  misc_difference 216: note = a, c, g, u, unknown, other, or absent
  misc_difference 217: note = a, c, g, u, unknown, other, or absent
  misc_difference 218: note = a, c, g, u, unknown, other, or absent
  misc_difference 219: note = a, c, g, u, unknown, other, or absent
  misc_difference 220: note = a, c, g, u, unknown, other, or absent
  misc_difference 221: note = a, c, g, u, unknown, other, or absent
  misc_difference 222: note = a, c, g, u, unknown, other, or absent
  misc_difference 223: note = a, c, g, u, unknown, other, or absent
  misc_difference 224: note = a, c, g, u, unknown, other, or absent
  misc_difference 225: note = a, c, g, u, unknown, other, or absent
  misc_difference 226: note = a, c, g, u, unknown, other, or absent
  misc_difference 227: note = a, c, g, u, unknown, other, or absent
  misc_difference 228: note = a, c, g, u, unknown, other, or absent
  misc_difference 229: note = a, c, g, u, unknown, other, or absent
  misc_difference 230: note = a, c, g, u, unknown, other, or absent
  misc_difference 231: note = a, c, g, u, unknown, other, or absent
  misc_difference 232: note = a, c, g, u, unknown, other, or absent
  misc_difference 233: note = a, c, g, u, unknown, other, or absent
  misc_difference 234: note = a, c, g, u, unknown, other, or absent
  misc_difference 235: note = a, c, g, u, unknown, other, or absent
  misc_difference 236: note = a, c, g, u, unknown, other, or absent
  misc_difference 237: note = a, c, g, u, unknown, other, or absent
  misc_difference 238: note = a, c, g, u, unknown, other, or absent
  misc_difference 239: note = a, c, g, u, unknown, other, or absent
  misc_difference 240: note = a, c, g, u, unknown, other, or absent
  misc_difference 241: note = a, c, g, u, unknown, other, or absent
  misc_difference 242: note = a, c, g, u, unknown, other, or absent
  misc_difference 243: note = a, c, g, u, unknown, other, or absent
  misc_difference 244: note = a, c, g, u, unknown, other, or absent
  misc_difference 245: note = a, c, g, u, unknown, other, or absent
  misc_difference 246: note = a, c, g, u, unknown, other, or absent
  misc_difference 247: note = a, c, g, u, unknown, other, or absent
  misc_difference 248: note = a, c, g, u, unknown, other, or absent
  misc_difference 249: note = a, c, g, u, unknown, other, or absent
  misc_difference 250: note = a, c, g, u, unknown, other, or absent
  misc_difference 251: note = a, c, g, u, unknown, other, or absent
  misc_difference 252: note = a, c, g, u, unknown, other, or absent
  misc_difference 253: note = a, c, g, u, unknown, other, or absent
  misc_difference 254: note = a, c, g, u, unknown, other, or absent
  misc_difference 255: note = a, c, g, u, unknown, other, or absent
  misc_difference 256: note = a, c, g, u, unknown, other, or absent
  misc_difference 257: note = a, c, g, u, unknown, other, or absent
  misc_difference 258: note = a, c, g, u, unknown, other, or absent
  misc_difference 259: note = a, c, g, u, unknown, other, or absent
  misc_difference 260: note = a, c, g, u, unknown, other, or absent
  misc_difference 261: note = a, c, g, u, unknown, other, or absent
  misc_difference 262: note = a, c, g, u, unknown, other, or absent
  misc_difference 263: note = a, c, g, u, unknown, other, or absent
  misc_difference 264: note = a, c, g, u, unknown, other, or absent
  misc_difference 265: note = a, c, g, u, unknown, other, or absent
  misc_difference 266: note = a, c, g, u, unknown, other, or absent
  misc_difference 267: note = a, c, g, u, unknown, other, or absent
  misc_difference 268: note = a, c, g, u, unknown, other, or absent
  misc_difference 269: note = a, c, g, u, unknown, other, or absent
  misc_difference 270: note = a, c, g, u, unknown, other, or absent
  misc_difference 271: note = a, c, g, u, unknown, other, or absent
  misc_difference 272: note = a, c, g, u, unknown, other, or absent
  misc_difference 273: note = a, c, g, u, unknown, other, or absent
  misc_difference 274: note = a, c, g, u, unknown, other, or absent
  misc_difference 275: note = a, c, g, u, unknown, other, or absent
  misc_difference 276: note = a, c, g, u, unknown, other, or absent
  misc_difference 277: note = a, c, g, u, unknown, other, or absent
  misc_difference 278: note = a, c, g, u, unknown, other, or absent
  misc_difference 279: note = a, c, g, u, unknown, other, or absent
  misc_difference 280: note = a, c, g, u, unknown, other, or absent
  misc_difference 281: note = a, c, g, u, unknown, other, or absent
  misc_difference 282: note = a, c, g, u, unknown, other, or absent
  misc_difference 283: note = a, c, g, u, unknown, other, or absent
  misc_difference 284: note = a, c, g, u, unknown, other, or absent
  misc_difference 285: note = a, c, g, u, unknown, other, or absent
  misc_difference 286: note = a, c, g, u, unknown, other, or absent
  misc_difference 287: note = a, c, g, u, unknown, other, or absent
  misc_difference 288: note = a, c, g, u, unknown, other, or absent
  misc_difference 289: note = a, c, g, u, unknown, other, or absent
  misc_difference 290: note = a, c, g, u, unknown, other, or absent
  misc_difference 291: note = a, c, g, u, unknown, other, or absent
  misc_difference 292: note = a, c, g, u, unknown, other, or absent
  misc_difference 293: note = a, c, g, u, unknown, other, or absent
  misc_difference 294: note = a, c, g, u, unknown, other, or absent
  misc_difference 295: note = a, c, g, u, unknown, other, or absent
  misc_difference 296: note = a, c, g, u, unknown, other, or absent
  misc_difference 297: note = a, c, g, u, unknown, other, or absent
  misc_difference 298: note = a, c, g, u, unknown, other, or absent
  misc_difference 299: note = a, c, g, u, unknown, other, or absent
  misc_difference 300: note = a, c, g, u, unknown, other, or absent
  misc_difference 301: note = a, c, g, u, unknown, other, or absent
  misc_difference 302: note = a, c, g, u, unknown, other, or absent
  misc_difference 303: note = a, c, g, u, unknown, other, or absent
  misc_difference 304: note = a, c, g, u, unknown, other, or absent
  misc_difference 305: note = a, c, g, u, unknown, other, or absent
  misc_difference 306: note = a, c, g, u, unknown, other, or absent
  misc_difference 307: note = a, c, g, u, unknown, other, or absent
  misc_difference 308: note = a, c, g, u, unknown, other, or absent
  misc_difference 309: note = a, c, g, u, unknown, other, or absent
  misc_difference 310: note = a, c, g, u, unknown, other, or absent
  misc_difference 311: note = a, c, g, u, unknown, other, or absent
  misc_difference 312: note = a, c, g, u, unknown, other, or absent
  misc_difference 313: note = a, c, g, u, unknown, other, or absent
  misc_difference 314: note = a, c, g, u, unknown, other, or absent
  misc_difference 315: note = a, c, g, u, unknown, other, or absent
  misc_difference 316: note = a, c, g, u, unknown, other, or absent
  misc_difference 317: note = a, c, g, u, unknown, other, or absent
  misc_difference 318: note = May be absent
  misc_difference 319: note = a, c, g, u, unknown, other, or absent
  misc_difference 320: note = May be absent
  misc_difference 321: note = May be absent
  misc_difference 322: note = May be absent
  misc_difference 323: note = May be absent
  misc_difference 324: note = May be absent
  misc_difference 325: note = May be absent
  misc_difference 326: note = May be absent
  misc_difference 327: note = May be absent
  misc_difference 328: note = a, c, g, u, unknown, other, or absent
  misc_difference 329: note = May be absent
  misc_difference 330: note = May be absent
  misc_difference 331: note = May be absent
  misc_difference 332: note = May be absent
  misc_difference 333: note = a, c, g, u, unknown, other, or absent
  misc_difference 334: note = May be absent
  misc_difference 335: note = May be absent
  misc_difference 336: note = a, c, g, u, unknown, other, or absent
  misc_difference 337: note = May be absent
  misc_difference 338: note = May be absent
  misc_difference 339: note = May be absent
  misc_difference 340: note = a, c, g, u, unknown, other, or absent
  misc_difference 341: note = May be absent
  misc_difference 342: note = May be absent
  misc_difference 46..317: note = This region may encompass 1-271 nucleotides
rbbvvndtrkhhsrrbhygkhhtrwbrhdbhdnrythardnynhdnnnnnnnnnnnnnnnnnnnnnnnnnnnnnnnnnnnnnnnnnnnnnnnnnnnnnnnnnnnnnnnnnnnnnnnnnnnnnnnnnnnnnnnnnnnnnnnnnnnnnnnnnnnnnnnnnnnnnnnnnnnnnnnnnnnnnnnnnnnnnnnnnnnnnnnnnnnnnnnnnnnnnnnnnnnnnnnnnnnnnnnnnnnnnnnnnnnnnnnnnnnnnnnnnnnnnnnnnnnnnnnnnnnnnnnnnnnnnnnnnnnnnnnnnnnnnnnnnnnnnnnnnnnnnnnnvnvgbythvanymybnbbnbbvnya

SEQ ID NO: 597 - RNA, 342 nt, synthetic construct
  source 1..342: mol_type = other RNA
  misc_difference 1: note = May be absent
  misc_difference 2: note = May be absent
  misc_difference 3: note = May be absent
  misc_difference 4: note = May be absent
  misc_difference 5: note = May be absent
  misc_difference 6: note = a, c, g, u, unknown, other, or absent
  misc_difference 7: note = May be absent
  misc_difference 8: note = May be absent
  misc_difference 9: note = May be absent
  misc_difference 10: note = May be absent
  misc_difference 11: note = May be absent
  misc_difference 12: note = May be absent
  misc_difference 13: note = May be absent
  misc_difference 14: note = May be absent
  misc_difference 15: note = May be absent
  misc_difference 16: note = May be absent
  misc_difference 17: note = May be absent
  misc_difference 18: note = May be absent
  misc_difference 19: note = May be absent
  misc_difference 20: note = May be absent
  misc_difference 21: note = May be absent
  misc_difference 22: note = May be absent
  misc_difference 23: note = May be absent
  misc_difference 24: note = May be absent
  misc_difference 25: note = May be absent
  misc_difference 26: note = May be absent
  misc_difference 27: note = May be absent
  misc_difference 28: note = May be absent
  misc_difference 29: note = May be absent
  misc_difference 30: note = May be absent
  misc_difference 31: note = May be absent
  misc_difference 32: note = May be absent
  misc_difference 33: note = a, c, g, u, unknown, other, or absent
  misc_difference 34: note = May be absent
  misc_difference 35: note = May be absent
  misc_difference 36: note = May be absent
  misc_difference 37: note = May be absent
  misc_difference 38: note = May be absent
  misc_difference 39: note = May be absent
  misc_difference 40: note = May be absent
  misc_difference 41: note = May be absent
  misc_difference 42: note = May be absent
  misc_difference 43: note = a, c, g, u, unknown, other, or absent
  misc_difference 44: note = May be absent
  misc_difference 45: note = May be absent
  misc_difference 46: note = a, c, g, u, unknown, other, or absent
  misc_difference 47: note = a, c, g, u, unknown, other, or absent
  misc_difference 48: note = a, c, g, u, unknown, other, or absent
  misc_difference 49: note = a, c, g, u, unknown, other, or absent
  misc_difference 50: note = a, c, g, u, unknown, other, or absent
  misc_difference 51: note = a, c, g, u, unknown, other, or absent
  misc_difference 52: note = a, c, g, u, unknown, other, or absent
  misc_difference 53: note = a, c, g, u, unknown, other, or absent
  misc_difference 54: note = a, c, g, u, unknown, other, or absent
  misc_difference 55: note = a, c, g, u, unknown, other, or absent
  misc_difference 56: note = a, c, g, u, unknown, other, or absent
  misc_difference 57: note = a, c, g, u, unknown, other, or absent
  misc_difference 58: note = a, c, g, u, unknown, other, or absent
  misc_difference 59: note = a, c, g, u, unknown, other, or absent
  misc_difference 60: note = a, c, g, u, unknown, other, or absent
  misc_difference 61: note = a, c, g, u, unknown, other, or absent
  misc_difference 62: note = a, c, g, u, unknown, other, or absent
  misc_difference 63: note = a, c, g, u, unknown, other, or absent
  misc_difference 64: note = a, c, g, u, unknown, other, or absent
  misc_difference 65: note = a, c, g, u, unknown, other, or absent
  misc_difference 66: note = a, c, g, u, unknown, other, or absent
  misc_difference 67: note = a, c, g, u, unknown, other, or absent
  misc_difference 68: note = a, c, g, u, unknown, other, or absent
  misc_difference 69: note = a, c, g, u, unknown, other, or absent
  misc_difference 70: note = a, c, g, u, unknown, other, or absent
  misc_difference 71: note = a, c, g, u, unknown, other, or absent
  misc_difference 72: note = a, c, g, u, unknown, other, or absent
  misc_difference 73: note = a, c, g, u, unknown, other, or absent
  misc_difference 74: note = a, c, g, u, unknown, other, or absent
  misc_difference 75: note = a, c, g, u, unknown, other, or absent
  misc_difference 76: note = a, c, g, u, unknown, other, or absent
  misc_difference 77: note = a, c, g, u, unknown, other, or absent
  misc_difference 78: note = a, c, g, u, unknown, other, or absent
  misc_difference 79: note = a, c, g, u, unknown, other, or absent
  misc_difference 80: note = a, c, g, u, unknown, other, or absent
  misc_difference 81: note = a, c, g, u, unknown, other, or absent
  misc_difference 82: note = a, c, g, u, unknown, other, or absent
  misc_difference 83: note = a, c, g, u, unknown, other, or absent
  misc_difference 84: note = a, c, g, u, unknown, other, or absent
  misc_difference 85: note = a, c, g, u, unknown, other, or absent
  misc_difference 86: note = a, c, g, u, unknown, other, or absent
  misc_difference 87: note = a, c, g, u, unknown, other, or absent
  misc_difference 88: note = a, c, g, u, unknown, other, or absent
  misc_difference 89: note = a, c, g, u, unknown, other, or absent
  misc_difference 90: note = a, c, g, u, unknown, other, or absent
  misc_difference 91: note = a, c, g, u, unknown, other, or absent
  misc_difference 92: note = a, c, g, u, unknown, other, or absent
  misc_difference 93: note = a, c, g, u, unknown, other, or absent
  misc_difference 94: note = a, c, g, u, unknown, other, or absent
  misc_difference 95: note = a, c, g, u, unknown, other, or absent
  misc_difference 96: note = a, c, g, u, unknown, other, or absent
  misc_difference 97: note = a, c, g, u, unknown, other, or absent
  misc_difference 98: note = a, c, g, u, unknown, other, or absent
  misc_difference 99: note = a, c, g, u, unknown, other, or absent
  misc_difference 100: note = a, c, g, u, unknown, other, or absent
  misc_difference 101: note = a, c, g, u, unknown, other, or absent
  misc_difference 102: note = a, c, g, u, unknown, other, or absent
  misc_difference 103: note = a, c, g, u, unknown, other, or absent
  misc_difference 104: note = a, c, g, u, unknown, other, or absent
  misc_difference 105: note = a, c, g, u, unknown, other, or absent
  misc_difference 106: note = a, c, g, u, unknown, other, or absent
  misc_difference 107: note = a, c, g, u, unknown, other, or absent
  misc_difference 108: note = a, c, g, u, unknown, other, or absent
  misc_difference 109: note = a, c, g, u, unknown, other, or absent
  misc_difference 110: note = a, c, g, u, unknown, other, or absent
  misc_difference 111: note = a, c, g, u, unknown, other, or absent
  misc_difference 112: note = a, c, g, u, unknown, other, or absent
  misc_difference 113: note = a, c, g, u, unknown, other, or absent
  misc_difference 114: note = a, c, g, u, unknown, other, or absent
  misc_difference 115: note = a, c, g, u, unknown, other, or absent
  misc_difference 116: note = a, c, g, u, unknown, other, or absent
  misc_difference 117: note = a, c, g, u, unknown, other, or absent
  misc_difference 118: note = a, c, g, u, unknown, other, or absent
  misc_difference 119: note = a, c, g, u, unknown, other, or absent
  misc_difference 120: note = a, c, g, u, unknown, other, or absent
  misc_difference 121: note = a, c, g, u, unknown, other, or absent
  misc_difference 122: note = a, c, g, u, unknown, other, or absent
  misc_difference 123: note = a, c, g, u, unknown, other, or absent
  misc_difference 124: note = a, c, g, u, unknown, other, or absent
  misc_difference 125: note = a, c, g, u, unknown, other, or absent
  misc_difference 126: note = a, c, g, u, unknown, other, or absent
  misc_difference 127: note = a, c, g, u, unknown, other, or absent
  misc_difference 128: note = a, c, g, u, unknown, other, or absent
  misc_difference 129: note = a, c, g, u, unknown, other, or absent
  misc_difference 130: note = a, c, g, u, unknown, other, or absent
  misc_difference 131: note = a, c, g, u, unknown, other, or absent
  misc_difference 132: note = a, c, g, u, unknown, other, or absent
  misc_difference 133: note = a, c, g, u, unknown, other, or absent
  misc_difference 134: note = a, c, g, u, unknown, other, or absent
  misc_difference 135: note = a, c, g, u, unknown, other, or absent
  misc_difference 136: note = a, c, g, u, unknown, other, or absent
  misc_difference 137: note = a, c, g, u, unknown, other, or absent
  misc_difference 138: note = a, c, g, u, unknown, other, or absent
  misc_difference 139: note = a, c, g, u, unknown, other, or absent
  misc_difference 140: note = a, c, g, u, unknown, other, or absent
  misc_difference 141: note = a, c, g, u, unknown, other, or absent
  misc_difference 142: note = a, c, g, u, unknown, other, or absent
  misc_difference 143: note = a, c, g, u, unknown, other, or absent
  misc_difference 144: note = a, c, g, u, unknown, other, or absent
  misc_difference 145: note = a, c, g, u, unknown, other, or absent
  misc_difference 146: note = a, c, g, u, unknown, other, or absent
  misc_difference 147: note = a, c, g, u, unknown, other, or absent
  misc_difference 148: note = a, c, g, u, unknown, other, or absent
  misc_difference 149: note = a, c, g, u, unknown, other, or absent
  misc_difference 150: note = a, c, g, u, unknown, other, or absent
  misc_difference 151: note = a, c, g, u, unknown, other, or absent
  misc_difference 152: note = a, c, g, u, unknown, other, or absent
  misc_difference 153: note = a, c, g, u, unknown, other, or absent
  misc_difference 154: note = a, c, g, u, unknown, other, or absent
  misc_difference 155: note = a, c, g, u, unknown, other, or absent
  misc_difference 156: note = a, c, g, u, unknown, other, or absent
  misc_difference 157: note = a, c, g, u, unknown, other, or absent
  misc_difference 158: note = a, c, g, u, unknown, other, or absent
  misc_difference 159: note = a, c, g, u, unknown, other, or absent
  misc_difference 160: note = a, c, g, u, unknown, other, or absent
  misc_difference 161: note = a, c, g, u, unknown, other, or absent
  misc_difference 162: note = a, c, g, u, unknown, other, or absent
  misc_difference 163: note = a, c, g, u, unknown, other, or absent
  misc_difference 164: note = a, c, g, u, unknown, other, or absent
  misc_difference 165: note = a, c, g, u, unknown, other, or absent
  misc_difference 166: note = a, c, g, u, unknown, other, or absent
  misc_difference 167: note = a, c, g, u, unknown, other, or absent
  misc_difference 168: note = a, c, g, u, unknown, other, or absent
  misc_difference 169: note = a, c, g, u, unknown, other, or absent
  misc_difference 170: note = a, c, g, u, unknown, other, or absent
  misc_difference 171: note = a, c, g, u, unknown, other, or absent
  misc_difference 172: note = a, c, g, u, unknown, other, or absent
  misc_difference 173: note = a, c, g, u, unknown, other, or absent
  misc_difference 174: note = a, c, g, u, unknown, other, or absent
  misc_difference 175: note = a, c, g, u, unknown, other, or absent
  misc_difference 176: note = a, c, g, u, unknown, other, or absent
  misc_difference 177: note = a, c, g, u, unknown, other, or absent
  misc_difference 178: note = a, c, g, u, unknown, other, or absent
  misc_difference 179: note = a, c, g, u, unknown, other, or absent
  misc_difference 180: note = a, c, g, u, unknown, other, or absent
  misc_difference 181: note = a, c, g, u, unknown, other, or absent
  misc_difference 182: note = a, c, g, u, unknown, other, or absent
  misc_difference 183: note = a, c, g, u, unknown, other, or absent
  misc_difference 184: note = a, c, g, u, unknown, other, or absent
  misc_difference 185: note = a, c, g, u, unknown, other, or absent
  misc_difference 186: note = a, c, g, u, unknown, other, or absent
  misc_difference 187: note = a, c, g, u, unknown, other, or absent
  misc_difference 188: note = a, c, g, u, unknown, other, or absent
  misc_difference 189: note = a, c, g, u, unknown, other, or absent
  misc_difference 190: note = a, c, g, u, unknown, other, or absent
  misc_difference 191: note = a, c, g, u, unknown, other, or absent
  misc_difference 192: note = a, c, g, u, unknown, other, or absent
  misc_difference 193: note = a, c, g, u, unknown, other, or absent
  misc_difference 194: note = a, c, g, u, unknown, other, or absent
  misc_difference 195: note = a, c, g, u, unknown, other, or absent
  misc_difference 196: note = a, c, g, u, unknown, other, or absent
  misc_difference 197: note = a, c, g, u, unknown, other, or absent
  misc_difference 198: note = a, c, g, u, unknown, other, or absent
  misc_difference 199: note = a, c, g, u, unknown, other, or absent
  misc_difference 200: note = a, c, g, u, unknown, other, or absent
  misc_difference 201: note = a, c, g, u, unknown, other, or absent
  misc_difference 202: note = a, c, g, u, unknown, other, or absent
  misc_difference 203: note = a, c, g, u, unknown, other, or absent
  misc_difference 204: note = a, c, g, u, unknown, other, or absent
  misc_difference 205: note = a, c, g, u, unknown, other, or absent
  misc_difference 206: note = a, c, g, u, unknown, other, or absent
  misc_difference 207: note = a, c, g, u, unknown, other, or absent
  misc_difference 208: note = a, c, g, u, unknown, other, or absent
  misc_difference 209: note = a, c, g, u, unknown, other, or absent
  misc_difference 210: note = a, c, g, u, unknown, other, or absent
  misc_difference 211: note = a, c, g, u, unknown, other, or absent
  misc_difference 212: note = a, c, g, u, unknown, other, or absent
  misc_difference 213: note = a, c, g, u, unknown, other, or absent
  misc_difference 214: note = a, c, g, u, unknown, other, or absent
  misc_difference 215: note = a, c, g, u, unknown, other, or absent
  misc_difference 216: note = a, c, g, u, unknown, other, or absent
  misc_difference 217: note = a, c, g, u, unknown, other, or absent
  misc_difference 218: note = a, c, g, u, unknown, other, or absent
  misc_difference 219: note = a, c, g, u, unknown, other, or absent
  misc_difference 220: note = a, c, g, u, unknown, other, or absent
  misc_difference 221: note = a, c, g, u, unknown, other, or absent
  misc_difference 222: note = a, c, g, u, unknown, other, or absent
  misc_difference 223: note = a, c, g, u, unknown, other, or absent
  misc_difference 224: note = a, c, g, u, unknown, other, or absent
  misc_difference 225: note = a, c, g, u, unknown, other, or absent
  misc_difference 226: note = a, c, g, u, unknown, other, or absent
  misc_difference 227: note = a, c, g, u, unknown, other, or absent
  misc_difference 228: note = a, c, g, u, unknown, other, or absent
  misc_difference 229: note = a, c, g, u, unknown, other, or absent
  misc_difference 230: note = a, c, g, u, unknown, other, or absent
  misc_difference 231: note = a, c, g, u, unknown, other, or absent
  misc_difference 232: note = a, c, g, u, unknown, other, or absent
  misc_difference 233: note = a, c, g, u, unknown, other, or absent
  misc_difference 234: note = a, c, g, u, unknown, other, or absent
  misc_difference 235: note = a, c, g, u, unknown, other, or absent
  misc_difference 236: note = a, c, g, u, unknown, other, or absent
  misc_difference 237: note = a, c, g, u, unknown, other, or absent
  misc_difference 238: note = a, c, g, u, unknown, other, or absent
  misc_difference 239: note = a, c, g, u, unknown, other, or absent
  misc_difference 240: note = a, c, g, u, unknown, other, or absent
  misc_difference 241: note = a, c, g, u, unknown, other, or absent
  misc_difference 242: note = a, c, g, u, unknown, other, or absent
  misc_difference 243: note = a, c, g, u, unknown, other, or absent
  misc_difference 244: note = a, c, g, u, unknown, other, or absent
  misc_difference 245: note = a, c, g, u, unknown, other, or absent
  misc_difference 246: note = a, c, g, u, unknown, other, or absent
  misc_difference 247: note = a, c, g, u, unknown, other, or absent
  misc_difference 248: note = a, c, g, u, unknown, other, or absent
  misc_difference 249: note = a, c, g, u, unknown, other, or absent
  misc_difference 250: note = a, c, g, u, unknown, other, or absent
  misc_difference 251: note = a, c, g, u, unknown, other, or absent
  misc_difference 252: note = a, c, g, u, unknown, other, or absent
  misc_difference 253: note = a, c, g, u, unknown, other, or absent
  misc_difference 254: note = a, c, g, u, unknown, other, or absent
  misc_difference 255: note = a, c, g, u, unknown, other, or absent
  misc_difference 256: note = a, c, g, u, unknown, other, or absent
  misc_difference 257: note = a, c, g, u, unknown, other, or absent
  misc_difference 258: note = a, c, g, u, unknown, other, or absent
  misc_difference 259: note = a, c, g, u, unknown, other, or absent
  misc_difference 260: note = a, c, g, u, unknown, other, or absent
  misc_difference 261: note = a, c, g, u, unknown, other, or absent
  misc_difference 262: note = a, c, g, u, unknown, other, or absent
  misc_difference 263: note = a, c, g, u, unknown, other, or absent
  misc_difference 264: note = a, c, g, u, unknown, other, or absent
  misc_difference 265: note = a, c, g, u, unknown, other, or absent
  misc_difference 266: note = a, c, g, u, unknown, other, or absent
  misc_difference 267: note = a, c, g, u, unknown, other, or absent
  misc_difference 268: note = a, c, g, u, unknown, other, or absent
  misc_difference 269: note = a, c, g, u, unknown, other, or absent
  misc_difference 270: note = a, c, g, u, unknown, other, or absent
  misc_difference 271: note = a, c, g, u, unknown, other, or absent
  misc_difference 272: note = a, c, g, u, unknown, other, or absent
  misc_difference 273: note = a, c, g, u, unknown, other, or absent
  misc_difference 274: note = a, c, g, u, unknown, other, or absent
  misc_difference 275: note = a, c, g, u, unknown, other, or absent
  misc_difference 276: note = a, c, g, u, unknown, other, or absent
  misc_difference 277: note = a, c, g, u, unknown, other, or absent
  misc_difference 278: note = a, c, g, u, unknown, other, or absent
  misc_difference 279: note = a, c, g, u, unknown, other, or absent
  misc_difference 280: note = a, c, g, u, unknown, other, or absent
  misc_difference 281: note = a, c, g, u, unknown, other, or absent
  misc_difference 282: note = a, c, g, u, unknown, other, or absent
  misc_difference 283: note = a, c, g, u, unknown, other, or absent
  misc_difference 284: note = a, c, g, u, unknown, other, or absent
  misc_difference 285: note = a, c, g, u, unknown, other, or absent
  misc_difference 286: note = a, c, g, u, unknown, other, or absent
  misc_difference 287: note = a, c, g, u, unknown, other, or absent
  misc_difference 288: note = a, c, g, u, unknown, other, or absent
  misc_difference 289: note = a, c, g, u, unknown, other, or absent
  misc_difference 290: note = a, c, g, u, unknown, other, or absent
  misc_difference 291: note = a, c, g, u, unknown, other, or absent
  misc_difference 292: note = a, c, g, u, unknown, other, or absent
  misc_difference 293: note = a, c, g, u, unknown, other, or absent
  misc_difference 294: note = a, c, g, u, unknown, other, or absent
  misc_difference 295: note = a, c, g, u, unknown, other, or absent
  misc_difference 296: note = a, c, g, u, unknown, other, or absent
  misc_difference 297: note = a, c, g, u, unknown, other, or absent
  misc_difference 298: note = a, c, g, u, unknown, other, or absent
  misc_difference 299: note = a, c, g, u, unknown, other, or absent
  misc_difference 300: note = a, c, g, u, unknown, other, or absent
  misc_difference 301: note = a, c, g, u, unknown, other, or absent
  misc_difference 302: note = a, c, g, u, unknown, other, or absent
  misc_difference 303: note = a, c, g, u, unknown, other, or absent
  misc_difference 304: note = a, c, g, u, unknown, other, or absent
  misc_difference 305: note = a, c, g, u, unknown, other, or absent
  misc_difference 306: note = a, c, g, u, unknown, other, or absent
  misc_difference 307: note = a, c, g, u, unknown, other, or absent
  misc_difference 308: note = a, c, g, u, unknown, other, or absent
  misc_difference 309: note = a, c, g, u, unknown, other, or absent
  misc_difference 310: note = a, c, g, u, unknown, other, or absent
  misc_difference 311: note = a, c, g, u, unknown, other, or absent
  misc_difference 312: note = a, c, g, u, unknown, other, or absent
  misc_difference 313: note = a, c, g, u, unknown, other, or absent
  misc_difference 314: note = a, c, g, u, unknown, other, or absent
  misc_difference 315: note = a, c, g, u, unknown, other, or absent
  misc_difference 316: note = a, c, g, u, unknown, other, or absent
  misc_difference 317: note = a, c, g, u, unknown, other, or absent
  misc_difference 318: note = May be absent
  misc_difference 319: note = a, c, g, u, unknown, other, or absent
  misc_difference 320: note = May be absent
  misc_difference 321: note = May be absent
  misc_difference 322: note = May be absent
  misc_difference 323: note = May be absent
  misc_difference 324: note = May be absent
  misc_difference 325: note = May be absent
  misc_difference 326: note = May be absent
  misc_difference 327: note = May be absent
  misc_difference 328: note = May be absent
  misc_difference 329: note = May be absent
  misc_difference 330: note = May be absent
  misc_difference 331: note = May be absent
  misc_difference 332: note = May be absent
  misc_difference 333: note = a, c, g, u, unknown, other, or absent
  misc_difference 334: note = May be absent
  misc_difference 335: note = May be absent
  misc_difference 336: note = a, c, g, u, unknown, other, or absent
  misc_difference 337: note = May be absent
  misc_difference 338: note = May be absent
  misc_difference 339: note = May be absent
  misc_difference 340: note = a, c, g, u, unknown, other, or absent
  misc_difference 341: note = May be absent
  misc_difference 342: note = May be absent
  misc_difference 46..317: note = This region may encompass 1-271 nucleotides
rbbvvndtrkhhsrrbhygkhhtrwkrhdbhdnrythardhynhdnnnnnnnnnnnnnnnnnnnnnnnnnnnnnnnnnnnnnnnnnnnnnnnnnnnnnnnnnnnnnnnnnnnnnnnnnnnnnnnnnnnnnnnnnnnnnnnnnnnnnnnnnnnnnnnnnnnnnnnnnnnnnnnnnnnnnnnnnnnnnnnnnnnnnnnnnnnnnnnnnnnnnnnnnnnnnnnnnnnnnnnnnnnnnnnnnnnnnnnnnnnnnnnnnnnnnnnnnnnnnnnnnnnnnnnnnnnnnnnnnnnnnnnnnnnnnnnnnnnnnnnnnnnnnnnnvnvgbythvavymybnbynbbvnya

SEQ ID NO: 598 - RNA, 342 nt, synthetic construct
  source 1..342: mol_type = other RNA
  misc_difference 1: note = a, c, g, u, unknown, other, or absent
  misc_difference 2: note = a, c, g, u, unknown, other, or absent
  misc_difference 3: note = a, c, g, u, unknown, other, or absent
  misc_difference 4: note = a, c, g, u, unknown, other, or absent
  misc_difference 5: note = a, c, g, u, unknown, other, or absent
  misc_difference 6: note = a, c, g, u, unknown, other, or absent
  misc_difference 7: note = a, c, g, u, unknown, other, or absent
  misc_difference 8: note = May be absent
  misc_difference 9: note = May be absent
  misc_difference 10: note = May be absent
  misc_difference 11: note = a, c, g, u, unknown, other, or absent
  misc_difference 12: note = a, c, g, u, unknown, other, or absent
  misc_difference 13: note = May be absent
  misc_difference 14: note = May be absent
  misc_difference 15: note = May be absent
  misc_difference 16: note = a, c, g, u, unknown, other, or absent
  misc_difference 17: note = May be absent
  misc_difference 18: note = May be absent
  misc_difference 19: note = May be absent
  misc_difference 20: note = May be absent
  misc_difference 21: note = a, c, g, u, unknown, other, or absent
  misc_difference 22: note = May be absent
  misc_difference 23: note = May be absent
  misc_difference 24: note = May be absent
  misc_difference 25: note = May be absent
  misc_difference 26: note = a, c, g, u, unknown, other, or absent
  misc_difference 27: note = May be absent
  misc_difference 28: note = May be absent
  misc_difference 29: note = May be absent
  misc_difference 30: note = a, c, g, u, unknown, other, or absent
  misc_difference 31: note = a, c, g, u, unknown, other, or absent
  misc_difference 32: note = a, c, g, u, unknown, other, or absent
  misc_difference 33: note = May be absent
  misc_difference 34: note = May be absent
  misc_difference 35: note = May be absent
  misc_difference 36: note = May be absent
  misc_difference 37: note = May be absent
  misc_difference 38: note = May be absent
  misc_difference 39: note = May be absent
  misc_difference 40: note = May be absent
  misc_difference 41: note = May be absent
  misc_difference 42: note = May be absent
  misc_difference 43: note = May be absent
  misc_difference 44: note = a, c, g, u, unknown, other, or absent
  misc_difference 45: note = a, c, g, u, unknown, other, or absent
  misc_difference 46: note = a, c, g, u, unknown, other, or absent
  misc_difference 47: note = a, c, g, u, unknown, other, or absent
  misc_difference 48: note = a, c, g, u, unknown, other, or absent
  misc_difference 49: note = a, c, g, u, unknown, other, or absent
  misc_difference 50: note = a, c, g, u, unknown, other, or absent
  misc_difference 51: note = a, c, g, u, unknown, other, or absent
  misc_difference 52: note = a, c, g, u, unknown, other, or absent
  misc_difference 53: note = a, c, g, u, unknown, other, or absent
  misc_difference 54: note = a, c, g, u, unknown, other, or absent
  misc_difference 55: note = a, c, g, u, unknown, other, or absent
  misc_difference 56: note = a, c, g, u, unknown, other, or absent
  misc_difference 57: note = a, c, g, u, unknown, other, or absent
  misc_difference 58: note = a, c, g, u, unknown, other, or absent
  misc_difference 59: note = a, c, g, u, unknown, other, or absent
  misc_difference 60: note = a, c, g, u, unknown, other, or absent
  misc_difference 61: note = a, c, g, u, unknown, other, or absent
  misc_difference 62: note = a, c, g, u, unknown, other, or absent
  misc_difference 63: note = a, c, g, u, unknown, other, or absent
  misc_difference 64: note = a, c, g, u, unknown, other, or absent
  misc_difference 65: note = a, c, g, u, unknown, other, or absent
  misc_difference 66: note = a, c, g, u, unknown, other, or absent
  misc_difference 67: note = a, c, g, u, unknown, other, or absent
  misc_difference 68: note = a, c, g, u, unknown, other, or absent
  misc_difference 69: note = a, c, g, u, unknown, other, or absent
  misc_difference 70: note = a, c, g, u, unknown, other, or absent
  misc_difference 71: note = a, c, g, u, unknown, other, or absent
  misc_difference 72: note = a, c, g, u, unknown, other, or absent
  misc_difference 73: note = a, c, g, u, unknown, other, or absent
  misc_difference 74: note = a, c, g, u, unknown, other, or absent
  misc_difference 75: note = a, c, g, u, unknown, other, or absent
  misc_difference 76: note = a, c, g, u, unknown, other, or absent
  misc_difference 77: note = a, c, g, u, unknown, other, or absent
  misc_difference 78: note = a, c, g, u, unknown, other, or absent
  misc_difference 79: note = a, c, g, u, unknown, other, or absent
  misc_difference 80: note = a, c, g, u, unknown, other, or absent
  misc_difference 81: note = a, c, g, u, unknown, other, or absent
  misc_difference 82: note = a, c, g, u, unknown, other, or absent
  misc_difference 83: note = a, c, g, u, unknown, other, or absent
  misc_difference 84: note = a, c, g, u, unknown, other, or absent
  misc_difference 85: note = a, c, g, u, unknown, other, or absent
  misc_difference 86: note = a, c, g, u, unknown, other, or absent
  misc_difference 87: note = a, c, g, u, unknown, other, or absent
  misc_difference 88: note = a, c, g, u, unknown, other, or absent
  misc_difference 89: note = a, c, g, u, unknown, other, or absent
  misc_difference 90: note = a, c, g, u, unknown, other, or absent
  misc_difference 91: note = a, c, g, u, unknown, other, or absent
  misc_difference 92: note = a, c, g, u, unknown, other, or absent
  misc_difference 93: note = a, c, g, u, unknown, other, or absent
  misc_difference 94: note = a, c, g, u, unknown, other, or absent
  misc_difference 95: note = a, c, g, u, unknown, other, or absent
  misc_difference 96: note = a, c, g, u, unknown, other, or absent
  misc_difference 97: note = a, c, g, u, unknown, other, or absent
  misc_difference 98: note = a, c, g, u, unknown, other, or absent
  misc_difference 99: note = a, c, g, u, unknown, other, or absent
  misc_difference 100: note = a, c, g, u, unknown, other, or absent
  misc_difference 101: note = a, c, g, u, unknown, other, or absent
  misc_difference 102: note = a, c, g, u, unknown, other, or absent
  misc_difference 103: note = a, c, g, u, unknown, other, or absent
  misc_difference 104: note = a, c, g, u, unknown, other, or absent
  misc_difference 105: note = a, c, g, u, unknown, other, or absent
  misc_difference 106: note = a, c, g, u, unknown, other, or absent
  misc_difference 107: note = a, c, g, u, unknown, other, or absent
  misc_difference 108: note = a, c, g, u, unknown, other, or absent
  misc_difference 109: note = a, c, g, u, unknown, other, or absent
  misc_difference 110: note = a, c, g, u, unknown, other, or absent
  misc_difference 111: note = a, c, g, u, unknown, other, or absent
  misc_difference 112: note = a, c, g, u, unknown, other, or absent
  misc_difference 113: note = a, c, g, u, unknown, other, or absent
  misc_difference 114: note = a, c, g, u, unknown, other, or absent
  misc_difference 115: note = a, c, g, u, unknown, other, or absent
  misc_difference 116: note = a, c, g, u, unknown, other, or absent
  misc_difference 117: note = a, c, g, u, unknown, other, or absent
  misc_difference 118: note = a, c, g, u, unknown, other, or absent
  misc_difference 119: note = a, c, g, u, unknown, other, or absent
  misc_difference 120: note = a, c, g, u, unknown, other, or absent
  misc_difference 121: note = a, c, g, u, unknown, other, or absent
  misc_difference 122: note = a, c, g, u, unknown, other, or absent
  misc_difference 123: note = a, c, g, u, unknown, other, or absent
  misc_difference 124: note = a, c, g, u, unknown, other, or absent
  misc_difference 125: note = a, c, g, u, unknown, other, or absent
  misc_difference 126: note = a, c, g, u, unknown, other, or absent
  misc_difference 127: note = a, c, g, u, unknown, other, or absent
  misc_difference 128: note = a, c, g, u, unknown, other, or absent
  misc_difference 129: note = a, c, g, u, unknown, other, or absent
  misc_difference 130: note = a, c, g, u, unknown, other, or absent
  misc_difference 131: note = a, c, g, u, unknown, other, or absent
  misc_difference 132: note = a, c, g, u, unknown, other, or absent
  misc_difference 133: note = a, c, g, u, unknown, other, or absent
  misc_difference 134: note = a, c, g, u, unknown, other, or absent
  misc_difference 135: note = a, c, g, u, unknown, other, or absent
  misc_difference 136: note = a, c, g, u, unknown, other, or absent
  misc_difference 137: note = a, c, g, u, unknown, other, or absent
  misc_difference 138: note = a, c, g, u, unknown, other, or absent
  misc_difference 139: note = a, c, g, u, unknown, other, or absent
  misc_difference 140: note = a, c, g, u, unknown, other, or absent
  misc_difference 141: note = a, c, g, u, unknown, other, or absent
  misc_difference 142: note = a, c, g, u, unknown, other, or absent
  misc_difference 143: note = a, c, g, u, unknown, other, or absent
  misc_difference 144: note = a, c, g, u, unknown, other, or absent
  misc_difference 145: note = a, c, g, u, unknown, other, or absent
  misc_difference 146: note = a, c, g, u, unknown, other, or absent
  misc_difference 147: note = a, c, g, u, unknown, other, or absent
  misc_difference 148: note = a, c, g, u, unknown, other, or absent
  misc_difference 149: note = a, c, g, u, unknown, other, or absent
  misc_difference 150: note = a, c, g, u, unknown, other, or absent
  misc_difference 151: note = a, c, g, u, unknown, other, or absent
  misc_difference 152: note = a, c, g, u, unknown, other, or absent
  misc_difference 153: note = a, c, g, u, unknown, other, or absent
  misc_difference 154: note = a, c, g, u, unknown, other, or absent
  misc_difference 155: note = a, c, g, u, unknown, other, or absent
  misc_difference 156: note = a, c, g, u, unknown, other, or absent
  misc_difference 157: note = a, c, g, u, unknown, other, or absent
  misc_difference 158: note = a, c, g, u, unknown, other, or absent
  misc_difference 159: note = a, c, g, u, unknown, other, or absent
  misc_difference 160: note = a, c, g, u, unknown, other, or absent
  misc_difference 161: note = a, c, g, u, unknown, other, or absent
  misc_difference 162: note = a, c, g, u, unknown, other, or absent
  misc_difference 163: note = a, c, g, u, unknown, other, or absent
  misc_difference 164: note = a, c, g, u, unknown, other, or absent
  misc_difference 165: note = a, c, g, u, unknown, other, or absent
  misc_difference 166: note = a, c, g, u, unknown, other, or absent
  misc_difference 167: note = a, c, g, u, unknown, other, or absent
  misc_difference 168: note = a, c, g, u, unknown, other, or absent
  misc_difference 169: note = a, c, g, u, unknown, other, or absent
  misc_difference 170: note = a, c, g, u, unknown, other, or absent
  misc_difference 171: note = a, c, g, u, unknown, other, or absent
  misc_difference 172: note = a, c, g, u, unknown, other, or absent
  misc_difference 173: note = a, c, g, u, unknown, other, or absent
  misc_difference 174: note = a, c, g, u, unknown, other, or absent
  misc_difference 175: note = a, c, g, u, unknown, other, or absent
  misc_difference 176: note = a, c, g, u, unknown, other, or absent
  misc_difference 177: note = a, c, g, u, unknown, other, or absent
  misc_difference 178: note = a, c, g, u, unknown, other, or absent
  misc_difference 179: note = a, c, g, u, unknown, other, or absent
  misc_difference 180: note = a, c, g, u, unknown, other, or absent
  misc_difference 181: note = a, c, g, u, unknown, other, or absent
  misc_difference 182: note = a, c, g, u, unknown, other, or absent
  misc_difference 183: note = a, c, g, u, unknown, other, or absent
  misc_difference 184: note = a, c, g, u, unknown, other, or absent
  misc_difference 185: note = a, c, g, u, unknown, other, or absent
  misc_difference 186: note = a, c, g, u, unknown, other, or absent
  misc_difference 187: note = a, c, g, u, unknown, other, or absent
  misc_difference 188: note = a, c, g, u, unknown, other, or absent
  misc_difference 189: note = a, c, g, u, unknown, other, or absent
  misc_difference 190: note = a, c, g, u, unknown, other, or absent
  misc_difference 191: note = a, c, g, u, unknown, other, or absent
  misc_difference 192: note = a, c, g, u, unknown, other, or absent
  misc_difference 193: note = a, c, g, u, unknown, other, or absent
  misc_difference 194: note = a, c, g, u, unknown, other, or absent
  misc_difference 195: note = a, c, g, u, unknown, other, or absent
  misc_difference 196: note = a, c, g, u, unknown, other, or absent
  misc_difference 197: note = a, c, g, u, unknown, other, or absent
  misc_difference 198: note = a, c, g, u, unknown, other, or absent
  misc_difference 199: note = a, c, g, u, unknown, other, or absent
  misc_difference 200: note = a, c, g, u, unknown, other, or absent
  misc_difference 201: note = a, c, g, u, unknown, other, or absent
  misc_difference 202: note = a, c, g, u, unknown, other, or absent
  misc_difference 203: note = a, c, g, u, unknown, other, or absent
  misc_difference 204: note = a, c, g, u, unknown, other, or absent
  misc_difference 205: note = a, c, g, u, unknown, other, or absent
  misc_difference 206: note = a, c, g, u, unknown, other, or absent
  misc_difference 207: note = a, c, g, u, unknown, other, or absent
  misc_difference 208: note = a, c, g, u, unknown, other, or absent
  misc_difference 209: note = a, c, g, u, unknown, other, or absent
  misc_difference 210: note = a, c, g, u, unknown, other, or absent
  misc_difference 211: note = a, c, g, u, unknown, other, or absent
  misc_difference 212: note = a, c, g, u, unknown, other, or absent
  misc_difference 213: note = a, c, g, u, unknown, other, or absent
  misc_difference 214: note = a, c, g, u, unknown, other, or absent
  misc_difference 215: note = a, c, g, u, unknown, other, or absent
  misc_difference 216: note = a, c, g, u, unknown, other, or absent
  misc_difference 217: note = a, c, g, u, unknown, other, or absent
  misc_difference 218: note = a, c, g, u, unknown, other, or absent
  misc_difference 219: note = a, c, g, u, unknown, other, or absent
  misc_difference 220: note = a, c, g, u, unknown, other, or absent
  misc_difference 221: note = a, c, g, u, unknown, other, or absent
  misc_difference 222: note = a, c, g, u, unknown, other, or absent
  misc_difference 223: note = a, c, g, u, unknown, other, or absent
  misc_difference 224: note = a, c, g, u, unknown, other, or absent
  misc_difference 225: note = a, c, g, u, unknown, other, or absent
  misc_difference 226: note = a, c, g, u, unknown, other, or absent
  misc_difference 227: note = a, c, g, u, unknown, other, or absent
  misc_difference 228: note = a, c, g, u, unknown, other, or absent
  misc_difference 229: note = a, c, g, u, unknown, other, or absent
  misc_difference 230: note = a, c, g, u, unknown, other, or absent
  misc_difference 231: note = a, c, g, u, unknown, other, or absent
  misc_difference 232: note = a, c, g, u, unknown, other, or absent
  misc_difference 233: note = a, c, g, u, unknown, other, or absent
  misc_difference 234: note = a, c, g, u, unknown, other, or absent
  misc_difference 235: note = a, c, g, u, unknown, other, or absent
  misc_difference 236: note = a, c, g, u, unknown, other, or absent
  misc_difference 237: note = a, c, g, u, unknown, other, or absent
  misc_difference 238: note = a, c, g, u, unknown, other, or absent
  misc_difference 239: note = a, c, g, u, unknown, other, or absent
  misc_difference 240: note = a, c, g, u, unknown, other, or absent
  misc_difference 241: note = a, c, g, u, unknown, other, or absent
  misc_difference 242: note = a, c, g, u, unknown, other, or absent
  misc_difference 243: note = a, c, g, u, unknown, other, or absent
  misc_difference 244: note = a, c, g, u, unknown, other, or absent
  misc_difference 245: note = a, c, g, u, unknown, other, or absent
  misc_difference 246: note = a, c, g, u, unknown, other, or absent
  misc_difference 247: note = a, c, g, u, unknown, other, or absent
  misc_difference 248: note = a, c, g, u, unknown, other, or absent
  misc_difference 249: note = a, c, g, u, unknown, other, or absent
  misc_difference 250: note = a, c, g, u, unknown, other, or absent
  misc_difference 251: note = a, c, g, u, unknown, other, or absent
  misc_difference 252: note = a, c, g, u, unknown, other, or absent
  misc_difference 253: note = a, c, g, u, unknown, other, or absent
  misc_difference 254: note = a, c, g, u, unknown, other, or absent
  misc_difference 255: note = a, c, g, u, unknown, other, or absent
  misc_difference 256: note = a, c, g, u, unknown, other, or absent
  misc_difference 257: note = a, c, g, u, unknown, other, or absent
  misc_difference 258: note = a, c, g, u, unknown, other, or absent
  misc_difference 259: note = a, c, g, u, unknown, other, or absent
  misc_difference 260: note = a, c, g, u, unknown, other, or absent
  misc_difference 261: note = a, c, g, u, unknown, other, or absent
  misc_difference 262: note = a, c, g, u, unknown, other, or absent
  misc_difference 263: note = a, c, g, u, unknown, other, or absent
  misc_difference 264: note = a, c, g, u, unknown, other, or absent
  misc_difference 265: note = a, c, g, u, unknown, other, or absent
  misc_difference 266: note = a, c, g, u, unknown, other, or absent
  misc_difference 267: note = a, c, g, u, unknown, other, or absent
  misc_difference 268: note = a, c, g, u, unknown, other, or absent
  misc_difference 269: note = a, c, g, u, unknown, other, or absent
  misc_difference 270: note = a, c, g, u, unknown, other, or absent
  misc_difference 271: note = a, c, g, u, unknown, other, or absent
  misc_difference 272: note = a, c, g, u, unknown, other, or absent
  misc_difference 273: note = a, c, g, u, unknown, other, or absent
  misc_difference 274: note = a, c, g, u, unknown, other, or absent
  misc_difference 275: note = a, c, g, u, unknown, other, or absent
  misc_difference 276: note = a, c, g, u, unknown, other, or absent
  misc_difference 277: note = a, c, g, u, unknown, other, or absent
  misc_difference 278: note = a, c, g, u, unknown, other, or absent
  misc_difference 279: note = a, c, g, u, unknown, other, or absent
  misc_difference 280: note = a, c, g, u, unknown, other, or absent
  misc_difference 281: note = a, c, g, u, unknown, other, or absent
  misc_difference 282: note = a, c, g, u, unknown, other, or absent
  misc_difference 283: note = a, c, g, u, unknown, other, or absent
  misc_difference 284: note = a, c, g, u, unknown, other, or absent
  misc_difference 285: note = a, c, g, u, unknown, other, or absent
  misc_difference 286: note = a, c, g, u, unknown, other, or absent
  misc_difference 287: note = a, c, g, u, unknown, other, or absent
  misc_difference 288: note = a, c, g, u, unknown, other, or absent
  misc_difference 289: note = a, c, g, u, unknown, other, or absent
  misc_difference 290: note = a, c, g, u, unknown, other, or absent
  misc_difference 291: note = a, c, g, u, unknown, other, or absent
  misc_difference 292: note = a, c, g, u, unknown, other, or absent
  misc_difference 293: note = a, c, g, u, unknown, other, or absent
  misc_difference 294: note = a, c, g, u, unknown, other, or absent
  misc_difference 295: note = a, c, g, u, unknown, other, or absent
  misc_difference 296: note = a, c, g, u, unknown, other, or absent
  misc_difference 297: note = a, c, g, u, unknown, other, or absent
  misc_difference 298: note = a, c, g, u, unknown, other, or absent
  misc_difference 299: note = a, c, g, u, unknown, other, or absent
  misc_difference 300: note = a, c, g, u, unknown, other, or absent
  misc_difference 301: note = a, c, g, u, unknown, other, or absent
  misc_difference 302: note = a, c, g, u, unknown, other, or absent
  misc_difference 303: note = a, c, g, u, unknown, other, or absent
  misc_difference 304: note = a, c, g, u, unknown, other, or absent
  misc_difference 305: note = a, c, g, u, unknown, other, or absent
  misc_difference 306: note = a, c, g, u, unknown, other, or absent
  misc_difference 307: note = a, c, g, u, unknown, other, or absent
  misc_difference 308: note = a, c, g, u, unknown, other, or absent
  misc_difference 309: note = a, c, g, u, unknown, other, or absent
  misc_difference 310: note = a, c, g, u, unknown, other, or absent
  misc_difference 311: note = a, c, g, u, unknown, other, or absent
  misc_difference 312: note = a, c, g, u, unknown, other, or absent
  misc_difference 313: note = a, c, g, u, unknown, other, or absent
  misc_difference 314: note = a, c, g, u, unknown, other, or absent
  misc_difference 315: note = a, c, g, u, unknown, other, or absent
  misc_difference 316: note = a, c, g, u, unknown, other, or absent
  misc_difference 317: note = a, c, g, u, unknown, other, or absent
  misc_difference 318: note = a, c, g, u, unknown, other, or absent
  misc_difference 319: note = a, c, g, u, unknown, other, or absent
  misc_difference 320: note = a, c, g, u, unknown, other, or absent
  misc_difference 321: note = May be absent
  misc_difference 322: note = May be absent
  misc_difference 323: note = May be absent
  misc_difference 324: note = May be absent
  misc_difference 325: note = May be absent
  misc_difference 326: note = May be absent
  misc_difference 327: note = May be absent
  misc_difference 328: note = a, c, g, u, unknown, other, or absent
  misc_difference 329: note = May be absent
  misc_difference 330: note = May be absent
  misc_difference 331: note = May be absent
  misc_difference 332: note = a, c, g, u, unknown, other, or absent
  misc_difference 333: note = a, c, g, u, unknown, other, or absent
  misc_difference 334: note = May be absent
  misc_difference 335: note = a, c, g, u, unknown, other, or absent
  misc_difference 336: note = a, c, g, u, unknown, other, or absent
  misc_difference 337: note = a, c, g, u, unknown, other, or absent
  misc_difference 338: note = a, c, g, u, unknown, other, or absent
  misc_difference 339: note = a, c, g, u, unknown, other, or absent
  misc_difference 340: note = a, c, g, u, unknown, other, or absent
  misc_difference 341: note = May be absent
  misc_difference 342: note = May be absent
  misc_difference 44..315: note = This region may encompass 1-271 nucleotides
nnnnnnntrsnnharnhwrrnttdrnrydnnnsvyyyttmmbvnnnnnnnnnnnnnnnnnnnnnnnnnnnnnnnnnnnnnnnnnnnnnnnnnnnnnnnnnnnnnnnnnnnnnnnnnnnnnnnnnnnnnnnnnnnnnnnnnnnnnnnnnnnnnnnnnnnnnnnnnnnnnnnnnnnnnnnnnnnnnnnnnnnnnnnnnnnnnnnnnnnnnnnnnnnnnnnnnnnnnnnnnnnnnnnnnnnnnnnnnnnnnnnnnnnnnnnnnnnnnnnnnnnnnnnnnnnnnnnnnnnnnnnnnnnnnnnnnnnnnnnnnnnnnnnnnnnnnvrytyrwnhybnnbnnnnnnhd

SEQ ID NO: 599 - RNA, 340 nt, synthetic construct
  source 1..340: mol_type = other RNA
  misc_difference 1: note = a, c, g, u, unknown, other, or absent
  misc_difference 2: note = May be absent
  misc_difference 3: note = May be absent
  misc_difference 4: note = May be absent
  misc_difference 5: note = May be absent
  misc_difference 6: note = a, c, g, u, unknown, other, or absent
  misc_difference 7: note = May be absent
  misc_difference 8: note = May be absent
  misc_difference 9: note = May be absent
  misc_difference 10: note = May be absent
  misc_difference 11: note = a, c, g, u, unknown, other, or absent
  misc_difference 12: note = May be absent
  misc_difference 13: note = May be absent
  misc_difference 14: note = May be absent
  misc_difference 15: note = May be absent
  misc_difference 16: note = May be absent
  misc_difference 17: note = May be absent
  misc_difference 18: note = May be absent
  misc_difference 19: note = May be absent
  misc_difference 20: note = May be absent
  misc_difference 21: note = May be absent
  misc_difference 22: note = May be absent
  misc_difference 23: note = May be absent
  misc_difference 24: note = May be absent
  misc_difference 25: note = May be absent
  misc_difference 26: note = May be absent
  misc_difference 27: note = May be absent
  misc_difference 28: note = May be absent
  misc_difference 29: note = a, c, g, u, unknown, other, or absent
  misc_difference 30: note = May be absent
  misc_difference 31: note = May be absent
  misc_difference 32: note = May be absent
  misc_difference 33: note = May be absent
  misc_difference 34: note = May be absent
  misc_difference 35: note = May be absent
  misc_difference 36: note = May be absent
  misc_difference 37: note = May be absent
  misc_difference 38: note = May be absent
  misc_difference 39: note = May be absent
  misc_difference 40: note = May be absent
  misc_difference 41: note = May be absent
  misc_difference 42: note = May be absent
  misc_difference 43: note = a, c, g, u, unknown, other, or absent
  misc_difference 44: note = May be absent
  misc_difference 45: note = a, c, g, u, unknown, other, or absent
  misc_difference 46: note = a, c, g, u, unknown, other, or absent
  misc_difference 47: note = a, c, g, u, unknown, other, or absent
  misc_difference 48: note = a, c, g, u, unknown, other, or absent
  misc_difference 49: note = a, c, g, u, unknown, other, or absent
  misc_difference 50: note = a, c, g, u, unknown, other, or absent
  misc_difference 51: note = a, c, g, u, unknown, other, or absent
  misc_difference 52: note = a, c, g, u, unknown, other, or absent
  misc_difference 53: note = a, c, g, u, unknown, other, or absent
  misc_difference 54: note = a, c, g, u, unknown, other, or absent
  misc_difference 55: note = a, c, g, u, unknown, other, or absent
  misc_difference 56: note = a, c, g, u, unknown, other, or absent
  misc_difference 57: note = a, c, g, u, unknown, other, or absent
  misc_difference 58: note = a, c, g, u, unknown, other, or absent
  misc_difference 59: note = a, c, g, u, unknown, other, or absent
  misc_difference 60: note = a, c, g, u, unknown, other, or absent
  misc_difference 61: note = a, c, g, u, unknown, other, or absent
  misc_difference 62: note = a, c, g, u, unknown, other, or absent
  misc_difference 63: note = a, c, g, u, unknown, other, or absent
  misc_difference 64: note = a, c, g, u, unknown, other, or absent
  misc_difference 65: note = a, c, g, u, unknown, other, or absent
  misc_difference 66: note = a, c, g, u, unknown, other, or absent
  misc_difference 67: note = a, c, g, u, unknown, other, or absent
  misc_difference 68: note = a, c, g, u, unknown, other, or absent
  misc_difference 69: note = a, c, g, u, unknown, other, or absent
  misc_difference 70: note = a, c, g, u, unknown, other, or absent
  misc_difference 71: note = a, c, g, u, unknown, other, or absent
  misc_difference 72: note = a, c, g, u, unknown, other, or absent
  misc_difference 73: note = a, c, g, u, unknown, other, or absent
  misc_difference 74: note = a, c, g, u, unknown, other, or absent
  misc_difference 75: note = a, c, g, u, unknown, other, or absent
  misc_difference 76: note = a, c, g, u, unknown, other, or absent
  misc_difference 77: note = a, c, g, u, unknown, other, or absent
  misc_difference 78: note = a, c, g, u, unknown, other, or absent
  misc_difference 79: note = a, c, g, u, unknown, other, or absent
  misc_difference 80: note = a, c, g, u, unknown, other, or absent
  misc_difference 81: note = a, c, g, u, unknown, other, or absent
  misc_difference 82: note = a, c, g, u, unknown, other, or absent
  misc_difference 83: note = a, c, g, u, unknown, other, or absent
  misc_difference 84: note = a, c, g, u, unknown, other, or absent
  misc_difference 85: note = a, c, g, u, unknown, other, or absent
  misc_difference 86: note = a, c, g, u, unknown, other, or absent
  misc_difference 87: note = a, c, g, u, unknown, other, or absent
  misc_difference 88: note = a, c, g, u, unknown, other, or absent
  misc_difference 89: note = a, c, g, u, unknown, other, or absent
  misc_difference 90: note = a, c, g, u, unknown, other, or absent
  misc_difference 91: note = a, c, g, u, unknown, other, or absent
  misc_difference 92: note = a, c, g, u, unknown, other, or absent
  misc_difference 93: note = a, c, g, u, unknown, other, or absent
  misc_difference 94: note = a, c, g, u, unknown, other, or absent
  misc_difference 95: note = a, c, g, u, unknown, other, or absent
  misc_difference 96: note = a, c, g, u, unknown, other, or absent
  misc_difference 97: note = a, c, g, u, unknown, other, or absent
  misc_difference 98: note = a, c, g, u, unknown, other, or absent
  misc_difference 99: note = a, c, g, u, unknown, other, or absent
  misc_difference 100: note = a, c, g, u, unknown, other, or absent
  misc_difference 101: note = a, c, g, u, unknown, other, or absent
  misc_difference 102: note = a, c, g, u, unknown, other, or absent
  misc_difference 103: note = a, c, g, u, unknown, other, or absent
  misc_difference 104: note = a, c, g, u, unknown, other, or absent
  misc_difference 105: note = a, c, g, u, unknown, other, or absent
  misc_difference 106: note = a, c, g, u, unknown, other, or absent
  misc_difference 107: note = a, c, g, u, unknown, other, or absent
  misc_difference 108: note = a, c, g, u, unknown, other, or absent
  misc_difference 109: note = a, c, g, u, unknown, other, or absent
  misc_difference 110: note = a, c, g, u, unknown, other, or absent
  misc_difference 111: note = a, c, g, u, unknown, other, or absent
  misc_difference 112: note = a, c, g, u, unknown, other, or absent
  misc_difference 113: note = a, c, g, u, unknown, other, or absent
  misc_difference 114: note = a, c, g, u, unknown, other, or absent
  misc_difference 115: note = a, c, g, u, unknown, other, or absent
  misc_difference 116: note = a, c, g, u, unknown, other, or absent
  misc_difference 117: note = a, c, g, u, unknown, other, or absent
  misc_difference 118: note = a, c, g, u, unknown, other, or absent
  misc_difference 119: note = a, c, g, u, unknown, other, or absent
  misc_difference 120: note = a, c, g, u, unknown, other, or absent
  misc_difference 121: note = a, c, g, u, unknown, other, or absent
  misc_difference 122: note = a, c, g, u, unknown, other, or absent
  misc_difference 123: note = a, c, g, u, unknown, other, or absent
  misc_difference 124: note = a, c, g, u, unknown, other, or absent
  misc_difference 125: note = a, c, g, u, unknown, other, or absent
  misc_difference 126: note = a, c, g, u, unknown, other, or absent
  misc_difference 127: note = a, c, g, u, unknown, other, or absent
  misc_difference 128: note = a, c, g, u, unknown, other, or absent
  misc_difference 129: note = a, c, g, u, unknown, other, or absent
  misc_difference 130: note = a, c, g, u, unknown, other, or absent
  misc_difference 131: note = a, c, g, u, unknown, other, or absent
  misc_difference 132: note = a, c, g, u, unknown, other, or absent
  misc_difference 133: note = a, c, g, u, unknown, other, or absent
  misc_difference 134: note = a, c, g, u, unknown, other, or absent
  misc_difference 135: note = a, c, g, u, unknown, other, or absent
  misc_difference 136: note = a, c, g, u, unknown, other, or absent
  misc_difference 137: note = a, c, g, u, unknown, other, or absent
  misc_difference 138: note = a, c, g, u, unknown, other, or absent
  misc_difference 139: note = a, c, g, u, unknown, other, or absent
  misc_difference 140: note = a, c, g, u, unknown, other, or absent
  misc_difference 141: note = a, c, g, u, unknown, other, or absent
  misc_difference 142: note = a, c, g, u, unknown, other, or absent
  misc_difference 143: note = a, c, g, u, unknown, other, or absent
  misc_difference 144: note = a, c, g, u, unknown, other, or absent
  misc_difference 145: note = a, c, g, u, unknown, other, or absent
  misc_difference 146: note = a, c, g, u, unknown, other, or absent
  misc_difference 147: note = a, c, g, u, unknown, other, or absent
  misc_difference 148: note = a, c, g, u, unknown, other, or absent
  misc_difference 149: note = a, c, g, u, unknown, other, or absent
  misc_difference 150: note = a, c, g, u, unknown, other, or absent
  misc_difference 151: note = a, c, g, u, unknown, other, or absent
  misc_difference 152: note = a, c, g, u, unknown, other, or absent
  misc_difference 153: note = a, c, g, u, unknown, other, or absent
  misc_difference 154: note = a, c, g, u, unknown, other, or absent
  misc_difference 155: note = a, c, g, u, unknown, other, or absent
  misc_difference 156: note = a, c, g, u, unknown, other, or absent
  misc_difference 157: note = a, c, g, u, unknown, other, or absent
  misc_difference 158: note = a, c, g, u, unknown, other, or absent
  misc_difference 159: note = a, c, g, u, unknown, other, or absent
  misc_difference 160: note = a, c, g, u, unknown, other, or absent
  misc_difference 161: note = a, c, g, u, unknown, other, or absent
  misc_difference 162: note = a, c, g, u, unknown, other, or absent
  misc_difference 163: note = a, c, g, u, unknown, other, or absent
  misc_difference 164: note = a, c, g, u, unknown, other, or absent
  misc_difference 165: note = a, c, g, u, unknown, other, or absent
  misc_difference 166: note = a, c, g, u, unknown, other, or absent
  misc_difference 167: note = a, c, g, u, unknown, other, or absent
  misc_difference 168: note = a, c, g, u, unknown, other, or absent
  misc_difference 169: note = a, c, g, u, unknown, other, or absent
  misc_difference 170: note = a, c, g, u, unknown, other, or absent
  misc_difference 171: note = a, c, g, u, unknown, other, or absent
  misc_difference 172: note = a, c, g, u, unknown, other, or absent
  misc_difference 173: note = a, c, g, u, unknown, other, or absent
  misc_difference 174: note = a, c, g, u, unknown, other, or absent
  misc_difference 175: note = a, c, g, u, unknown, other, or absent
  misc_difference 176: note = a, c, g, u, unknown, other, or absent
  misc_difference 177: note = a, c, g, u, unknown, other, or absent
  misc_difference 178: note = a, c, g, u, unknown, other, or absent
  misc_difference 179: note = a, c, g, u, unknown, other, or absent
  misc_difference 180: note = a, c, g, u, unknown, other, or absent
  misc_difference 181: note = a, c, g, u, unknown, other, or absent
  misc_difference 182: note = a, c, g, u, unknown, other, or absent
  misc_difference 183: note = a, c, g, u, unknown, other, or absent
  misc_difference 184: note = a, c, g, u, unknown, other, or absent
  misc_difference 185: note = a, c, g, u, unknown, other, or absent
  misc_difference 186: note = a, c, g, u, unknown, other, or absent
  misc_difference 187: note = a, c, g, u, unknown, other, or absent
  misc_difference 188: note = a, c, g, u, unknown, other, or absent
  misc_difference 189: note = a, c, g, u, unknown, other, or absent
  misc_difference 190: note = a, c, g, u, unknown, other, or absent
  misc_difference 191: note = a, c, g, u, unknown, other, or absent
  misc_difference 192: note = a, c, g, u, unknown, other, or absent
  misc_difference 193: note = a, c, g, u, unknown, other, or absent
  misc_difference 194: note = a, c, g, u, unknown, other, or absent
  misc_difference 195: note = a, c, g, u, unknown, other, or absent
  misc_difference 196: note = a, c, g, u, unknown, other, or absent
  misc_difference 197: note = a, c, g, u, unknown, other, or absent
  misc_difference 198: note = a, c, g, u, unknown, other, or absent
  misc_difference 199: note = a, c, g, u, unknown, other, or absent
  misc_difference 200: note = a, c, g, u, unknown, other, or absent
  misc_difference 201: note = a, c, g, u, unknown, other, or absent
  misc_difference 202: note = a, c, g, u, unknown, other, or absent
  misc_difference 203: note = a, c, g, u, unknown, other, or absent
  misc_difference 204: note = a, c, g, u, unknown, other, or absent
  misc_difference 205: note = a, c, g, u, unknown, other, or absent
  misc_difference 206: note = a, c, g, u, unknown, other, or absent
  misc_difference 207: note = a, c, g, u, unknown, other, or absent
  misc_difference 208: note = a, c, g, u, unknown, other, or absent
  misc_difference 209: note = a, c, g, u, unknown, other, or absent
  misc_difference 210: note = a, c, g, u, unknown, other, or absent
  misc_difference 211: note = a, c, g, u, unknown, other, or absent
  misc_difference 212: note = a, c, g, u, unknown, other, or absent
  misc_difference 213: note = a, c, g, u, unknown, other, or absent
  misc_difference 214: note = a, c, g, u, unknown, other, or absent
  misc_difference 215: note = a, c, g, u, unknown, other, or absent
  misc_difference 216: note = a, c, g, u, unknown, other, or absent
  misc_difference 217: note = a, c, g, u, unknown, other, or absent
  misc_difference 218: note = a, c, g, u, unknown, other, or absent
  misc_difference 219: note = a, c, g, u, unknown, other, or absent
  misc_difference 220: note = a, c, g, u, unknown, other, or absent
  misc_difference 221: note = a, c, g, u, unknown, other, or absent
  misc_difference 222: note = a, c, g, u, unknown, other, or absent
  misc_difference 223: note = a, c, g, u, unknown, other, or absent
  misc_difference 224: note = a, c, g, u, unknown, other, or absent
  misc_difference 225: note = a, c, g, u, unknown, other, or absent
  misc_difference 226: note = a, c, g, u, unknown, other, or absent
  misc_difference 227: note = a, c, g, u, unknown, other, or absent
  misc_difference 228: note = a, c, g, u, unknown, other, or absent
  misc_difference 229: note = a, c, g, u, unknown, other, or absent
  misc_difference 230: note = a, c, g, u, unknown, other, or absent
  misc_difference 231: note = a, c, g, u, unknown, other, or absent
  misc_difference 232: note = a, c, g, u, unknown, other, or absent
  misc_difference 233: note = a, c, g, u, unknown, other, or absent
  misc_difference 234: note = a, c, g, u, unknown, other, or absent
  misc_difference 235: note = a, c, g, u, unknown, other, or absent
  misc_difference 236: note = a, c, g, u, unknown, other, or absent
  misc_difference 237: note = a, c, g, u, unknown, other, or absent
  misc_difference 238: note = a, c, g, u, unknown, other, or absent
  misc_difference 239: note = a, c, g, u, unknown, other, or absent
  misc_difference 240: note = a, c, g, u, unknown, other, or absent
  misc_difference 241: note = a, c, g, u, unknown, other, or absent
  misc_difference 242: note = a, c, g, u, unknown, other, or absent
  misc_difference 243: note = a, c, g, u, unknown, other, or absent
  misc_difference 244: note = a, c, g, u, unknown, other, or absent
  misc_difference 245: note = a, c, g, u, unknown, other, or absent
  misc_difference 246: note = a, c, g, u, unknown, other, or absent
  misc_difference 247: note = a, c, g, u, unknown, other, or absent
  misc_difference 248: note = a, c, g, u, unknown, other, or absent
  misc_difference 249: note = a, c, g, u, unknown, other, or absent
  misc_difference 250: note = a, c, g, u, unknown, other, or absent
  misc_difference 251: note = a, c, g, u, unknown, other, or absent
  misc_difference 252: note = a, c, g, u, unknown, other, or absent
  misc_difference 253: note = a, c, g, u, unknown, other, or absent
  misc_difference 254: note = a, c, g, u, unknown, other, or absent
  misc_difference 255: note = a, c, g, u, unknown, other, or absent
  misc_difference 256: note = a, c, g, u, unknown, other, or absent
  misc_difference 257: note = a, c, g, u, unknown, other, or absent
  misc_difference 258: note = a, c, g, u, unknown, other, or absent
  misc_difference 259: note = a, c, g, u, unknown, other, or absent
  misc_difference 260: note = a, c, g, u, unknown, other, or absent
  misc_difference 261: note = a, c, g, u, unknown, other, or absent
  misc_difference 262: note = a, c, g, u, unknown, other, or absent
  misc_difference 263: note = a, c, g, u, unknown, other, or absent
  misc_difference 264: note = a, c, g, u, unknown, other, or absent
  misc_difference 265: note = a, c, g, u, unknown, other, or absent
  misc_difference 266: note = a, c, g, u, unknown, other, or absent
  misc_difference 267: note = a, c, g, u, unknown, other, or absent
  misc_difference 268: note = a, c, g, u, unknown, other, or absent
  misc_difference 269: note = a, c, g, u, unknown, other, or absent
  misc_difference 270: note = a, c, g, u, unknown, other, or absent
  misc_difference 271: note = a, c, g, u, unknown, other, or absent
  misc_difference 272: note = a, c, g, u, unknown, other, or absent
  misc_difference 273: note = a, c, g, u, unknown, other, or absent
  misc_difference 274: note = a, c, g, u, unknown, other, or absent
  misc_difference 275: note = a, c, g, u, unknown, other, or absent
  misc_difference 276: note = a, c, g, u, unknown, other, or absent
  misc_difference 277: note = a, c, g, u, unknown, other, or absent
  misc_difference 278: note = a, c, g, u, unknown, other, or absent
  misc_difference 279: note = a, c, g, u, unknown, other, or absent
  misc_difference 280: note = a, c, g, u, unknown, other, or absent
  misc_difference 281: note = a, c, g, u, unknown, other, or absent
  misc_difference 282: note = a, c, g, u, unknown, other, or absent
  misc_difference 283: note = a, c, g, u, unknown, other, or absent
  misc_difference 284: note = a, c, g, u, unknown, other, or absent
  misc_difference 285: note = a, c, g, u, unknown, other, or absent
  misc_difference 286: note = a, c, g, u, unknown, other, or absent
  misc_difference 287: note = a, c, g, u, unknown, other, or absent
  misc_difference 288: note = a, c, g, u, unknown, other, or absent
  misc_difference 289: note = a, c, g, u, unknown, other, or absent
  misc_difference 290: note = a, c, g, u, unknown, other, or absent
  misc_difference 291: note = a, c, g, u, unknown, other, or absent
  misc_difference 292: note = a, c, g, u, unknown, other, or absent
  misc_difference 293: note = a, c, g, u, unknown, other, or absent
  misc_difference 294: note = a, c, g, u, unknown, other, or absent
  misc_difference 295: note = a, c, g, u, unknown, other, or absent
  misc_difference 296: note = a, c, g, u, unknown, other, or absent
  misc_difference 297: note = a, c, g, u, unknown, other, or absent
  misc_difference 298: note = a, c, g, u, unknown, other, or absent
  misc_difference 299: note = a, c, g, u, unknown, other, or absent
  misc_difference 300: note = a, c, g, u, unknown, other, or absent
  misc_difference 301: note = a, c, g, u, unknown, other, or absent
  misc_difference 302: note = a, c, g, u, unknown, other, or absent
  misc_difference 303: note = a, c, g, u, unknown, other, or absent
  misc_difference 304: note = a, c, g, u, unknown, other, or absent
  misc_difference 305: note = a, c, g, u, unknown, other, or absent
  misc_difference 306: note = a, c, g, u, unknown, other, or absent
  misc_difference 307: note = a, c, g, u, unknown, other, or absent
  misc_difference 308: note = a, c, g, u, unknown, other, or absent
  misc_difference 309: note = a, c, g, u, unknown, other, or absent
  misc_difference 310: note = a, c, g, u, unknown, other, or absent
  misc_difference 311: note = a, c, g, u, unknown, other, or absent
  misc_difference 312: note = a, c, g, u, unknown, other, or absent
  misc_difference 313: note = a, c, g, u, unknown, other, or absent
  misc_difference 314: note = a, c, g, u, unknown, other, or absent
  misc_difference 315: note = a, c, g, u, unknown, other, or absent
  misc_difference 316: note = a, c, g, u, unknown, other, or absent
  misc_difference 317: note = a, c, g, u, unknown, other, or absent
  misc_difference 318: note = May be absent
  misc_difference 319: note = May be absent
  misc_difference 320: note = May be absent
  misc_difference 321: note = May be absent
  misc_difference 322: note = May be absent
  misc_difference 323: note = May be absent
  misc_difference 324: note = May be absent
  misc_difference 325: note = May be absent
  misc_difference 326: note = May be absent
  misc_difference 327: note = May be absent
  misc_difference 328: note = May be absent
  misc_difference 329: note = May be absent
  misc_difference 330: note = May be absent
  misc_difference 331: note = a, c, g, u, unknown, other, or absent
  misc_difference 332: note = May be absent
  misc_difference 333: note = a, c, g, u, unknown, other, or absent
  misc_difference 334: note = a, c, g, u, unknown, other, or absent
  misc_difference 335: note = May be absent
  misc_difference 336: note = a, c, g, u, unknown, other, or absent
  misc_difference 337: note = May be absent
  misc_difference 338: note = May be absent
  misc_difference 339: note = May be absent
  misc_difference 340: note = May be absent
  misc_difference 45..316: note = This region may encompass 1-271 nucleotides
nhvbdnvkrsnhharbhrrbtdrdrydbndgryyyttmmymhndnnnnnnnnnnnnnnnnnnnnnnnnnnnnnnnnnnnnnnnnnnnnnnnnnnnnnnnnnnnnnnnnnnnnnnnnnnnnnnnnnnnnnnnnnnnnnnnnnnnnnnnnnnnnnnnnnnnnnnnnnnnnnnnnnnnnnnnnnnnnnnnnnnnnnnnnnnnnnnnnnnnnnnnnnnnnnnnnnnnnnnnnnnnnnnnnnnnnnnnnnnnnnnnnnnnnnnnnnnnnnnnnnnnnnnnnnnnnnnnnnnnnnnnnnnnnnnnnnnnnnnnnnnnnnnnnnrgrytyrwbyysynbnnhndrhr

SEQ ID NO: 600 - RNA, 340 nt, synthetic construct
  source 1..340: mol_type = other RNA
  misc_difference 1: note = May be absent
  misc_difference 2: note = May be absent
  misc_difference 3: note = May be absent
  misc_difference 4: note = May be absent
  misc_difference 5: note = May be absent
  misc_difference 6: note = May be absent
  misc_difference 7: note = May be absent
  misc_difference 8: note = May be absent
  misc_difference 9: note = May be absent
  misc_difference 10: note = May be absent
  misc_difference 11: note = May be absent
  misc_difference 12: note = May be absent
  misc_difference 13: note = May be absent
  misc_difference 14: note = May be absent
  misc_difference 15: note = May be absent
  misc_difference 16: note = May be absent
  misc_difference 17: note = May be absent
  misc_difference 18: note = May be absent
  misc_difference 19: note = May be absent
  misc_difference 20: note = May be absent
  misc_difference 21: note = May be absent
  misc_difference 22: note = May be absent
  misc_difference 23: note = May be absent
  misc_difference 24: note = May be absent
  misc_difference 25: note = May be absent
  misc_difference 26: note = May be absent
  misc_difference 27: note = May be absent
  misc_difference 28: note = May be absent
  misc_difference 29: note = May be absent
  misc_difference 30: note = May be absent
  misc_difference 31: note = May be absent
  misc_difference 32: note = May be absent
  misc_difference 33: note = May be absent
  misc_difference 34: note = May be absent
  misc_difference 35: note = May be absent
  misc_difference 36: note = May be absent
  misc_difference 37: note = May be absent
  misc_difference 38: note = May be absent
  misc_difference 39: note = May be absent
  misc_difference 40: note = May be absent
  misc_difference 41: note = May be absent
  misc_difference 42: note = May be absent
  misc_difference 43: note = May be absent
  misc_difference 44: note = May be absent
  misc_difference 45: note = a, c, g, u, unknown, other, or absent
  misc_difference 46: note = a, c, g, u, unknown, other, or absent
  misc_difference 47: note = a, c, g, u, unknown, other, or absent
  misc_difference 48: note = a, c, g, u, unknown, other, or absent
  misc_difference 49: note = a, c, g, u, unknown, other, or absent
  misc_difference 50: note = a, c, g, u, unknown, other, or absent
  misc_difference 51: note = a, c, g, u, unknown, other, or absent
  misc_difference 52: note = a, c, g, u, unknown, other, or absent
  misc_difference 53: note = a, c, g, u, unknown, other, or absent
  misc_difference 54: note = a, c, g, u, unknown, other, or absent
  misc_difference 55: note = a, c, g, u, unknown, other, or absent
  misc_difference 56: note = a, c, g, u, unknown, other, or absent
  misc_difference 57: note = a, c, g, u, unknown, other, or absent
  misc_difference 58: note = a, c, g, u, unknown, other, or absent
  misc_difference 59: note = a, c, g, u, unknown, other, or absent
  misc_difference 60: note = a, c, g, u, unknown, other, or absent
  misc_difference 61: note = a, c, g, u, unknown, other, or absent
  misc_difference 62: note = a, c, g, u, unknown, other, or absent
  misc_difference 63: note = a, c, g, u, unknown, other, or absent
  misc_difference 64: note = a, c, g, u, unknown, other, or absent
  misc_difference 65: note = a, c, g, u, unknown, other, or absent
  misc_difference 66: note = a, c, g, u, unknown, other, or absent
  misc_difference 67: note = a, c, g, u, unknown, other, or absent
  misc_difference 68: note = a, c, g, u, unknown, other, or absent
  misc_difference 69: note = a, c, g, u, unknown, other, or absent
  misc_difference 70: note = a, c, g, u, unknown, other, or absent
  misc_difference 71: note = a, c, g, u, unknown, other, or absent
  misc_difference 72: note = a, c, g, u, unknown, other, or absent
  misc_difference 73: note = a, c, g, u, unknown, other, or absent
  misc_difference 74: note = a, c, g, u, unknown, other, or absent
  misc_difference 75: note = a, c, g, u, unknown, other, or absent
  misc_difference 76: note = a, c, g, u, unknown, other, or absent
  misc_difference 77: note = a, c, g, u, unknown, other, or absent
  misc_difference 78: note = a, c, g, u, unknown, other, or absent
  misc_difference 79: note = a, c, g, u, unknown, other, or absent
  misc_difference 80: note = a, c, g, u, unknown, other, or absent
  misc_difference 81: note = a, c, g, u, unknown, other, or absent
  misc_difference 82: note = a, c, g, u, unknown, other, or absent
  misc_difference 83: note = a, c, g, u, unknown, other, or absent
  misc_difference 84: note = a, c, g, u, unknown, other, or absent
  misc_difference 85: note = a, c, g, u, unknown, other, or absent
  misc_difference 86: note = a, c, g, u, unknown, other, or absent
  misc_difference 87: note = a, c, g, u, unknown, other, or absent
  misc_difference 88: note = a, c, g, u, unknown, other, or absent
  misc_difference 89: note = a, c, g, u, unknown, other, or absent
  misc_difference 90: note = a, c, g, u, unknown, other, or absent
  misc_difference 91: note = a, c, g, u, unknown, other, or absent
  misc_difference 92: note = a, c, g, u, unknown, other, or absent
  misc_difference 93: note = a, c, g, u, unknown, other, or absent
  misc_difference 94: note = a, c, g, u, unknown, other, or absent
  misc_difference 95: note = a, c, g, u, unknown, other, or absent
  misc_difference 96: note = a, c, g, u, unknown, other, or absent
  misc_difference 97: note = a, c, g, u, unknown, other, or absent
  misc_difference 98: note = a, c, g, u, unknown, other, or absent
  misc_difference 99: note = a, c, g, u, unknown, other, or absent
  misc_difference 100: note = a, c, g, u, unknown, other, or absent
  misc_difference 101: note = a, c, g, u, unknown, other, or absent
  misc_difference 102: note = a, c, g, u, unknown, other, or absent
  misc_difference 103: note = a, c, g, u, unknown, other, or absent
  misc_difference 104: note = a, c, g, u, unknown, other, or absent
  misc_difference 105: note = a, c, g, u, unknown, other, or absent
  misc_difference 106: note = a, c, g, u, unknown, other, or absent
  misc_difference 107: note = a, c, g, u, unknown, other, or absent
  misc_difference 108: note = a, c, g, u, unknown, other, or absent
  misc_difference 109: note = a, c, g, u, unknown, other, or absent
  misc_difference 110: note = a, c, g, u, unknown, other, or absent
  misc_difference 111: note = a, c, g, u, unknown, other, or absent
  misc_difference 112: note = a, c, g, u, unknown, other, or absent
  misc_difference 113: note = a, c, g, u, unknown, other, or absent
  misc_difference 114: note = a, c, g, u, unknown, other, or absent
  misc_difference 115: note = a, c, g, u, unknown, other, or absent
  misc_difference 116: note = a, c, g, u, unknown, other, or absent
  misc_difference 117: note = a, c, g, u, unknown, other, or absent
  misc_difference 118: note = a, c, g, u, unknown, other, or absent
  misc_difference 119: note = a, c, g, u, unknown, other, or absent
  misc_difference 120: note = a, c, g, u, unknown, other, or absent
  misc_difference 121: note = a, c, g, u, unknown, other, or absent
  misc_difference 122: note = a, c, g, u, unknown, other, or absent
  misc_difference 123: note = a, c, g, u, unknown, other, or absent
  misc_difference 124: note = a, c, g, u, unknown, other, or absent
  misc_difference 125: note = a, c, g, u, unknown, other, or absent
  misc_difference 126: note = a, c, g, u, unknown, other, or absent
  misc_difference 127: note = a, c, g, u, unknown, other, or absent
  misc_difference 128: note = a, c, g, u, unknown, other, or absent
  misc_difference 129: note = a, c, g, u, unknown, other, or absent
  misc_difference 130: note = a, c, g, u, unknown, other, or absent
  misc_difference 131: note = a, c, g, u, unknown, other, or absent
  misc_difference 132: note = a, c, g, u, unknown, other, or absent
  misc_difference 133: note = a, c, g, u, unknown, other, or absent
  misc_difference 134: note = a, c, g, u, unknown, other, or absent
  misc_difference 135: note = a, c, g, u, unknown, other, or absent
  misc_difference 136: note = a, c, g, u, unknown, other, or absent
  misc_difference 137: note = a, c, g, u, unknown, other, or absent
  misc_difference 138: note = a, c, g, u, unknown, other, or absent
  misc_difference 139: note = a, c, g, u, unknown, other, or absent
  misc_difference 140: note = a, c, g, u, unknown, other, or absent
  misc_difference 141: note = a, c, g, u, unknown, other, or absent
  misc_difference 142: note = a, c, g, u, unknown, other, or absent
  misc_difference 143: note = a, c, g, u, unknown, other, or absent
  misc_difference 144: note = a, c, g, u, unknown, other, or absent
  misc_difference 145: note = a, c, g, u, unknown, other, or absent
  misc_difference 146: note = a, c, g, u, unknown, other, or absent
  misc_difference 147: note = a, c, g, u, unknown, other, or absent
  misc_difference 148: note = a, c, g, u, unknown, other, or absent
  misc_difference 149: note = a, c, g, u, unknown, other, or absent
  misc_difference 150: note = a, c, g, u, unknown, other, or absent
  misc_difference 151: note = a, c, g, u, unknown, other, or absent
  misc_difference 152: note = a, c, g, u, unknown, other, or absent
  misc_difference 153: note = a, c, g, u, unknown, other, or absent
  misc_difference 154: note = a, c, g, u, unknown, other, or absent
  misc_difference 155: note = a, c, g, u, unknown, other, or absent
  misc_difference 156: note = a, c, g, u, unknown, other, or absent
  misc_difference 157: note = a, c, g, u, unknown, other, or absent
  misc_difference 158: note = a, c, g, u, unknown, other, or absent
  misc_difference 159: note = a, c, g, u, unknown, other, or absent
  misc_difference 160: note = a, c, g, u, unknown, other, or absent
  misc_difference 161: note = a, c, g, u, unknown, other, or absent
  misc_difference 162: note = a, c, g, u, unknown, other, or absent
  misc_difference 163: note = a, c, g, u, unknown, other, or absent
  misc_difference 164: note = a, c, g, u, unknown, other, or absent
  misc_difference 165: note = a, c, g, u, unknown, other, or absent
  misc_difference 166: note = a, c, g, u, unknown, other, or absent
  misc_difference 167: note = a, c, g, u, unknown, other, or absent
  misc_difference 168: note = a, c, g, u, unknown, other, or absent
  misc_difference 169: note = a, c, g, u, unknown, other, or absent
  misc_difference 170: note = a, c, g, u, unknown, other, or absent
  misc_difference 171: note = a, c, g, u, unknown, other, or absent
  misc_difference 172: note = a, c, g, u, unknown, other, or absent
  misc_difference 173: note = a, c, g, u, unknown, other, or absent
  misc_difference 174: note = a, c, g, u, unknown, other, or absent
  misc_difference 175: note = a, c, g, u, unknown, other, or absent
  misc_difference 176: note = a, c, g, u, unknown, other, or absent
  misc_difference 177: note = a, c, g, u, unknown, other, or absent
  misc_difference 178: note = a, c, g, u, unknown, other, or absent
  misc_difference 179: note = a, c, g, u, unknown, other, or absent
  misc_difference 180: note = a, c, g, u, unknown, other, or absent
  misc_difference 181: note = a, c, g, u, unknown, other, or absent
  misc_difference 182: note = a, c, g, u, unknown, other, or absent
  misc_difference 183: note = a, c, g, u, unknown, other, or absent
  misc_difference 184: note = a, c, g, u, unknown, other, or absent
  misc_difference 185: note = a, c, g, u, unknown, other, or absent
  misc_difference 186: note = a, c, g, u, unknown, other, or absent
  misc_difference 187: note = a, c, g, u, unknown, other, or absent
  misc_difference 188: note = a, c, g, u, unknown, other, or absent
  misc_difference 189: note = a, c, g, u, unknown, other, or absent
  misc_difference 190: note = a, c, g, u, unknown, other, or absent
  misc_difference 191: note = a, c, g, u, unknown, other, or absent
  misc_difference 192: note = a, c, g, u, unknown, other, or absent
  misc_difference 193: note = a, c, g, u, unknown, other, or absent
  misc_difference 194: note = a, c, g, u, unknown, other, or absent
  misc_difference 195: note = a, c, g, u, unknown, other, or absent
  misc_difference 196: note = a, c, g, u, unknown, other, or absent
  misc_difference 197: note = a, c, g, u, unknown, other, or absent
  misc_difference 198: note = a, c, g, u, unknown, other, or absent
  misc_difference 199: note = a, c, g, u, unknown, other, or absent
  misc_difference 200: note = a, c, g, u, unknown, other, or absent
  misc_difference 201: note = a, c, g, u, unknown, other, or absent
  misc_difference 202: note = a, c, g, u, unknown, other, or absent
  misc_difference 203: note = a, c, g, u, unknown, other, or absent
  misc_difference 204: note = a, c, g, u, unknown, other, or absent
  misc_difference 205: note = a, c, g, u, unknown, other, or absent
  misc_difference 206: note = a, c, g, u, unknown, other, or absent
  misc_difference 207: note = a, c, g, u, unknown, other, or absent
  misc_difference 208: note = a, c, g, u, unknown, other, or absent
  misc_difference 209: note = a, c, g, u, unknown, other, or absent
  misc_difference 210: note = a, c, g, u, unknown, other, or absent
  misc_difference 211: note = a, c, g, u, unknown, other, or absent
  misc_difference 212: note = a, c, g, u, unknown, other, or absent
  misc_difference 213: note = a, c, g, u, unknown, other, or absent
  misc_difference 214: note = a, c, g, u, unknown, other, or absent
  misc_difference 215: note = a, c, g, u, unknown, other, or absent
  misc_difference 216: note = a, c, g, u, unknown, other, or absent
  misc_difference 217: note = a, c, g, u, unknown, other, or absent
  misc_difference 218: note = a, c, g, u, unknown, other, or absent
  misc_difference 219: note = a, c, g, u, unknown, other, or absent
  misc_difference 220: note = a, c, g, u, unknown, other, or absent
  misc_difference 221: note = a, c, g, u, unknown, other, or absent
  misc_difference 222: note = a, c, g, u, unknown, other, or absent
  misc_difference 223: note = a, c, g, u, unknown, other, or absent
  misc_difference 224: note = a, c, g, u, unknown, other, or absent
  misc_difference 225: note = a, c, g, u, unknown, other, or absent
  misc_difference 226: note = a, c, g, u, unknown, other, or absent
  misc_difference 227: note = a, c, g, u, unknown, other, or absent
  misc_difference 228: note = a, c, g, u, unknown, other, or absent
  misc_difference 229: note = a, c, g, u, unknown, other, or absent
  misc_difference 230: note = a, c, g, u, unknown, other, or absent
  misc_difference 231: note = a, c, g, u, unknown, other, or absent
  misc_difference 232: note = a, c, g, u, unknown, other, or absent
  misc_difference 233: note = a, c, g, u, unknown, other, or absent
  misc_difference 234: note = a, c, g, u, unknown, other, or absent
  misc_difference 235: note = a, c, g, u, unknown, other, or absent
  misc_difference 236: note = a, c, g, u, unknown, other, or absent
  misc_difference 237: note = a, c, g, u, unknown, other, or absent
  misc_difference 238: note = a, c, g, u, unknown, other, or absent
  misc_difference 239: note = a, c, g, u, unknown, other, or absent
  misc_difference 240: note = a, c, g, u, unknown, other, or absent
  misc_difference 241: note = a, c, g, u, unknown, other, or absent
  misc_difference 242: note = a, c, g, u, unknown, other, or absent
  misc_difference 243: note = a, c, g, u, unknown, other, or absent
  misc_difference 244: note = a, c, g, u, unknown, other, or absent
  misc_difference 245: note = a, c, g, u, unknown, other, or absent
  misc_difference 246: note = a, c, g, u, unknown, other, or absent
  misc_difference 247: note = a, c, g, u, unknown, other, or absent
  misc_difference 248: note = a, c, g, u, unknown, other, or absent
  misc_difference 249: note = a, c, g, u, unknown, other, or absent
  misc_difference 250: note = a, c, g, u, unknown, other, or absent
  misc_difference 251: note = a, c, g, u, unknown, other, or absent
  misc_difference 252: note = a, c, g, u, unknown, other, or absent
  misc_difference 253: note = a, c, g, u, unknown, other, or absent
  misc_difference 254: note = a, c, g, u, unknown, other, or absent
  misc_difference 255: note = a, c, g, u, unknown, other, or absent
  misc_difference 256: note = a, c, g, u, unknown, other, or absent
  misc_difference 257: note = a, c, g, u, unknown, other, or absent
  misc_difference 258: note = a, c, g, u, unknown, other, or absent
  misc_difference 259: note = a, c, g, u, unknown, other, or absent
  misc_difference 260: note = a, c, g, u, unknown, other, or absent
  misc_difference 261: note = a, c, g, u, unknown, other, or absent
  misc_difference 262: note = a, c, g, u, unknown, other, or absent
  misc_difference 263: note = a, c, g, u, unknown, other, or absent
  misc_difference 264: note = a, c, g, u, unknown, other, or absent
  misc_difference 265: note = a, c, g, u, unknown, other, or absent
  misc_difference 266: note = a, c, g, u, unknown, other, or absent
  misc_difference 267: note = a, c, g, u, unknown, other, or absent
  misc_difference 268: note = a, c, g, u, unknown, other, or absent
  misc_difference 269: note = a, c, g, u, unknown, other, or absent
  misc_difference 270: note = a, c, g, u, unknown, other, or absent
  misc_difference 271: note = a, c, g, u, unknown, other, or absent
  misc_difference 272: note = a, c, g, u, unknown, other, or absent
  misc_difference 273: note = a, c, g, u, unknown, other, or absent
  misc_difference 274: note = a, c, g, u, unknown, other, or absent
  misc_difference 275: note = a, c, g, u, unknown, other, or absent
  misc_difference 276: note = a, c, g, u, unknown, other, or absent
  misc_difference 277: note = a, c, g, u, unknown, other, or absent
  misc_difference 278: note = a, c, g, u, unknown, other, or absent
  misc_difference 279: note = a, c, g, u, unknown, other, or absent
  misc_difference 280: note = a, c, g, u, unknown, other, or absent
  misc_difference 281: note = a, c, g, u, unknown, other, or absent
  misc_difference 282: note = a, c, g, u, unknown, other, or absent
  misc_difference 283: note = a, c, g, u, unknown, other, or absent
  misc_difference 284: note = a, c, g, u, unknown, other, or absent
  misc_difference 285: note = a, c, g, u, unknown, other, or absent
  misc_difference 286: note = a, c, g, u, unknown, other, or absent
  misc_difference 287: note = a, c, g, u, unknown, other, or absent
  misc_difference 288: note = a, c, g, u, unknown, other, or absent
  misc_difference 289: note = a, c, g, u, unknown, other, or absent
  misc_difference 290: note = a, c, g, u, unknown, other, or absent
  misc_difference 291: note = a, c, g, u, unknown, other, or absent
  misc_difference 292: note = a, c, g, u, unknown, other, or absent
  misc_difference 293: note = a, c, g, u, unknown, other, or absent
  misc_difference 294: note = a, c, g, u, unknown, other, or absent
  misc_difference 295: note = a, c, g, u, unknown, other, or absent
  misc_difference 296: note = a, c, g, u, unknown, other, or absent
  misc_difference 297: note = a, c, g, u, unknown, other, or absent
  misc_difference 298: note = a, c, g, u, unknown, other, or absent
  misc_difference 299: note = a, c, g, u, unknown, other, or absent
  misc_difference 300: note = a, c, g, u, unknown, other, or absent
  misc_difference 301: note = a, c, g, u, unknown, other, or absent
  misc_difference 302: note = a, c, g, u, unknown, other, or absent
  misc_difference 303: note = a, c, g, u, unknown, other, or absent
  misc_difference 304: note = a, c, g, u, unknown, other, or absent
  misc_difference 305: note = a, c, g, u, unknown, other, or absent
  misc_difference 306: note = a, c, g, u, unknown, other, or absent
  misc_difference 307: note = a, c, g, u, unknown, other, or absent
  misc_difference 308: note = a, c, g, u, unknown, other, or absent
  misc_difference 309: note = a, c, g, u, unknown, other, or absent
  misc_difference 310: note = a, c, g, u, unknown, other, or absent
  misc_difference 311: note = a, c, g, u, unknown, other, or absent
  misc_difference 312: note = a, c, g, u, unknown, other, or absent
  misc_difference 313: note = a, c, g, u, unknown, other, or absent
  misc_difference 314: note = a, c, g, u, unknown, other, or absent
  misc_difference 315: note = a, c, g, u, unknown, other, or absent
  misc_difference 316: note = a, c, g, u, unknown, other, or absent
  misc_difference 317: note = May be absent
  misc_difference 318: note = May be absent
  misc_difference 319: note = May be absent
  misc_difference 320: note = May be absent
  misc_difference 321: note = May be absent
  misc_difference 322: note = May be absent
  misc_difference 323: note = May be absent
  misc_difference 324: note = May be absent
  misc_difference 325: note = May be absent
  misc_difference 326: note = May be absent
  misc_difference 327: note = May be absent
  misc_difference 328: note = May be absent
  misc_difference 329: note = May be absent
  misc_difference 330: note = May be absent
  misc_difference 331: note = May be absent
  misc_difference 332: note = May be absent
  misc_difference 333: note = a, c, g, u, unknown, other, or absent
  misc_difference 334: note = May be absent
  misc_difference 335: note = May be absent
  misc_difference 336: note = a, c, g, u, unknown, other, or absent
  misc_difference 337: note = May be absent
  misc_difference 338: note = May be absent
  misc_difference 339: note = May be absent
  misc_difference 340: note = May be absent
  misc_difference 45..316: note = This region may encompass 1-271 nucleotides
vhvbrdvkascwharthrrbtdrwrcrkvdgactyttmatchswnnnnnnnnnnnnnnnnnnnnnnnnnnnnnnnnnnnnnnnnnnnnnnnnnnnnnnnnnnnnnnnnnnnnnnnnnnnnnnnnnnnnnnnnnnnnnnnnnnnnnnnnnnnnnnnnnnnnnnnnnnnnnnnnnnnnnnnnnnnnnnnnnnnnnnnnnnnnnnnnnnnnnnnnnnnnnnnnnnnnnnnnnnnnnnnnnnnnnnnnnnnnnnnnnnnnnnnnnnnnnnnnnnnnnnnnnnnnnnnnnnnnnnnnnnnnnnnnnnnnnnnnnnnnnnnndrgrytyrwkyysyhbnhynkryr

SEQ ID NO: 601 - RNA, 341 nt, synthetic construct
  source 1..341: mol_type = other RNA
  misc_difference 1: note = May be absent
  misc_difference 2: note = May be absent
  misc_difference 3: note = May be absent
  misc_difference 4: note = a, c, g, u, unknown, other, or absent
  misc_difference 5: note = a, c, g, u, unknown, other, or absent
  misc_difference 6: note = a, c, g, u, unknown, other, or absent
  misc_difference 7: note = May be absent
  misc_difference 8: note = May be absent
  misc_difference 9: note = May be absent
  misc_difference 10: note = May be absent
  misc_difference 11: note = May be absent
  misc_difference 12: note = May be absent
  misc_difference 13: note = May be absent
  misc_difference 14: note = May be absent
  misc_difference 15: note = May be absent
  misc_difference 16: note = May be absent
  misc_difference 17: note = May be absent
  misc_difference 18: note = May be absent
  misc_difference 19: note = May be absent
  misc_difference 20: note = May be absent
  misc_difference 21: note = May be absent
  misc_difference 22: note = May be absent
  misc_difference 23: note = May be absent
  misc_difference 24: note = May be absent
  misc_difference 25: note = May be absent
  misc_difference 26: note = May be absent
  misc_difference 27: note = May be absent
  misc_difference 28: note = May be absent
  misc_difference 29: note = a, c, g, u, unknown, other, or absent
  misc_difference 30: note = a, c, g, u, unknown, other, or absent
  misc_difference 31: note = a, c, g, u, unknown, other, or absent
  misc_difference 32: note = May be absent
  misc_difference 33: note = a, c, g, u, unknown, other, or absent
  misc_difference 34: note = May be absent
  misc_difference 35: note = May be absent
  misc_difference 36: note = May be absent
  misc_difference 37: note = May be absent
  misc_difference 38: note = May be absent
  misc_difference 39: note = May be absent
  misc_difference 40: note = May be absent
  misc_difference 41: note = a, c, g, u, unknown, other, or absent
  misc_difference 42: note = May be absent
  misc_difference 43: note = a, c, g, u, unknown, other, or absent
  misc_difference 44: note = a, c, g, u, unknown, other, or absent
  misc_difference 45: note = a, c, g, u, unknown, other, or absent
  misc_difference 46: note = a, c, g, u, unknown, other, or absent
  misc_difference 47: note = a, c, g, u, unknown, other, or absent
  misc_difference 48: note = a, c, g, u, unknown, other, or absent
  misc_difference 49: note = a, c, g, u, unknown, other, or absent
  misc_difference 50: note = a, c, g, u, unknown, other, or absent
  misc_difference 51: note = a, c, g, u, unknown, other, or absent
  misc_difference 52: note = a, c, g, u, unknown, other, or absent
  misc_difference 53: note = a, c, g, u, unknown, other, or absent
  misc_difference 54: note = a, c, g, u, unknown, other, or absent
  misc_difference 55: note = a, c, g, u, unknown, other, or absent
  misc_difference 56: note = a, c, g, u, unknown, other, or absent
  misc_difference 57: note = a, c, g, u, unknown, other, or absent
  misc_difference 58: note = a, c, g, u, unknown, other, or absent
  misc_difference 59: note = a, c, g, u, unknown, other, or absent
  misc_difference 60: note = a, c, g, u, unknown, other, or absent
  misc_difference 61: note = a, c, g, u, unknown, other, or absent
  misc_difference 62: note = a, c, g, u, unknown, other, or absent
  misc_difference 63: note = a, c, g, u, unknown, other, or absent
  misc_difference 64: note = a, c, g, u, unknown, other, or absent
  misc_difference 65: note = a, c, g, u, unknown, other, or absent
  misc_difference 66: note = a, c, g, u, unknown, other, or absent
  misc_difference 67: note = a, c, g, u, unknown, other, or absent
  misc_difference 68: note = a, c, g, u, unknown, other, or absent
  misc_difference 69: note = a, c, g, u, unknown, other, or absent
  misc_difference 70: note = a, c, g, u, unknown, other, or absent
  misc_difference 71: note = a, c, g, u, unknown, other, or absent
  misc_difference 72: note = a, c, g, u, unknown, other, or absent
  misc_difference 73: note = a, c, g, u, unknown, other, or absent
  misc_difference 74: note = a, c, g, u, unknown, other, or absent
  misc_difference 75: note = a, c, g, u, unknown, other, or absent
  misc_difference 76: note = a, c, g, u, unknown, other, or absent
  misc_difference 77: note = a, c, g, u, unknown, other, or absent
  misc_difference 78: note = a, c, g, u, unknown, other, or absent
  misc_difference 79: note = a, c, g, u, unknown, other, or absent
  misc_difference 80: note = a, c, g, u, unknown, other, or absent
  misc_difference 81: note = a, c, g, u, unknown, other, or absent
  misc_difference 82: note = a, c, g, u, unknown, other, or absent
  misc_difference 83: note = a, c, g, u, unknown, other, or absent
  misc_difference 84: note = a, c, g, u, unknown, other, or absent
  misc_difference 85: note = a, c, g, u, unknown, other, or absent
  misc_difference 86: note = a, c, g, u, unknown, other, or absent
  misc_difference 87: note = a, c, g, u, unknown, other, or absent
  misc_difference 88: note = a, c, g, u, unknown, other, or absent
  misc_difference 89: note = a, c, g, u, unknown, other, or absent
  misc_difference 90: note = a, c, g, u, unknown, other, or absent
  misc_difference 91: note = a, c, g, u, unknown, other, or absent
  misc_difference 92: note = a, c, g, u, unknown, other, or absent
  misc_difference 93: note = a, c, g, u, unknown, other, or absent
  misc_difference 94: note = a, c, g, u, unknown, other, or absent
  misc_difference 95: note = a, c, g, u, unknown, other, or absent
  misc_difference 96: note = a, c, g, u, unknown, other, or absent
  misc_difference 97: note = a, c, g, u, unknown, other, or absent
  misc_difference 98: note = a, c, g, u, unknown, other, or absent
  misc_difference 99: note = a, c, g, u, unknown, other, or absent
  misc_difference 100: note = a, c, g, u, unknown, other, or absent
  misc_difference 101: note = a, c, g, u, unknown, other, or absent
  misc_difference 102: note = a, c, g, u, unknown, other, or absent
  misc_difference 103: note = a, c, g, u, unknown, other, or absent
  misc_difference 104: note = a, c, g, u, unknown, other, or absent
  misc_difference 105: note = a, c, g, u, unknown, other, or absent
  misc_difference 106: note = a, c, g, u, unknown, other, or absent
  misc_difference 107: note = a, c, g, u, unknown, other, or absent
  misc_difference 108: note = a, c, g, u, unknown, other, or absent
  misc_difference 109: note = a, c, g, u, unknown, other, or absent
  misc_difference 110: note = a, c, g, u, unknown, other, or absent
  misc_difference 111: note = a, c, g, u, unknown, other, or absent
  misc_difference 112: note = a, c, g, u, unknown, other, or absent
  misc_difference 113: note = a, c, g, u, unknown, other, or absent
  misc_difference 114: note = a, c, g, u, unknown, other, or absent
  misc_difference 115: note = a, c, g, u, unknown, other, or absent
  misc_difference 116: note = a, c, g, u, unknown, other, or absent
  misc_difference 117: note = a, c, g, u, unknown, other, or absent
  misc_difference 118: note = a, c, g, u, unknown, other, or absent
  misc_difference 119: note = a, c, g, u, unknown, other, or absent
  misc_difference 120: note = a, c, g, u, unknown, other, or absent
  misc_difference 121: note = a, c, g, u, unknown, other, or absent
  misc_difference 122: note = a, c, g, u, unknown, other, or absent
  misc_difference 123: note = a, c, g, u, unknown, other, or absent
  misc_difference 124: note = a, c, g, u, unknown, other, or absent
  misc_difference 125: note = a, c, g, u, unknown, other, or absent
  misc_difference 126: note = a, c, g, u, unknown, other, or absent
  misc_difference 127: note = a, c, g, u, unknown, other, or absent
  misc_difference 128: note = a, c, g, u, unknown, other, or absent
  misc_difference 129: note = a, c, g, u, unknown, other, or absent
  misc_difference 130: note = a, c, g, u, unknown, other, or absent
  misc_difference 131: note = a, c, g, u, unknown, other, or absent
  misc_difference 132: note = a, c, g, u, unknown, other, or absent
  misc_difference 133: note = a, c, g, u, unknown, other, or absent
  misc_difference 134: note = a, c, g, u, unknown, other, or absent
  misc_difference 135: note = a, c, g, u, unknown, other, or absent
  misc_difference 136: note = a, c, g, u, unknown, other, or absent
  misc_difference 137: note = a, c, g, u, unknown, other, or absent
  misc_difference 138: note = a, c, g, u, unknown, other, or absent
  misc_difference 139: note = a, c, g, u, unknown, other, or absent
  misc_difference 140: note = a, c, g, u, unknown, other, or absent
  misc_difference 141: note = a, c, g, u, unknown, other, or absent
  misc_difference 142: note = a, c, g, u, unknown, other, or absent
  misc_difference 143: note = a, c, g, u, unknown, other, or absent
  misc_difference 144: note = a, c, g, u, unknown, other, or absent
  misc_difference 145: note = a, c, g, u, unknown, other, or absent
  misc_difference 146: note = a, c, g, u, unknown, other, or absent
  misc_difference 147: note = a, c, g, u, unknown, other, or absent
  misc_difference 148: note = a, c, g, u, unknown, other, or absent
  misc_difference 149: note = a, c, g, u, unknown, other, or absent
  misc_difference 150: note = a, c, g, u, unknown, other, or absent
  misc_difference 151: note = a, c, g, u, unknown, other, or absent
  misc_difference 152: note = a, c, g, u, unknown, other, or absent
  misc_difference 153: note = a, c, g, u, unknown, other, or absent
  misc_difference 154: note = a, c, g, u, unknown, other, or absent
  misc_difference 155: note = a, c, g, u, unknown, other, or absent
  misc_difference 156: note = a, c, g, u, unknown, other, or absent
  misc_difference 157: note = a, c, g, u, unknown, other, or absent
  misc_difference 158: note = a, c, g, u, unknown, other, or absent
  misc_difference 159: note = a, c, g, u, unknown, other, or absent
  misc_difference 160: note = a, c, g, u, unknown, other, or absent
  misc_difference 161: note = a, c, g, u, unknown, other, or absent
  misc_difference 162: note = a, c, g, u, unknown, other, or absent
  misc_difference 163: note = a, c, g, u, unknown, other, or absent
  misc_difference 164: note = a, c, g, u, unknown, other, or absent
  misc_difference 165: note = a, c, g, u, unknown, other, or absent
  misc_difference 166: note = a, c, g, u, unknown, other, or absent
  misc_difference 167: note = a, c, g, u, unknown, other, or absent
  misc_difference 168: note = a, c, g, u, unknown, other, or absent
  misc_difference 169: note = a, c, g, u, unknown, other, or absent
  misc_difference 170: note = a, c, g, u, unknown, other, or absent
  misc_difference 171: note = a, c, g, u, unknown, other, or absent
  misc_difference 172: note = a, c, g, u, unknown, other, or absent
  misc_difference 173: note = a, c, g, u, unknown, other, or absent
  misc_difference 174: note = a, c, g, u, unknown, other, or absent
  misc_difference 175: note = a, c, g, u, unknown, other, or absent
  misc_difference 176: note = a, c, g, u, unknown, other, or absent
  misc_difference 177: note = a, c, g, u, unknown, other, or absent
  misc_difference 178: note = a, c, g, u, unknown, other, or absent
  misc_difference 179: note = a, c, g, u, unknown, other, or absent
  misc_difference 180: note = a, c, g, u, unknown, other, or absent
  misc_difference 181: note = a, c, g, u, unknown, other, or absent
  misc_difference 182: note = a, c, g, u, unknown, other, or absent
  misc_difference 183: note = a, c, g, u, unknown, other, or absent
  misc_difference 184: note = a, c, g, u, unknown, other, or absent
  misc_difference 185: note = a, c, g, u, unknown, other, or absent
  misc_difference 186: note = a, c, g, u, unknown, other, or absent
  misc_difference 187: note = a, c, g, u, unknown, other, or absent
  misc_difference 188: note = a, c, g, u, unknown, other, or absent
  misc_difference 189: note = a, c, g, u, unknown, other, or absent
  misc_difference 190: note = a, c, g, u, unknown, other, or absent
  misc_difference 191: note = a, c, g, u, unknown, other, or absent
  misc_difference 192: note = a, c, g, u, unknown, other, or absent
  misc_difference 193: note = a, c, g, u, unknown, other, or absent
  misc_difference 194: note = a, c, g, u, unknown, other, or absent
  misc_difference 195: note = a, c, g, u, unknown, other, or absent
  misc_difference 196: note = a, c, g, u, unknown, other, or absent
  misc_difference 197: note = a, c, g, u, unknown, other, or absent
  misc_difference 198: note = a, c, g, u, unknown, other, or absent
  misc_difference 199: note = a, c, g, u, unknown, other, or absent
  misc_difference 200: note = a, c, g, u, unknown, other, or absent
  misc_difference 201: note = a, c, g, u, unknown, other, or absent
  misc_difference 202: note = a, c, g, u, unknown, other, or absent
  misc_difference 203: note = a, c, g, u, unknown, other, or absent
  misc_difference 204: note = a, c, g, u, unknown, other, or absent
  misc_difference 205: note = a, c, g, u, unknown, other, or absent
  misc_difference 206: note = a, c, g, u, unknown, other, or absent
  misc_difference 207: note = a, c, g, u, unknown, other, or absent
  misc_difference 208: note = a, c, g, u, unknown, other, or absent
  misc_difference 209: note = a, c, g, u, unknown, other, or absent
  misc_difference 210: note = a, c, g, u, unknown, other, or absent
  misc_difference 211: note = a, c, g, u, unknown, other, or absent
  misc_difference 212: note = a, c, g, u, unknown, other, or absent
  misc_difference 213: note = a, c, g, u, unknown, other, or absent
  misc_difference 214: note = a, c, g, u, unknown, other, or absent
  misc_difference 215: note = a, c, g, u, unknown, other, or absent
  misc_difference 216: note = a, c, g, u, unknown, other, or absent
  misc_difference 217: note = a, c, g, u, unknown, other, or absent
  misc_difference 218: note = a, c, g, u, unknown, other, or absent
  misc_difference 219: note = a, c, g, u, unknown, other, or absent
  misc_difference 220: note = a, c, g, u, unknown, other, or absent
  misc_difference 221: note = a, c, g, u, unknown, other, or absent
  misc_difference 222: note = a, c, g, u, unknown, other, or absent
  misc_difference 223: note = a, c, g, u, unknown, other, or absent
  misc_difference 224: note = a, c, g, u, unknown, other, or absent
  misc_difference 225: note = a, c, g, u, unknown, other, or absent
  misc_difference 226: note = a, c, g, u, unknown, other, or absent
  misc_difference 227: note = a, c, g, u, unknown, other, or absent
  misc_difference 228: note = a, c, g, u, unknown, other, or absent
  misc_difference 229: note = a, c, g, u, unknown, other, or absent
  misc_difference 230: note = a, c, g, u, unknown, other, or absent
  misc_difference 231: note = a, c, g, u, unknown, other, or absent
  misc_difference 232: note = a, c, g, u, unknown, other, or absent
  misc_difference 233: note = a, c, g, u, unknown, other, or absent
  misc_difference 234: note = a, c, g, u, unknown, other, or absent
  misc_difference 235: note = a, c, g, u, unknown, other, or absent
  misc_difference 236: note = a, c, g, u, unknown, other, or absent
  misc_difference 237: note = a, c, g, u, unknown, other, or absent
  misc_difference 238: note = a, c, g, u, unknown, other, or absent
  misc_difference 239: note = a, c, g, u, unknown, other, or absent
  misc_difference 240: note = a, c, g, u, unknown, other, or absent
  misc_difference 241: note = a, c, g, u, unknown, other, or absent
  misc_difference 242: note = a, c, g, u, unknown, other, or absent
  misc_difference 243: note = a, c, g, u, unknown, other, or absent
  misc_difference 244: note = a, c, g, u, unknown, other, or absent
  misc_difference 245: note = a, c, g, u, unknown, other, or absent
  misc_difference 246: note = a, c, g, u, unknown, other, or absent
  misc_difference 247: note = a, c, g, u, unknown, other, or absent
  misc_difference 248: note = a, c, g, u, unknown, other, or absent
  misc_difference 249: note = a, c, g, u, unknown, other, or absent
  misc_difference 250: note = a, c, g, u, unknown, other, or absent
  misc_difference 251: note = a, c, g, u, unknown, other, or absent
  misc_difference 252: note = a, c, g, u, unknown, other, or absent
  misc_difference 253: note = a, c, g, u, unknown, other, or absent
  misc_difference 254: note = a, c, g, u, unknown, other, or absent
  misc_difference 255: note = a, c, g, u, unknown, other, or absent
  misc_difference 256: note = a, c, g, u, unknown, other, or absent
  misc_difference 257: note = a, c, g, u, unknown, other, or absent
  misc_difference 258: note = a, c, g, u, unknown, other, or absent
  misc_difference 259: note = a, c, g, u, unknown, other, or absent
  misc_difference 260: note = a, c, g, u, unknown, other, or absent
  misc_difference 261: note = a, c, g, u, unknown, other, or absent
  misc_difference 262: note = a, c, g, u, unknown, other, or absent
  misc_difference 263: note = a, c, g, u, unknown, other, or absent
  misc_difference 264: note = a, c, g, u, unknown, other, or absent
  misc_difference 265: note = a, c, g, u, unknown, other, or absent
  misc_difference 266: note = a, c, g, u, unknown, other, or absent
  misc_difference 267: note = a, c, g, u, unknown, other, or absent
  misc_difference 268: note = a, c, g, u, unknown, other, or absent
  misc_difference 269: note = a, c, g, u, unknown, other, or absent
  misc_difference 270: note = a, c, g, u, unknown, other, or absent
  misc_difference 271: note = a, c, g, u, unknown, other, or absent
  misc_difference 272: note = a, c, g, u, unknown, other, or absent
  misc_difference 273: note = a, c, g, u, unknown, other, or absent
  misc_difference 274: note = a, c, g, u, unknown, other, or absent
  misc_difference 275: note = a, c, g, u, unknown, other, or absent
  misc_difference 276: note = a, c, g, u, unknown, other, or absent
  misc_difference 277: note = a, c, g, u, unknown, other, or absent
  misc_difference 278: note = a, c, g, u, unknown, other, or absent
  misc_difference 279: note = a, c, g, u, unknown, other, or absent
  misc_difference 280: note = a, c, g, u, unknown, other, or absent
  misc_difference 281: note = a, c, g, u, unknown, other, or absent
  misc_difference 282: note = a, c, g, u, unknown, other, or absent
  misc_difference 283: note = a, c, g, u, unknown, other, or absent
  misc_difference 284: note = a, c, g, u, unknown, other, or absent
  misc_difference 285: note = a, c, g, u, unknown, other, or absent
  misc_difference 286: note = a, c, g, u, unknown, other, or absent
  misc_difference 287: note = a, c, g, u, unknown, other, or absent
  misc_difference 288: note = a, c, g, u, unknown, other, or absent
  misc_difference 289: note = a, c, g, u, unknown, other, or absent
  misc_difference 290: note = a, c, g, u, unknown, other, or absent
  misc_difference 291: note = a, c, g, u, unknown, other, or absent
  misc_difference 292: note = a, c, g, u, unknown, other, or absent
  misc_difference 293: note = a, c, g, u, unknown, other, or absent
  misc_difference 294: note = a, c, g, u, unknown, other, or absent
  misc_difference 295: note = a, c, g, u, unknown, other, or absent
  misc_difference 296: note = a, c, g, u, unknown, other, or absent
  misc_difference 297: note = a, c, g, u, unknown, other, or absent
  misc_difference 298: note = a, c, g, u, unknown, other, or absent
  misc_difference 299: note = a, c, g, u, unknown, other, or absent
  misc_difference 300: note = a, c, g, u, unknown, other, or absent
  misc_difference 301: note = a, c, g, u, unknown, other, or absent
  misc_difference 302: note = a, c, g, u, unknown, other, or absent
  misc_difference 303: note = a, c, g, u, unknown, other, or absent
  misc_difference 304: note = a, c, g, u, unknown, other, or absent
  misc_difference 305: note = a, c, g, u, unknown, other, or absent
  misc_difference 306: note = a, c, g, u, unknown, other, or absent
  misc_difference 307: note = a, c, g, u, unknown, other, or absent
  misc_difference 308: note = a, c, g, u, unknown, other, or absent
  misc_difference 309: note = a, c, g, u, unknown, other, or absent
  misc_difference 310: note = a, c, g, u, unknown, other, or absent
  misc_difference 311: note = a, c, g, u, unknown, other, or absent
  misc_difference 312: note = a, c, g, u, unknown, other, or absent
  misc_difference 313: note = a, c, g, u, unknown, other, or absent
  misc_difference 314: note = a, c, g, u, unknown, other, or absent
  misc_difference 315: note = a, c, g, u, unknown, other, or absent
  misc_difference 316: note = a, c, g, u, unknown, other, or absent
  misc_difference 317: note = a, c, g, u, unknown, other, or absent
  misc_difference 318: note = a, c, g, u, unknown, other, or absent
  misc_difference 319: note = May be absent
  misc_difference 320: note = May be absent
  misc_difference 321: note = May be absent
  misc_difference 322: note = May be absent
  misc_difference 323: note = May be absent
  misc_difference 324: note = May be absent
  misc_difference 325: note = May be absent
  misc_difference 326: note = May be absent
  misc_difference 327: note = a, c, g, u, unknown, other, or absent
  misc_difference 328: note = May be absent
  misc_difference 329: note = May be absent
  misc_difference 330: note = May be absent
  misc_difference 331: note = a, c, g, u, unknown, other, or absent
  misc_difference 332: note = a, c, g, u, unknown, other, or absent
  misc_difference 333: note = May be absent
  misc_difference 334: note = May be absent
  misc_difference 335: note = a, c, g, u, unknown, other, or absent
  misc_difference 336: note = a, c, g, u, unknown, other, or absent
  misc_difference 337: note = a, c, g, u, unknown, other, or absent
  misc_difference 338: note = a, c, g, u, unknown, other, or absent
  misc_difference 339: note = May be absent
  misc_difference 340: note = May be absent
  misc_difference 341: note = May be absent
  misc_difference 43..314: note = This region may encompass 1-271 nucleotides
kbbnnndtagyyyarhytggbwwgrryrnnnbnyygaarvnbnnnnnnnnnnnnnnnnnnnnnnnnnnnnnnnnnnnnnnnnnnnnnnnnnnnnnnnnnnnnnnnnnnnnnnnnnnnnnnnnnnnnnnnnnnnnnnnnnnnnnnnnnnnnnnnnnnnnnnnnnnnnnnnnnnnnnnnnnnnnnnnnnnnnnnnnnnnnnnnnnnnnnnnnnnnnnnnnnnnnnnnnnnnnnnnnnnnnnnnnnnnnnnnnnnnnnnnnnnnnnnnnnnnnnnnnnnnnnnnnnnnnnnnnnnnnnnnnnnnnnnnnnnnnnnnnnnnnbdgttcranychnnbhnnnnvma

SEQ ID NO: 602 - RNA, 340 nt, synthetic construct
  source 1..340: mol_type = other RNA
  misc_difference 1: note = May be absent
  misc_difference 2: note = May be absent
  misc_difference 3: note = May be absent
  misc_difference 4: note = May be absent
  misc_difference 5: note = May be absent
  misc_difference 6: note = May be absent
  misc_difference 7: note = May be absent
  misc_difference 8: note = May be absent
  misc_difference 9: note = May be absent
  misc_difference 10: note = May be absent
  misc_difference 11: note = May be absent
  misc_difference 12: note = May be absent
  misc_difference 13: note = May be absent
  misc_difference 14: note = May be absent
  misc_difference 15: note = May be absent
  misc_difference 16: note = May be absent
  misc_difference 17: note = May be absent
  misc_difference 18: note = May be absent
  misc_difference 19: note = May be absent
  misc_difference 20: note = May be absent
  misc_difference 21: note = May be absent
  misc_difference 22: note = May be absent
  misc_difference 23: note = May be absent
  misc_difference 24: note = May be absent
  misc_difference 25: note = May be absent
  misc_difference 26: note = May be absent
  misc_difference 27: note = May be absent
  misc_difference 28: note = May be absent
  misc_difference 29: note = May be absent
  misc_difference 30: note = May be absent
  misc_difference 31: note = May be absent
  misc_difference 32: note = May be absent
  misc_difference 33: note = May be absent
  misc_difference 34: note = May be absent
  misc_difference 35: note = May be absent
  misc_difference 36: note = May be absent
  misc_difference 37: note = May be absent
  misc_difference 38: note = May be absent
  misc_difference 39: note = May be absent
  misc_difference 40: note = May be absent
  misc_difference 41: note = May be absent
  misc_difference 42: note = May be absent
  misc_difference 43: note = May be absent
  misc_difference 44: note = May be absent
  misc_difference 45: note = a, c, g, u, unknown, other, or absent
  misc_difference 46: note = a, c, g, u, unknown, other, or absent
  misc_difference 47: note = a, c, g, u, unknown, other, or absent
  misc_difference 48: note = a, c, g, u, unknown, other, or absent
  misc_difference 49: note = a, c, g, u, unknown, other, or absent
  misc_difference 50: note = a, c, g, u, unknown, other, or absent
  misc_difference 51: note = a, c, g, u, unknown, other, or absent
  misc_difference 52: note = a, c, g, u, unknown, other, or absent
  misc_difference 53: note = a, c, g, u, unknown, other, or absent
  misc_difference 54: note = a, c, g, u, unknown, other, or absent
  misc_difference 55: note = a, c, g, u, unknown, other, or absent
  misc_difference 56: note = a, c, g, u, unknown, other, or absent
  misc_difference 57: note = a, c, g, u, unknown, other, or absent
  misc_difference 58: note = a, c, g, u, unknown, other, or absent
  misc_difference 59: note = a, c, g, u, unknown, other, or absent
  misc_difference 60: note = a, c, g, u, unknown, other, or absent
  misc_difference 61: note = a, c, g, u, unknown, other, or absent
  misc_difference 62: note = a, c, g, u, unknown, other, or absent
  misc_difference 63: note = a, c, g, u, unknown, other, or absent
  misc_difference 64: note = a, c, g, u, unknown, other, or absent
  misc_difference 65: note = a, c, g, u, unknown, other, or absent
  misc_difference 66: note = a, c, g, u, unknown, other, or absent
  misc_difference 67: note = a, c, g, u, unknown, other, or absent
  misc_difference 68: note = a, c, g, u, unknown, other, or absent
  misc_difference 69: note = a, c, g, u, unknown, other, or absent
  misc_difference 70: note = a, c, g, u, unknown, other, or absent
  misc_difference 71: note = a, c, g, u, unknown, other, or absent
  misc_difference 72: note = a, c, g, u, unknown, other, or absent
  misc_difference 73: note = a, c, g, u, unknown, other, or absent
  misc_difference 74: note = a, c, g, u, unknown, other, or absent
  misc_difference 75: note = a, c, g, u, unknown, other, or absent
  misc_difference 76: note = a, c, g, u, unknown, other, or absent
  misc_difference 77: note = a, c, g, u, unknown, other, or absent
  misc_difference 78: note = a, c, g, u, unknown, other, or absent
  misc_difference 79: note = a, c, g, u, unknown, other, or absent
  misc_difference 80: note = a, c, g, u, unknown, other, or absent
  misc_difference 81: note = a, c, g, u, unknown, other, or absent
  misc_difference 82: note = a, c, g, u, unknown, other, or absent
  misc_difference 83: note = a, c, g, u, unknown, other, or absent
  misc_difference 84: note = a, c, g, u, unknown, other, or absent
  misc_difference 85: note = a, c, g, u, unknown, other, or absent
  misc_difference 86: note = a, c, g, u, unknown, other, or absent
  misc_difference 87: note = a, c, g, u, unknown, other, or absent
  misc_difference 88: note = a, c, g, u, unknown, other, or absent
  misc_difference 89: note = a, c, g, u, unknown, other, or absent
  misc_difference 90: note = a, c, g, u, unknown, other, or absent
  misc_difference 91: note = a, c, g, u, unknown, other, or absent
  misc_difference 92: note = a, c, g, u, unknown, other, or absent
  misc_difference 93: note = a, c, g, u, unknown, other, or absent
  misc_difference 94: note = a, c, g, u, unknown, other, or absent
  misc_difference 95: note = a, c, g, u, unknown, other, or absent
  misc_difference 96: note = a, c, g, u, unknown, other, or absent
  misc_difference 97: note = a, c, g, u, unknown, other, or absent
  misc_difference 98: note = a, c, g, u, unknown, other, or absent
  misc_difference 99: note = a, c, g, u, unknown, other, or absent
  misc_difference 100: note = a, c, g, u, unknown, other, or absent
  misc_difference 101: note = a, c, g, u, unknown, other, or absent
  misc_difference 102: note = a, c, g, u, unknown, other, or absent
  misc_difference 103: note = a, c, g, u, unknown, other, or absent
  misc_difference 104: note = a, c, g, u, unknown, other, or absent
  misc_difference 105: note = a, c, g, u, unknown, other, or absent
  misc_difference 106: note = a, c, g, u, unknown, other, or absent
  misc_difference 107: note = a, c, g, u, unknown, other, or absent
  misc_difference 108: note = a, c, g, u, unknown, other, or absent
  misc_difference 109: note = a, c, g, u, unknown, other, or absent
  misc_difference 110: note = a, c, g, u, unknown, other, or absent
  misc_difference 111: note = a, c, g, u, unknown, other, or absent
  misc_difference 112: note = a, c, g, u, unknown, other, or absent
  misc_difference 113: note = a, c, g, u, unknown, other, or absent
  misc_difference 114: note = a, c, g, u, unknown, other, or absent
  misc_difference 115: note = a, c, g, u, unknown, other, or absent
  misc_difference 116: note = a, c, g, u, unknown, other, or absent
  misc_difference 117: note = a, c, g, u, unknown, other, or absent
  misc_difference 118: note = a, c, g, u, unknown, other, or absent
  misc_difference 119: note = a, c, g, u, unknown, other, or absent
  misc_difference 120: note = a, c, g, u, unknown, other, or absent
  misc_difference 121: note = a, c, g, u, unknown, other, or absent
  misc_difference 122: note = a, c, g, u, unknown, other, or absent
  misc_difference 123: note = a, c, g, u, unknown, other, or absent
  misc_difference 124: note = a, c, g, u, unknown, other, or absent
  misc_difference 125: note = a, c, g, u, unknown, other, or absent
  misc_difference 126: note = a, c, g, u, unknown, other, or absent
  misc_difference 127: note = a, c, g, u, unknown, other, or absent
  misc_difference 128: note = a, c, g, u, unknown, other, or absent
  misc_difference 129: note = a, c, g, u, unknown, other, or absent
  misc_difference 130: note = a, c, g, u, unknown, other, or absent
  misc_difference 131: note = a, c, g, u, unknown, other, or absent
  misc_difference 132: note = a, c, g, u, unknown, other, or absent
  misc_difference 133: note = a, c, g, u, unknown, other, or absent
  misc_difference 134: note = a, c, g, u, unknown, other, or absent
  misc_difference 135: note = a, c, g, u, unknown, other, or absent
  misc_difference 136: note = a, c, g, u, unknown, other, or absent
  misc_difference 137: note = a, c, g, u, unknown, other, or absent
  misc_difference 138: note = a, c, g, u, unknown, other, or absent
  misc_difference 139: note = a, c, g, u, unknown, other, or absent
  misc_difference 140: note = a, c, g, u, unknown, other, or absent
  misc_difference 141: note = a, c, g, u, unknown, other, or absent
  misc_difference 142: note = a, c, g, u, unknown, other, or absent
  misc_difference 143: note = a, c, g, u, unknown, other, or absent
  misc_difference 144: note = a, c, g, u, unknown, other, or absent
  misc_difference 145: note = a, c, g, u, unknown, other, or absent
  misc_difference 146: note = a, c, g, u, unknown, other, or absent
  misc_difference 147: note = a, c, g, u, unknown, other, or absent
  misc_difference 148: note = a, c, g, u, unknown, other, or absent
  misc_difference 149: note = a, c, g, u, unknown, other, or absent
  misc_difference 150: note = a, c, g, u, unknown, other, or absent
  misc_difference 151: note = a, c, g, u, unknown, other, or absent
  misc_difference 152: note = a, c, g, u, unknown, other, or absent
  misc_difference 153: note = a, c, g, u, unknown, other, or absent
  misc_difference 154: note = a, c, g, u, unknown, other, or absent
  misc_difference 155: note = a, c, g, u, unknown, other, or absent
  misc_difference 156: note = a, c, g, u, unknown, other, or absent
  misc_difference 157: note = a, c, g, u, unknown, other, or absent
  misc_difference 158: note = a, c, g, u, unknown, other, or absent
  misc_difference 159: note = a, c, g, u, unknown, other, or absent
  misc_difference 160: note = a, c, g, u, unknown, other, or absent
  misc_difference 161: note = a, c, g, u, unknown, other, or absent
  misc_difference 162: note = a, c, g, u, unknown, other, or absent
  misc_difference 163: note = a, c, g, u, unknown, other, or absent
  misc_difference 164: note = a, c, g, u, unknown, other, or absent
  misc_difference 165: note = a, c, g, u, unknown, other, or absent
  misc_difference 166: note = a, c, g, u, unknown, other, or absent
  misc_difference 167: note = a, c, g, u, unknown, other, or absent
  misc_difference 168: note = a, c, g, u, unknown, other, or absent
  misc_difference 169: note = a, c, g, u, unknown, other, or absent
  misc_difference 170: note = a, c, g, u, unknown, other, or absent
  misc_difference 171: note = a, c, g, u, unknown, other, or absent
  misc_difference 172: note = a, c, g, u, unknown, other, or absent
  misc_difference 173: note = a, c, g, u, unknown, other, or absent
  misc_difference 174: note = a, c, g, u, unknown, other, or absent
  misc_difference 175: note = a, c, g, u, unknown, other, or absent
  misc_difference 176: note = a, c, g, u, unknown, other, or absent
  misc_difference 177: note = a, c, g, u, unknown, other, or absent
  misc_difference 178: note = a, c, g, u, unknown, other, or absent
  misc_difference 179: note = a, c, g, u, unknown, other, or absent
  misc_difference 180: note = a, c, g, u, unknown, other, or absent
  misc_difference 181: note = a, c, g, u, unknown, other, or absent
  misc_difference 182: note = a, c, g, u, unknown, other, or absent
  misc_difference 183: note = a, c, g, u, unknown, other, or absent
  misc_difference 184: note = a, c, g, u, unknown, other, or absent
  misc_difference 185: note = a, c, g, u, unknown, other, or absent
  misc_difference 186: note = a, c, g, u, unknown, other, or absent
  misc_difference 187: note = a, c, g, u, unknown, other, or absent
  misc_difference 188: note = a, c, g, u, unknown, other, or absent
  misc_difference 189: note = a, c, g, u, unknown, other, or absent
  misc_difference 190: note = a, c, g, u, unknown, other, or absent
  misc_difference 191: note = a, c, g, u, unknown, other, or absent
  misc_difference 192: note = a, c, g, u, unknown, other, or absent
  misc_difference 193: note = a, c, g, u, unknown, other, or absent
  misc_difference 194: note = a, c, g, u, unknown, other, or absent
  misc_difference 195: note = a, c, g, u, unknown, other, or absent
  misc_difference 196: note = a, c, g, u, unknown, other, or absent
  misc_difference 197: note = a, c, g, u, unknown, other, or absent
  misc_difference 198: note = a, c, g, u, unknown, other, or absent
  misc_difference 199: note = a, c, g, u, unknown, other, or absent
  misc_difference 200: note = a, c, g, u, unknown, other, or absent
  misc_difference 201: note = a, c, g, u, unknown, other, or absent
  misc_difference 202: note = a, c, g, u, unknown, other, or absent
  misc_difference 203: note = a, c, g, u, unknown, other, or absent
  misc_difference 204: note = a, c, g, u, unknown, other, or absent
  misc_difference 205: note = a, c, g, u, unknown, other, or absent
  misc_difference 206: note = a, c, g, u, unknown, other, or absent
  misc_difference 207: note = a, c, g, u, unknown, other, or absent
  misc_difference 208: note = a, c, g, u, unknown, other, or absent
  misc_difference 209: note = a, c, g, u, unknown, other, or absent
  misc_difference 210: note = a, c, g, u, unknown, other, or absent
  misc_difference 211: note = a, c, g, u, unknown, other, or absent
  misc_difference 212: note = a, c, g, u, unknown, other, or absent
  misc_difference 213: note = a, c, g, u, unknown, other, or absent
  misc_difference 214: note = a, c, g, u, unknown, other, or absent
  misc_difference 215: note = a, c, g, u, unknown, other, or absent
  misc_difference 216: note = a, c, g, u, unknown, other, or absent
  misc_difference 217: note = a, c, g, u, unknown, other, or absent
  misc_difference 218: note = a, c, g, u, unknown, other, or absent
  misc_difference 219: note = a, c, g, u, unknown, other, or absent
  misc_difference 220: note = a, c, g, u, unknown, other, or absent
  misc_difference 221: note = a, c, g, u, unknown, other, or absent
  misc_difference 222: note = a, c, g, u, unknown, other, or absent
  misc_difference 223: note = a, c, g, u, unknown, other, or absent
  misc_difference 224: note = a, c, g, u, unknown, other, or absent
  misc_difference 225: note = a, c, g, u, unknown, other, or absent
  misc_difference 226: note = a, c, g, u, unknown, other, or absent
  misc_difference 227: note = a, c, g, u, unknown, other, or absent
  misc_difference 228: note = a, c, g, u, unknown, other, or absent
  misc_difference 229: note = a, c, g, u, unknown, other, or absent
  misc_difference 230: note = a, c, g, u, unknown, other, or absent
  misc_difference 231: note = a, c, g, u, unknown, other, or absent
  misc_difference 232: note = a, c, g, u, unknown, other, or absent
  misc_difference 233: note = a, c, g, u, unknown, other, or absent
  misc_difference 234: note = a, c, g, u, unknown, other, or absent
  misc_difference 235: note = a, c, g, u, unknown, other, or absent
  misc_difference 236: note = a, c, g, u, unknown, other, or absent
  misc_difference 237: note = a, c, g, u, unknown, other, or absent
  misc_difference 238: note = a, c, g, u, unknown, other, or absent
  misc_difference 239: note = a, c, g, u, unknown, other, or absent
  misc_difference 240: note = a, c, g, u, unknown, other, or absent
  misc_difference 241: note = a, c, g, u, unknown, other, or absent
  misc_difference 242: note = a, c, g, u, unknown, other, or absent
  misc_difference 243: note = a, c, g, u, unknown, other, or absent
  misc_difference 244: note = a, c, g, u, unknown, other, or absent
  misc_difference 245: note = a, c, g, u, unknown, other, or absent
  misc_difference 246: note = a, c, g, u, unknown, other, or absent
  misc_difference 247: note = a, c, g, u, unknown, other, or absent
  misc_difference 248: note = a, c, g, u, unknown, other, or absent
  misc_difference 249: note = a, c, g, u, unknown, other, or absent
  misc_difference 250: note = a, c, g, u, unknown, other, or absent
  misc_difference 251: note = a, c, g, u, unknown, other, or absent
  misc_difference 252: note = a, c, g, u, unknown, other, or absent
  misc_difference 253: note = a, c, g, u, unknown, other, or absent
  misc_difference 254: note = a, c, g, u, unknown, other, or absent
  misc_difference 255: note = a, c, g, u, unknown, other, or absent
  misc_difference 256: note = a, c, g, u, unknown, other, or absent
  misc_difference 257: note = a, c, g, u, unknown, other, or absent
  misc_difference 258: note = a, c, g, u, unknown, other, or absent
  misc_difference 259: note = a, c, g, u, unknown, other, or absent
  misc_difference 260: note = a, c, g, u, unknown, other, or absent
  misc_difference 261: note = a, c, g, u, unknown, other, or absent
  misc_difference 262: note = a, c, g, u, unknown, other, or absent
  misc_difference 263: note = a, c, g, u, unknown, other, or absent
  misc_difference 264: note = a, c, g, u, unknown, other, or absent
  misc_difference 265: note = a, c, g, u, unknown, other, or absent
  misc_difference 266: note = a, c, g, u, unknown, other, or absent
  misc_difference 267: note = a, c, g, u, unknown, other, or absent
  misc_difference 268: note = a, c, g, u, unknown, other, or absent
  misc_difference 269: note = a, c, g, u, unknown, other, or absent
  misc_difference 270: note = a, c, g, u, unknown, other, or absent
  misc_difference 271: note = a, c, g, u, unknown, other, or absent
  misc_difference 272: note = a, c, g, u, unknown, other, or absent
  misc_difference 273: note = a, c, g, u, unknown, other, or absent
  misc_difference 274: note = a, c, g, u, unknown, other, or absent
  misc_difference 275: note = a, c, g, u, unknown, other, or absent
  misc_difference 276: note = a, c, g, u, unknown, other, or absent
  misc_difference 277: note = a, c, g, u, unknown, other, or absent
  misc_difference 278: note = a, c, g, u, unknown, other, or absent
  misc_difference 279: note = a, c, g, u, unknown, other, or absent
  misc_difference 280: note = a, c, g, u, unknown, other, or absent
  misc_difference 281: note = a, c, g, u, unknown, other, or absent
  misc_difference 282: note = a, c, g, u, unknown, other, or absent
  misc_difference 283: note = a, c, g, u, unknown, other, or absent
  misc_difference 284: note = a, c, g, u, unknown, other, or absent
  misc_difference 285: note = a, c, g, u, unknown, other, or absent
  misc_difference 286: note = a, c, g, u, unknown, other, or absent
  misc_difference 287: note = a, c, g, u, unknown, other, or absent
  misc_difference 288: note = a, c, g, u, unknown, other, or absent
  misc_difference 289: note = a, c, g, u, unknown, other, or absent
  misc_difference 290: note = a, c, g, u, unknown, other, or absent
  misc_difference 291: note = a, c, g, u, unknown, other, or absent
  misc_difference 292: note = a, c, g, u, unknown, other, or absent
  misc_difference 293: note = a, c, g, u, unknown, other, or absent
  misc_difference 294: note = a, c, g, u, unknown, other, or absent
  misc_difference 295: note = a, c, g, u, unknown, other, or absent
  misc_difference 296: note = a, c, g, u, unknown, other, or absent
  misc_difference 297: note = a, c, g, u, unknown, other, or absent
  misc_difference 298: note = a, c, g, u, unknown, other, or absent
  misc_difference 299: note = a, c, g, u, unknown, other, or absent
  misc_difference 300: note = a, c, g, u, unknown, other, or absent
  misc_difference 301: note = a, c, g, u, unknown, other, or absent
  misc_difference 302: note = a, c, g, u, unknown, other, or absent
  misc_difference 303: note = a, c, g, u, unknown, other, or absent
  misc_difference 304: note = a, c, g, u, unknown, other, or absent
  misc_difference 305: note = a, c, g, u, unknown, other, or absent
  misc_difference 306: note = a, c, g, u, unknown, other, or absent
  misc_difference 307: note = a, c, g, u, unknown, other, or absent
  misc_difference 308: note = a, c, g, u, unknown, other, or absent
  misc_difference 309: note = a, c, g, u, unknown, other, or absent
  misc_difference 310: note = a, c, g, u, unknown, other, or absent
  misc_difference 311: note = a, c, g, u, unknown, other, or absent
  misc_difference 312: note = a, c, g, u, unknown, other, or absent
  misc_difference 313: note = a, c, g, u, unknown, other, or absent
  misc_difference 314: note = a, c, g, u, unknown, other, or absent
  misc_difference 315: note = a, c, g, u, unknown, other, or absent
  misc_difference 316: note = May be absent
  misc_difference 317: note = May be absent
  misc_difference 318: note = May be absent
  misc_difference 319: note = May be absent
  misc_difference 320: note = May be absent
  misc_difference 321: note = May be absent
  misc_difference 322: note = May be absent
  misc_difference 323: note = May be absent
  misc_difference 324: note = May be absent
  misc_difference 325: note = May be absent
  misc_difference 326: note = May be absent
  misc_difference 327: note = May be absent
  misc_difference 328: note = May be absent
  misc_difference 329: note = May be absent
  misc_difference 330: note = May be absent
  misc_difference 331: note = May be absent
  misc_difference 332: note = May be absent
  misc_difference 333: note = May be absent
  misc_difference 334: note = May be absent
  misc_difference 335: note = May be absent
  misc_difference 336: note = May be absent
  misc_difference 337: note = May be absent
  misc_difference 338: note = May be absent
  misc_difference 339: note = May be absent
  misc_difference 340: note = May be absent
  misc_difference 45..316: note = This region may encompass 1-271 nucleotides
kbyvwrrtwgyyyarttggstagrrydykrbrcygaarrysyhmnnnnnnnnnnnnnnnnnnnnnnnnnnnnnnnnnnnnnnnnnnnnnnnnnnnnnnnnnnnnnnnnnnnnnnnnnnnnnnnnnnnnnnnnnnnnnnnnnnnnnnnnnnnnnnnnnnnnnnnnnnnnnnnnnnnnnnnnnnnnnnnnnnnnnnnnnnnnnnnnnnnnnnnnnnnnnnnnnnnnnnnnnnnnnnnnnnnnnnnnnnnnnnnnnnnnnnnnnnnnnnnnnnnnnnnnnnnnnnnnnnnnnnnnnnnnnnnnnnnnnnnnnnnnnnnyckggttcrayycysggtywbrvma

SEQ ID NO: 603 - RNA, 339 nt, synthetic construct
  source 1..339: mol_type = other RNA
  misc_difference 1: note = May be absent
  misc_difference 2: note = May be absent
  misc_difference 3: note = May be absent
  misc_difference 4: note = May be absent
  misc_difference 5: note = May be absent
  misc_difference 6: note = May be absent
  misc_difference 7: note = May be absent
  misc_difference 8: note = May be absent
  misc_difference 9: note = May be absent
  misc_difference 10: note = May be absent
  misc_difference 11: note = May be absent
  misc_difference 12: note = May be absent
  misc_difference 13: note = May be absent
  misc_difference 14: note = May be absent
  misc_difference 15: note = May be absent
  misc_difference 16: note = May be absent
  misc_difference 17: note = May be absent
  misc_difference 18: note = May be absent
  misc_difference 19: note = May be absent
  misc_difference 20: note = May be absent
  misc_difference 21: note = May be absent
  misc_difference 22: note = May be absent
  misc_difference 23: note = May be absent
  misc_difference 24: note = May be absent
  misc_difference 25: note = May be absent
  misc_difference 26: note = May be absent
  misc_difference 27: note = May be absent
  misc_difference 28: note = May be absent
  misc_difference 29: note = May be absent
  misc_difference 30: note = May be absent
  misc_difference 31: note = May be absent
  misc_difference 32: note = May be absent
  misc_difference 33: note = May be absent
  misc_difference 34: note = May be absent
  misc_difference 35: note = May be absent
  misc_difference 36: note = May be absent
  misc_difference 37: note = May be absent
  misc_difference 38: note = May be absent
  misc_difference 39: note = May be absent
  misc_difference 40: note = May be absent
  misc_difference 41: note = May be absent
  misc_difference 42: note = May be absent
  misc_difference 43: note = May be absent
  misc_difference 44: note = a, c, g, u, unknown, other, or absent
  misc_difference 45: note = a, c, g, u, unknown, other, or absent
  misc_difference 46: note = a, c, g, u, unknown, other, or absent
  misc_difference 47: note = a, c, g, u, unknown, other, or absent
  misc_difference 48: note = a, c, g, u, unknown, other, or absent
  misc_difference 49: note = a, c, g, u, unknown, other, or absent
  misc_difference 50: note = a, c, g, u, unknown, other, or absent
  misc_difference 51: note = a, c, g, u, unknown, other, or absent
  misc_difference 52: note = a, c, g, u, unknown, other, or absent
  misc_difference 53: note = a, c, g, u, unknown, other, or absent
  misc_difference 54: note = a, c, g, u, unknown, other, or absent
  misc_difference 55: note = a, c, g, u, unknown, other, or absent
  misc_difference 56: note = a, c, g, u, unknown, other, or absent
  misc_difference 57: note = a, c, g, u, unknown, other, or absent
  misc_difference 58: note = a, c, g, u, unknown, other, or absent
  misc_difference 59: note = a, c, g, u, unknown, other, or absent
  misc_difference 60: note = a, c, g, u, unknown, other, or absent
  misc_difference 61: note = a, c, g, u, unknown, other, or absent
  misc_difference 62: note = a, c, g, u, unknown, other, or absent
  misc_difference 63: note = a, c, g, u, unknown, other, or absent
  misc_difference 64: note = a, c, g, u, unknown, other, or absent
  misc_difference 65: note = a, c, g, u, unknown, other, or absent
  misc_difference 66: note = a, c, g, u, unknown, other, or absent
  misc_difference 67: note = a, c, g, u, unknown, other, or absent
  misc_difference 68: note = a, c, g, u, unknown, other, or absent
  misc_difference 69: note = a, c, g, u, unknown, other, or absent
  misc_difference 70: note = a, c, g, u, unknown, other, or absent
  misc_difference 71: note = a, c, g, u, unknown, other, or absent
  misc_difference 72: note = a, c, g, u, unknown, other, or absent
  misc_difference 73: note = a, c, g, u, unknown, other, or absent
  misc_difference 74: note = a, c, g, u, unknown, other, or absent
  misc_difference 75: note = a, c, g, u, unknown, other, or absent
  misc_difference 76: note = a, c, g, u, unknown, other, or absent
  misc_difference 77: note = a, c, g, u, unknown, other, or absent
  misc_difference 78: note = a, c, g, u, unknown, other, or absent
  misc_difference 79: note = a, c, g, u, unknown, other, or absent
  misc_difference 80: note = a, c, g, u, unknown, other, or absent
  misc_difference 81: note = a, c, g, u, unknown, other, or absent
  misc_difference 82: note = a, c, g, u, unknown, other, or absent
  misc_difference 83: note = a, c, g, u, unknown, other, or absent
  misc_difference 84: note = a, c, g, u, unknown, other, or absent
  misc_difference 85: note = a, c, g, u, unknown, other, or absent
  misc_difference 86: note = a, c, g, u, unknown, other, or absent
  misc_difference 87: note = a, c, g, u, unknown, other, or absent
  misc_difference 88: note = a, c, g, u, unknown, other, or absent
  misc_difference 89: note = a, c, g, u, unknown, other, or absent
  misc_difference 90: note = a, c, g, u, unknown, other, or absent
  misc_difference 91: note = a, c, g, u, unknown, other, or absent
  misc_difference 92: note = a, c, g, u, unknown, other, or absent
  misc_difference 93: note = a, c, g, u, unknown, other, or absent
  misc_difference 94: note = a, c, g, u, unknown, other, or absent
  misc_difference 95: note = a, c, g, u, unknown, other, or absent
  misc_difference 96: note = a, c, g, u, unknown, other, or absent
  misc_difference 97: note = a, c, g, u, unknown, other, or absent
  misc_difference 98: note = a, c, g, u, unknown, other, or absent
  misc_difference 99: note = a, c, g, u, unknown, other, or absent
  misc_difference 100: note = a, c, g, u, unknown, other, or absent
  misc_difference 101: note = a, c, g, u, unknown, other, or absent
  misc_difference 102: note = a, c, g, u, unknown, other, or absent
  misc_difference 103: note = a, c, g, u, unknown, other, or absent
  misc_difference 104: note = a, c, g, u, unknown, other, or absent
  misc_difference 105: note = a, c, g, u, unknown, other, or absent
  misc_difference 106: note = a, c, g, u, unknown, other, or absent
  misc_difference 107: note = a, c, g, u, unknown, other, or absent
  misc_difference 108: note = a, c, g, u, unknown, other, or absent
  misc_difference 109: note = a, c, g, u, unknown, other, or absent
  misc_difference 110: note = a, c, g, u, unknown, other, or absent
  misc_difference 111: note = a, c, g, u, unknown, other, or absent
  misc_difference 112: note = a, c, g, u, unknown, other, or absent
  misc_difference 113: note = a, c, g, u, unknown, other, or absent
  misc_difference 114: note = a, c, g, u, unknown, other, or absent
  misc_difference 115: note = a, c, g, u, unknown, other, or absent
  misc_difference 116: note = a, c, g, u, unknown, other, or absent
  misc_difference 117: note = a, c, g, u, unknown, other, or absent
  misc_difference 118: note = a, c, g, u, unknown, other, or absent
  misc_difference 119: note = a, c, g, u, unknown, other, or absent
  misc_difference 120: note = a, c, g, u, unknown, other, or absent
  misc_difference 121: note = a, c, g, u, unknown, other, or absent
  misc_difference 122: note = a, c, g, u, unknown, other, or absent
  misc_difference 123: note = a, c, g, u, unknown, other, or absent
  misc_difference 124: note = a, c, g, u, unknown, other, or absent
  misc_difference 125: note = a, c, g, u, unknown, other, or absent
  misc_difference 126: note = a, c, g, u, unknown, other, or absent
  misc_difference 127: note = a, c, g, u, unknown, other, or absent
  misc_difference 128: note = a, c, g, u, unknown, other, or absent
  misc_difference 129: note = a, c, g, u, unknown, other, or absent
  misc_difference 130: note = a, c, g, u, unknown, other, or absent
  misc_difference 131: note = a, c, g, u, unknown, other, or absent
  misc_difference 132: note = a, c, g, u, unknown, other, or absent
  misc_difference 133: note = a, c, g, u, unknown, other, or absent
  misc_difference 134: note = a, c, g, u, unknown, other, or absent
  misc_difference 135: note = a, c, g, u, unknown, other, or absent
  misc_difference 136: note = a, c, g, u, unknown, other, or absent
  misc_difference 137: note = a, c, g, u, unknown, other, or absent
  misc_difference 138: note = a, c, g, u, unknown, other, or absent
  misc_difference 139: note = a, c, g, u, unknown, other, or absent
  misc_difference 140: note = a, c, g, u, unknown, other, or absent
  misc_difference 141: note = a, c, g, u, unknown, other, or absent
  misc_difference 142: note = a, c, g, u, unknown, other, or absent
  misc_difference 143: note = a, c, g, u, unknown, other, or absent
  misc_difference 144: note = a, c, g, u, unknown, other, or absent
  misc_difference 145: note = a, c, g, u, unknown, other, or absent
  misc_difference 146: note = a, c, g, u, unknown, other, or absent
  misc_difference 147: note = a, c, g, u, unknown, other, or absent
  misc_difference 148: note = a, c, g, u, unknown, other, or absent
  misc_difference 149: note = a, c, g, u, unknown, other, or absent
  misc_difference 150: note = a, c, g, u, unknown, other, or absent
  misc_difference 151: note = a, c, g, u, unknown, other, or absent
  misc_difference 152: note = a, c, g, u, unknown, other, or absent
  misc_difference 153: note = a, c, g, u, unknown, other, or absent
  misc_difference 154: note = a, c, g, u, unknown, other, or absent
  misc_difference 155: note = a, c, g, u, unknown, other, or absent
  misc_difference 156: note = a, c, g, u, unknown, other, or absent
  misc_difference 157: note = a, c, g, u, unknown, other, or absent
  misc_difference 158: note = a, c, g, u, unknown, other, or absent
  misc_difference 159: note = a, c, g, u, unknown, other, or absent
  misc_difference 160: note = a, c, g, u, unknown, other, or absent
  misc_difference 161: note = a, c, g, u, unknown, other, or absent
  misc_difference 162: note = a, c, g, u, unknown, other, or absent
  misc_difference 163: note = a, c, g, u, unknown, other, or absent
  misc_difference 164: note = a, c, g, u, unknown, other, or absent
  misc_difference 165: note = a, c, g, u, unknown, other, or absent
  misc_difference 166: note = a, c, g, u, unknown, other, or absent
  misc_difference 167: note = a, c, g, u, unknown, other, or absent
  misc_difference 168: note = a, c, g, u, unknown, other, or absent
  misc_difference 169: note = a, c, g, u, unknown, other, or absent
  misc_difference 170: note = a, c, g, u, unknown, other, or absent
  misc_difference 171: note = a, c, g, u, unknown, other, or absent
  misc_difference 172: note = a, c, g, u, unknown, other, or absent
  misc_difference 173: note = a, c, g, u, unknown, other, or absent
  misc_difference 174: note = a, c, g, u, unknown, other, or absent
  misc_difference 175: note = a, c, g, u, unknown, other, or absent
  misc_difference 176: note = a, c, g, u, unknown, other, or absent
  misc_difference 177: note = a, c, g, u, unknown, other, or absent
  misc_difference 178: note = a, c, g, u, unknown, other, or absent
  misc_difference 179: note = a, c, g, u, unknown, other, or absent
  misc_difference 180: note = a, c, g, u, unknown, other, or absent
  misc_difference 181: note = a, c, g, u, unknown, other, or absent
  misc_difference 182: note = a, c, g, u, unknown, other, or absent
  misc_difference 183: note = a, c, g, u, unknown, other, or absent
  misc_difference 184: note = a, c, g, u, unknown, other, or absent
  misc_difference 185: note = a, c, g, u, unknown, other, or absent
  misc_difference 186: note = a, c, g, u, unknown, other, or absent
  misc_difference 187: note = a, c, g, u, unknown, other, or absent
  misc_difference 188: note = a, c, g, u, unknown, other, or absent
  misc_difference 189: note = a, c, g, u, unknown, other, or absent
  misc_difference 190: note = a, c, g, u, unknown, other, or absent
  misc_difference 191: note = a, c, g, u, unknown, other, or absent
  misc_difference 192: note = a, c, g, u, unknown, other, or absent
  misc_difference 193: note = a, c, g, u, unknown, other, or absent
  misc_difference 194: note = a, c, g, u, unknown, other, or absent
  misc_difference 195: note = a, c, g, u, unknown, other, or absent
  misc_difference 196: note = a, c, g, u, unknown, other, or absent
  misc_difference 197: note = a, c, g, u, unknown, other, or absent
  misc_difference 198: note = a, c, g, u, unknown, other, or absent
  misc_difference 199: note = a, c, g, u, unknown, other, or absent
  misc_difference 200: note = a, c, g, u, unknown, other, or absent
  misc_difference 201: note = a, c, g, u, unknown, other, or absent
  misc_difference 202: note = a, c, g, u, unknown, other, or absent
  misc_difference 203: note = a, c, g, u, unknown, other, or absent
  misc_difference 204: note = a, c, g, u, unknown, other, or absent
  misc_difference 205: note = a, c, g, u, unknown, other, or absent
  misc_difference 206: note = a, c, g, u, unknown, other, or absent
  misc_difference 207: note = a, c, g, u, unknown, other, or absent
  misc_difference 208: note = a, c, g, u, unknown, other, or absent
  misc_difference 209: note = a, c, g, u, unknown, other, or absent
  misc_difference 210: note = a, c, g, u, unknown, other, or absent
  misc_difference 211: note = a, c, g, u, unknown, other, or absent
  misc_difference 212: note = a, c, g, u, unknown, other, or absent
  misc_difference 213: note = a, c, g, u, unknown, other, or absent
  misc_difference 214: note = a, c, g, u, unknown, other, or absent
  misc_difference 215: note = a, c, g, u, unknown, other, or absent
  misc_difference 216: note = a, c, g, u, unknown, other, or absent
  misc_difference 217: note = a, c, g, u, unknown, other, or absent
  misc_difference 218: note = a, c, g, u, unknown, other, or absent
  misc_difference 219: note = a, c, g, u, unknown, other, or absent
  misc_difference 220: note = a, c, g, u, unknown, other, or absent
  misc_difference 221: note = a, c, g, u, unknown, other, or absent
  misc_difference 222: note = a, c, g, u, unknown, other, or absent
  misc_difference 223: note = a, c, g, u, unknown, other, or absent
  misc_difference 224: note = a, c, g, u, unknown, other, or absent
  misc_difference 225: note = a, c, g, u, unknown, other, or absent
  misc_difference 226: note = a, c, g, u, unknown, other, or absent
  misc_difference 227: note = a, c, g, u, unknown, other, or absent
  misc_difference 228: note = a, c, g, u, unknown, other, or absent
  misc_difference 229: note = a, c, g, u, unknown, other, or absent
  misc_difference 230: note = a, c, g, u, unknown, other, or absent
  misc_difference 231: note = a, c, g, u, unknown, other, or absent
  misc_difference 232: note = a, c, g, u, unknown, other, or absent
  misc_difference 233: note = a, c, g, u, unknown, other, or absent
  misc_difference 234: note = a, c, g, u, unknown, other, or absent
  misc_difference 235: note = a, c, g, u, unknown, other, or absent
  misc_difference 236: note = a, c, g, u, unknown, other, or absent
  misc_difference 237: note = a, c, g, u, unknown, other, or absent
  misc_difference 238: note = a, c, g, u, unknown, other, or absent
  misc_difference 239: note = a, c, g, u, unknown, other, or absent
  misc_difference 240: note = a, c, g, u, unknown, other, or absent
  misc_difference 241: note = a, c, g, u, unknown, other, or absent
  misc_difference 242: note = a, c, g, u, unknown, other, or absent
  misc_difference 243: note = a, c, g, u, unknown, other, or absent
  misc_difference 244: note = a, c, g, u, unknown, other, or absent
  misc_difference 245: note = a, c, g, u, unknown, other, or absent
  misc_difference 246: note = a, c, g, u, unknown, other, or absent
  misc_difference 247: note = a, c, g, u, unknown, other, or absent
  misc_difference 248: note = a, c, g, u, unknown, other, or absent
  misc_difference 249: note = a, c, g, u, unknown, other, or absent
  misc_difference 250: note = a, c, g, u, unknown, other, or absent
  misc_difference 251: note = a, c, g, u, unknown, other, or absent
  misc_difference 252: note = a, c, g, u, unknown, other, or absent
  misc_difference 253: note = a, c, g, u, unknown, other, or absent
  misc_difference 254: note = a, c, g, u, unknown, other, or absent
  misc_difference 255: note = a, c, g, u, unknown, other, or absent
  misc_difference 256: note = a, c, g, u, unknown, other, or absent
  misc_difference 257: note = a, c, g, u, unknown, other, or absent
  misc_difference 258: note = a, c, g, u, unknown, other, or absent
  misc_difference 259: note = a, c, g, u, unknown, other, or absent
  misc_difference 260: note = a, c, g, u, unknown, other, or absent
  misc_difference 261: note = a, c, g, u, unknown, other, or absent
  misc_difference 262: note = a, c, g, u, unknown, other, or absent
  misc_difference 263: note = a, c, g, u, unknown, other, or absent
  misc_difference 264: note = a, c, g, u, unknown, other, or absent
  misc_difference 265: note = a, c, g, u, unknown, other, or absent
  misc_difference 266: note = a, c, g, u, unknown, other, or absent
  misc_difference 267: note = a, c, g, u, unknown, other, or absent
  misc_difference 268: note = a, c, g, u, unknown, other, or absent
  misc_difference 269: note = a, c, g, u, unknown, other, or absent
  misc_difference 270: note = a, c, g, u, unknown, other, or absent
  misc_difference 271: note = a, c, g, u, unknown, other, or absent
  misc_difference 272: note = a, c, g, u, unknown, other, or absent
  misc_difference 273: note = a, c, g, u, unknown, other, or absent
  misc_difference 274: note = a, c, g, u, unknown, other, or absent
  misc_difference 275: note = a, c, g, u, unknown, other, or absent
  misc_difference 276: note = a, c, g, u, unknown, other, or absent
  misc_difference 277: note = a, c, g, u, unknown, other, or absent
  misc_difference 278: note = a, c, g, u, unknown, other, or absent
  misc_difference 279: note = a, c, g, u, unknown, other, or absent
  misc_difference 280: note = a, c, g, u, unknown, other, or absent
  misc_difference 281: note = a, c, g, u, unknown, other, or absent
  misc_difference 282: note = a, c, g, u, unknown, other, or absent
  misc_difference 283: note = a, c, g, u, unknown, other, or absent
  misc_difference 284: note = a, c, g, u, unknown, other, or absent
  misc_difference 285: note = a, c, g, u, unknown, other, or absent
  misc_difference 286: note = a, c, g, u, unknown, other, or absent
  misc_difference 287: note = a, c, g, u, unknown, other, or absent
  misc_difference 288: note = a, c, g, u, unknown, other, or absent
  misc_difference 289: note = a, c, g, u, unknown, other, or absent
  misc_difference 290: note = a, c, g, u, unknown, other, or absent
  misc_difference 291: note = a, c, g, u, unknown, other, or absent
  misc_difference 292: note = a, c, g, u, unknown, other, or absent
  misc_difference 293: note = a, c, g, u, unknown, other, or absent
  misc_difference 294: note = a, c, g, u, unknown, other, or absent
  misc_difference 295: note = a, c, g, u, unknown, other, or absent
  misc_difference 296: note = a, c, g, u, unknown, other, or absent
  misc_difference 297: note = a, c, g, u, unknown, other, or absent
  misc_difference 298: note = a, c, g, u, unknown, other, or absent
  misc_difference 299: note = a, c, g, u, unknown, other, or absent
  misc_difference 300: note = a, c, g, u, unknown, other, or absent
  misc_difference 301: note = a, c, g, u, unknown, other, or absent
  misc_difference 302: note = a, c, g, u, unknown, other, or absent
  misc_difference 303: note = a, c, g, u, unknown, other, or absent
  misc_difference 304: note = a, c, g, u, unknown, other, or absent
  misc_difference 305: note = a, c, g, u, unknown, other, or absent
  misc_difference 306: note = a, c, g, u, unknown, other, or absent
  misc_difference 307: note = a, c, g, u, unknown, other, or absent
  misc_difference 308: note = a, c, g, u, unknown, other, or absent
  misc_difference 309: note = a, c, g, u, unknown, other, or absent
  misc_difference 310: note = a, c, g, u, unknown, other, or absent
  misc_difference 311: note = a, c, g, u, unknown, other, or absent
  misc_difference 312: note = a, c, g, u, unknown, other, or absent
  misc_difference 313: note = a, c, g, u, unknown, other, or absent
  misc_difference 314: note = a, c, g, u, unknown, other, or absent
  misc_difference 315: note = May be absent
  misc_difference 316: note = May be absent
  misc_difference 317: note = May be absent
  misc_difference 318: note = May be absent
  misc_difference 319: note = May be absent
  misc_difference 320: note = May be absent
  misc_difference 321: note = May be absent
  misc_difference 322: note = May be absent
  misc_difference 323: note = May be absent
  misc_difference 324: note = May be absent
  misc_difference 325: note = May be absent
  misc_difference 326: note = May be absent
  misc_difference 327: note = May be absent
  misc_difference 328: note = May be absent
  misc_difference 329: note = May be absent
  misc_difference 330: note = May be absent
  misc_difference 331: note = May be absent
  misc_difference 332: note = May be absent
  misc_difference 333: note = May be absent
  misc_difference 334: note = May be absent
  misc_difference 335: note = May be absent
  misc_difference 336: note = May be absent
  misc_difference 337: note = May be absent
  misc_difference 338: note = May be absent
  misc_difference 339: note = May be absent
  misc_difference 44..315: note = This region may encompass 1-271 nucleotides
gcyraratwgctcarttgggagagygttasacygaagatctwmnnnnnnnnnnnnnnnnnnnnnnnnnnnnnnnnnnnnnnnnnnnnnnnnnnnnnnnnnnnnnnnnnnnnnnnnnnnnnnnnnnnnnnnnnnnnnnnnnnnnnnnnnnnnnnnnnnnnnnnnnnnnnnnnnnnnnnnnnnnnnnnnnnnnnnnnnnnnnnnnnnnnnnnnnnnnnnnnnnnnnnnnnnnnnnnnnnnnnnnnnnnnnnnnnnnnnnnnnnnnnnnnnnnnnnnnnnnnnnnnnnnnnnnnnnnnnnnnnnnnnnnnnnnnnnnyctggttcrayycygggtttcrvca

SEQ ID NO: 604 - RNA, 342 nt, synthetic construct
  source 1..342: mol_type = other RNA
  misc_difference 1: note = May be absent
  misc_difference 2: note = May be absent
  misc_difference 3: note = May be absent
  misc_difference 4: note = a, c, g, u, unknown, other, or absent
  misc_difference 5: note = a, c, g, u, unknown, other, or absent
  misc_difference 6: note = a, c, g, u, unknown, other, or absent
  misc_difference 7: note = May be absent
  misc_difference 8: note = May be absent
  misc_difference 9: note = May be absent
  misc_difference 10: note = May be absent
  misc_difference 11: note = May be absent
  misc_difference 12: note = May be absent
  misc_difference 13: note = May be absent
  misc_difference 14: note = May be absent
  misc_difference 15: note = May be absent
  misc_difference 16: note = a, c, g, u, unknown, other, or absent
  misc_difference 17: note = May be absent
  misc_difference 18: note = May be absent
  misc_difference 19: note = May be absent
  misc_difference 20: note = May be absent
  misc_difference 21: note = a, c, g, u, unknown, other, or absent
  misc_difference 22: note = May be absent
  misc_difference 23: note = May be absent
  misc_difference 24: note = May be absent
  misc_difference 25: note = May be absent
  misc_difference 26: note = May be absent
  misc_difference 27: note = May be absent
  misc_difference 28: note = May be absent
  misc_difference 29: note = a, c, g, u, unknown, other, or absent
  misc_difference 30: note = a, c, g, u, unknown, other, or absent
  misc_difference 31: note = a, c, g, u, unknown, other, or absent
  misc_difference 32: note = a, c, g, u, unknown, other, or absent
  misc_difference 33: note = a, c, g, u, unknown, other, or absent
  misc_difference 34: note = a, c, g, u, unknown, other, or absent
  misc_difference 35: note = May be absent
  misc_difference 36: note = May be absent
  misc_difference 37: note = a, c, g, u, unknown, other, or absent
  misc_difference 38: note = May be absent
  misc_difference 39: note = May be absent
  misc_difference 40: note = May be absent
  misc_difference 41: note = a, c, g, u, unknown, other, or absent
  misc_difference 42: note = a, c, g, u, unknown, other, or absent
  misc_difference 43: note = a, c, g, u, unknown, other, or absent
  misc_difference 44: note = a, c, g, u, unknown, other, or absent
  misc_difference 45: note = a, c, g, u, unknown, other, or absent
  misc_difference 46: note = a, c, g, u, unknown, other, or absent
  misc_difference 47: note = a, c, g, u, unknown, other, or absent
  misc_difference 48: note = a, c, g, u, unknown, other, or absent
  misc_difference 49: note = a, c, g, u, unknown, other, or absent
  misc_difference 50: note = a, c, g, u, unknown, other, or absent
  misc_difference 51: note = a, c, g, u, unknown, other, or absent
  misc_difference 52: note = a, c, g, u, unknown, other, or absent
  misc_difference 53: note = a, c, g, u, unknown, other, or absent
  misc_difference 54: note = a, c, g, u, unknown, other, or absent
  misc_difference 55: note = a, c, g, u, unknown, other, or absent
  misc_difference 56: note = a, c, g, u, unknown, other, or absent
  misc_difference 57: note = a, c, g, u, unknown, other, or absent
  misc_difference 58: note = a, c, g, u, unknown, other, or absent
  misc_difference 59: note = a, c, g, u, unknown, other, or absent
  misc_difference 60: note = a, c, g, u, unknown, other, or absent
  misc_difference 61: note = a, c, g, u, unknown, other, or absent
  misc_difference 62: note = a, c, g, u, unknown, other, or absent
  misc_difference 63: note = a, c, g, u, unknown, other, or absent
  misc_difference 64: note = a, c, g, u, unknown, other, or absent
  misc_difference 65: note = a, c, g, u, unknown, other, or absent
  misc_difference 66: note = a, c, g, u, unknown, other, or absent
  misc_difference 67: note = a, c, g, u, unknown, other, or absent
  misc_difference 68: note = a, c, g, u, unknown, other, or absent
  misc_difference 69: note = a, c, g, u, unknown, other, or absent
  misc_difference 70: note = a, c, g, u, unknown, other, or absent
  misc_difference 71: note = a, c, g, u, unknown, other, or absent
  misc_difference 72: note = a, c, g, u, unknown, other, or absent
  misc_difference 73: note = a, c, g, u, unknown, other, or absent
  misc_difference 74: note = a, c, g, u, unknown, other, or absent
  misc_difference 75: note = a, c, g, u, unknown, other, or absent
  misc_difference 76: note = a, c, g, u, unknown, other, or absent
  misc_difference 77: note = a, c, g, u, unknown, other, or absent
  misc_difference 78: note = a, c, g, u, unknown, other, or absent
  misc_difference 79: note = a, c, g, u, unknown, other, or absent
  misc_difference 80: note = a, c, g, u, unknown, other, or absent
  misc_difference 81: note = a, c, g, u, unknown, other, or absent
  misc_difference 82: note = a, c, g, u, unknown, other, or absent
  misc_difference 83: note = a, c, g, u, unknown, other, or absent
  misc_difference 84: note = a, c, g, u, unknown, other, or absent
  misc_difference 85: note = a, c, g, u, unknown, other, or absent
  misc_difference 86: note = a, c, g, u, unknown, other, or absent
  misc_difference 87: note = a, c, g, u, unknown, other, or absent
  misc_difference 88: note = a, c, g, u, unknown, other, or absent
  misc_difference 89: note = a, c, g, u, unknown, other, or absent
  misc_difference 90: note = a, c, g, u, unknown, other, or absent
  misc_difference 91: note = a, c, g, u, unknown, other, or absent
  misc_difference 92: note = a, c, g, u, unknown, other, or absent
  misc_difference 93: note = a, c, g, u, unknown, other, or absent
  misc_difference 94: note = a, c, g, u, unknown, other, or absent
  misc_difference 95: note = a, c, g, u, unknown, other, or absent
  misc_difference 96: note = a, c, g, u, unknown, other, or absent
  misc_difference 97: note = a, c, g, u, unknown, other, or absent
  misc_difference 98: note = a, c, g, u, unknown, other, or absent
  misc_difference 99: note = a, c, g, u, unknown, other, or absent
  misc_difference 100: note = a, c, g, u, unknown, other, or absent
  misc_difference 101: note = a, c, g, u, unknown, other, or absent
  misc_difference 102: note = a, c, g, u, unknown, other, or absent
  misc_difference 103: note = a, c, g, u, unknown, other, or absent
  misc_difference 104: note = a, c, g, u, unknown, other, or absent
  misc_difference 105: note = a, c, g, u, unknown, other, or absent
  misc_difference 106: note = a, c, g, u, unknown, other, or absent
  misc_difference 107: note = a, c, g, u, unknown, other, or absent
  misc_difference 108: note = a, c, g, u, unknown, other, or absent
  misc_difference 109: note = a, c, g, u, unknown, other, or absent
  misc_difference 110: note = a, c, g, u, unknown, other, or absent
  misc_difference 111: note = a, c, g, u, unknown, other, or absent
  misc_difference 112: note = a, c, g, u, unknown, other, or absent
  misc_difference 113: note = a, c, g, u, unknown, other, or absent
  misc_difference 114: note = a, c, g, u, unknown, other, or absent
  misc_difference 115: note = a, c, g, u, unknown, other, or absent
  misc_difference 116: note = a, c, g, u, unknown, other, or absent
  misc_difference 117: note = a, c, g, u, unknown, other, or absent
  misc_difference 118: note = a, c, g, u, unknown, other, or absent
  misc_difference 119: note = a, c, g, u, unknown, other, or absent
  misc_difference 120: note = a, c, g, u, unknown, other, or absent
  misc_difference 121: note = a, c, g, u, unknown, other, or absent
  misc_difference 122: note = a, c, g, u, unknown, other, or absent
  misc_difference 123: note = a, c, g, u, unknown, other, or absent
  misc_difference 124: note = a, c, g, u, unknown, other, or absent
  misc_difference 125: note = a, c, g, u, unknown, other, or absent
  misc_difference 126: note = a, c, g, u, unknown, other, or absent
  misc_difference 127: note = a, c, g, u, unknown, other, or absent
  misc_difference 128: note = a, c, g, u, unknown, other, or absent
  misc_difference 129: note = a, c, g, u, unknown, other, or absent
  misc_difference 130: note = a, c, g, u, unknown, other, or absent
  misc_difference 131: note = a, c, g, u, unknown, other, or absent
  misc_difference 132: note = a, c, g, u, unknown, other, or absent
  misc_difference 133: note = a, c, g, u, unknown, other, or absent
  misc_difference 134: note = a, c, g, u, unknown, other, or absent
  misc_difference 135: note = a, c, g, u, unknown, other, or absent
  misc_difference 136: note = a, c, g, u, unknown, other, or absent
  misc_difference 137: note = a, c, g, u, unknown, other, or absent
  misc_difference 138: note = a, c, g, u, unknown, other, or absent
  misc_difference 139: note = a, c, g, u, unknown, other, or absent
  misc_difference 140: note = a, c, g, u, unknown, other, or absent
  misc_difference 141: note = a, c, g, u, unknown, other, or absent
  misc_difference 142: note = a, c, g, u, unknown, other, or absent
  misc_difference 143: note = a, c, g, u, unknown, other, or absent
  misc_difference 144: note = a, c, g, u, unknown, other, or absent
  misc_difference 145: note = a, c, g, u, unknown, other, or absent
  misc_difference 146: note = a, c, g, u, unknown, other, or absent
  misc_difference 147: note = a, c, g, u, unknown, other, or absent
  misc_difference 148: note = a, c, g, u, unknown, other, or absent
  misc_difference 149: note = a, c, g, u, unknown, other, or absent
  misc_difference 150: note = a, c, g, u, unknown, other, or absent
  misc_difference 151: note = a, c, g, u, unknown, other, or absent
  misc_difference 152: note = a, c, g, u, unknown, other, or absent
  misc_difference 153: note = a, c, g, u, unknown, other, or absent
  misc_difference 154: note = a, c, g, u, unknown, other, or absent
  misc_difference 155: note = a, c, g, u, unknown, other, or absent
  misc_difference 156: note = a, c, g, u, unknown, other, or absent
  misc_difference 157: note = a, c, g, u, unknown, other, or absent
  misc_difference 158: note = a, c, g, u, unknown, other, or absent
  misc_difference 159: note = a, c, g, u, unknown, other, or absent
  misc_difference 160: note = a, c, g, u, unknown, other, or absent
  misc_difference 161: note = a, c, g, u, unknown, other, or absent
  misc_difference 162: note = a, c, g, u, unknown, other, or absent
  misc_difference 163: note = a, c, g, u, unknown, other, or absent
  misc_difference 164: note = a, c, g, u, unknown, other, or absent
  misc_difference 165: note = a, c, g, u, unknown, other, or absent
  misc_difference 166: note = a, c, g, u, unknown, other, or absent
  misc_difference 167: note = a, c, g, u, unknown, other, or absent
  misc_difference 168: note = a, c, g, u, unknown, other, or absent
  misc_difference 169: note = a, c, g, u, unknown, other, or absent
  misc_difference 170: note = a, c, g, u, unknown, other, or absent
  misc_difference 171: note = a, c, g, u, unknown, other, or absent
  misc_difference 172: note = a, c, g, u, unknown, other, or absent
  misc_difference 173: note = a, c, g, u, unknown, other, or absent
  misc_difference 174: note = a, c, g, u, unknown, other, or absent
  misc_difference 175: note = a, c, g, u, unknown, other, or absent
  misc_difference 176: note = a, c, g, u, unknown, other, or absent
  misc_difference 177: note = a, c, g, u, unknown, other, or absent
  misc_difference 178: note = a, c, g, u, unknown, other, or absent
  misc_difference 179: note = a, c, g, u, unknown, other, or absent
  misc_difference 180: note = a, c, g, u, unknown, other, or absent
  misc_difference 181: note = a, c, g, u, unknown, other, or absent
  misc_difference 182: note = a, c, g, u, unknown, other, or absent
  misc_difference 183: note = a, c, g, u, unknown, other, or absent
  misc_difference 184: note = a, c, g, u, unknown, other, or absent
  misc_difference 185: note = a, c, g, u, unknown, other, or absent
  misc_difference 186: note = a, c, g, u, unknown, other, or absent
  misc_difference 187: note = a, c, g, u, unknown, other, or absent
  misc_difference 188: note = a, c, g, u, unknown, other, or absent
  misc_difference 189: note = a, c, g, u, unknown, other, or absent
  misc_difference 190: note = a, c, g, u, unknown, other, or absent
  misc_difference 191: note = a, c, g, u, unknown, other, or absent
  misc_difference 192: note = a, c, g, u, unknown, other, or absent
  misc_difference 193: note = a, c, g, u, unknown, other, or absent
  misc_difference 194: note = a, c, g, u, unknown, other, or absent
  misc_difference 195: note = a, c, g, u, unknown, other, or absent
  misc_difference 196: note = a, c, g, u, unknown, other, or absent
  misc_difference 197: note = a, c, g, u, unknown, other, or absent
  misc_difference 198: note = a, c, g, u, unknown, other, or absent
  misc_difference 199: note = a, c, g, u, unknown, other, or absent
  misc_difference 200: note = a, c, g, u, unknown, other, or absent
  misc_difference 201: note = a, c, g, u, unknown, other, or absent
  misc_difference 202: note = a, c, g, u, unknown, other, or absent
  misc_difference 203: note = a, c, g, u, unknown, other, or absent
  misc_difference 204: note = a, c, g, u, unknown, other, or absent
  misc_difference 205: note = a, c, g, u, unknown, other, or absent
  misc_difference 206: note = a, c, g, u, unknown, other, or absent
  misc_difference 207: note = a, c, g, u, unknown, other, or absent
  misc_difference 208: note = a, c, g, u, unknown, other, or absent
  misc_difference 209: note = a, c, g, u, unknown, other, or absent
  misc_difference 210: note = a, c, g, u, unknown, other, or absent
  misc_difference 211: note = a, c, g, u, unknown, other, or absent
  misc_difference 212: note = a, c, g, u, unknown, other, or absent
  misc_difference 213: note = a, c, g, u, unknown, other, or absent
  misc_difference 214: note = a, c, g, u, unknown, other, or absent
  misc_difference 215: note = a, c, g, u, unknown, other, or absent
  misc_difference 216: note = a, c, g, u, unknown, other, or absent
  misc_difference 217: note = a, c, g, u, unknown, other, or absent
  misc_difference 218: note = a, c, g, u, unknown, other, or absent
  misc_difference 219: note = a, c, g, u, unknown, other, or absent
  misc_difference 220: note = a, c, g, u, unknown, other, or absent
  misc_difference 221: note = a, c, g, u, unknown, other, or absent
  misc_difference 222: note = a, c, g, u, unknown, other, or absent
  misc_difference 223: note = a, c, g, u, unknown, other, or absent
  misc_difference 224: note = a, c, g, u, unknown, other, or absent
  misc_difference 225: note = a, c, g, u, unknown, other, or absent
  misc_difference 226: note = a, c, g, u, unknown, other, or absent
  misc_difference 227: note = a, c, g, u, unknown, other, or absent
  misc_difference 228: note = a, c, g, u, unknown, other, or absent
  misc_difference 229: note = a, c, g, u, unknown, other, or absent
  misc_difference 230: note = a, c, g, u, unknown, other, or absent
  misc_difference 231: note = a, c, g, u, unknown, other, or absent
  misc_difference 232: note = a, c, g, u, unknown, other, or absent
  misc_difference 233: note = a, c, g, u, unknown, other, or absent
  misc_difference 234: note = a, c, g, u, unknown, other, or absent
  misc_difference 235: note = a, c, g, u, unknown, other, or absent
  misc_difference 236: note = a, c, g, u, unknown, other, or absent
  misc_difference 237: note = a, c, g, u, unknown, other, or absent
  misc_difference 238: note = a, c, g, u, unknown, other, or absent
  misc_difference 239: note = a, c, g, u, unknown, other, or absent
  misc_difference 240: note = a, c, g, u, unknown, other, or absent
  misc_difference 241: note = a, c, g, u, unknown, other, or absent
  misc_difference 242: note = a, c, g, u, unknown, other, or absent
  misc_difference 243: note = a, c, g, u, unknown, other, or absent
  misc_difference 244: note = a, c, g, u, unknown, other, or absent
  misc_difference 245: note = a, c, g, u, unknown, other, or absent
  misc_difference 246: note = a, c, g, u, unknown, other, or absent
  misc_difference 247: note = a, c, g, u, unknown, other, or absent
  misc_difference 248: note = a, c, g, u, unknown, other, or absent
  misc_difference 249: note = a, c, g, u, unknown, other, or absent
  misc_difference 250: note = a, c, g, u, unknown, other, or absent
  misc_difference 251: note = a, c, g, u, unknown, other, or absent
  misc_difference 252: note = a, c, g, u, unknown, other, or absent
  misc_difference 253: note = a, c, g, u, unknown, other, or absent
  misc_difference 254: note = a, c, g, u, unknown, other, or absent
  misc_difference 255: note = a, c, g, u, unknown, other, or absent
  misc_difference 256: note = a, c, g, u, unknown, other, or absent
  misc_difference 257: note = a, c, g, u, unknown, other, or absent
  misc_difference 258: note = a, c, g, u, unknown, other, or absent
  misc_difference 259: note = a, c, g, u, unknown, other, or absent
  misc_difference 260: note = a, c, g, u, unknown, other, or absent
  misc_difference 261: note = a, c, g, u, unknown, other, or absent
  misc_difference 262: note = a, c, g, u, unknown, other, or absent
  misc_difference 263: note = a, c, g, u, unknown, other, or absent
  misc_difference 264: note = a, c, g, u, unknown, other, or absent
  misc_difference 265: note = a, c, g, u, unknown, other, or absent
  misc_difference 266: note = a, c, g, u, unknown, other, or absent
  misc_difference 267: note = a, c, g, u, unknown, other, or absent
  misc_difference 268: note = a, c, g, u, unknown, other, or absent
  misc_difference 269: note = a, c, g, u, unknown, other, or absent
  misc_difference 270: note = a, c, g, u, unknown, other, or absent
  misc_difference 271: note = a, c, g, u, unknown, other, or absent
  misc_difference 272: note = a, c, g, u, unknown, other, or absent
  misc_difference 273: note = a, c, g, u, unknown, other, or absent
  misc_difference 274: note = a, c, g, u, unknown, other, or absent
  misc_difference 275: note = a, c, g, u, unknown, other, or absent
  misc_difference 276: note = a, c, g, u, unknown, other, or absent
  misc_difference 277: note = a, c, g, u, unknown, other, or absent
  misc_difference 278: note = a, c, g, u, unknown, other, or absent
  misc_difference 279: note = a, c, g, u, unknown, other, or absent
  misc_difference 280: note = a, c, g, u, unknown, other, or absent
  misc_difference 281: note = a, c, g, u, unknown, other, or absent
  misc_difference 282: note = a, c, g, u, unknown, other, or absent
  misc_difference 283: note = a, c, g, u, unknown, other, or absent
  misc_difference 284: note = a, c, g, u, unknown, other, or absent
  misc_difference 285: note = a, c, g, u, unknown, other, or absent
  misc_difference 286: note = a, c, g, u, unknown, other, or absent
  misc_difference 287: note = a, c, g, u, unknown, other, or absent
  misc_difference 288: note = a, c, g, u, unknown, other, or absent
  misc_difference 289: note = a, c, g, u, unknown, other, or absent
  misc_difference 290: note = a, c, g, u, unknown, other, or absent
  misc_difference 291: note = a, c, g, u, unknown, other, or absent
  misc_difference 292: note = a, c, g, u, unknown, other, or absent
  misc_difference 293: note = a, c, g, u, unknown, other, or absent
  misc_difference 294: note = a, c, g, u, unknown, other, or absent
  misc_difference 295: note = a, c, g, u, unknown, other, or absent
  misc_difference 296: note = a, c, g, u, unknown, other, or absent
  misc_difference 297: note = a, c, g, u, unknown, other, or absent
  misc_difference 298: note = a, c, g, u, unknown, other, or absent
  misc_difference 299: note = a, c, g, u, unknown, other, or absent
  misc_difference 300: note = a, c, g, u, unknown, other, or absent
  misc_difference 301: note = a, c, g, u, unknown, other, or absent
  misc_difference 302: note = a, c, g, u, unknown, other, or absent
  misc_difference 303: note = a, c, g, u, unknown, other, or absent
  misc_difference 304: note = a, c, g, u, unknown, other, or absent
  misc_difference 305: note = a, c, g, u, unknown, other, or absent
  misc_difference 306: note = a, c, g, u, unknown, other, or absent
  misc_difference 307: note = a, c, g, u, unknown, other, or absent
  misc_difference 308: note = a, c, g, u, unknown, other, or absent
  misc_difference 309: note = a, c, g, u, unknown, other, or absent
  misc_difference 310: note = a, c, g, u, unknown, other, or absent
  misc_difference 311: note = a, c, g, u, unknown, other, or absent
  misc_difference 312: note = a, c, g, u, unknown, other, or absent
  misc_difference 313: note = a, c, g, u, unknown, other, or absent
  misc_difference 314: note = a, c, g, u, unknown, other, or absent
  misc_difference 315: note = a, c, g, u, unknown, other, or absent
  misc_difference 316: note = a, c, g, u, unknown, other, or absent
  misc_difference 317: note = a, c, g, u, unknown, other, or absent
  misc_difference 318: note = a, c, g, u, unknown, other, or absent
  misc_difference 319: note = a, c, g, u, unknown, other, or absent
  misc_difference 320: note = a, c, g, u, unknown, other, or absent
  misc_difference 321: note = May be absent
  misc_difference 322: note = May be absent
  misc_difference 323: note = May be absent
  misc_difference 324: note = May be absent
  misc_difference 325: note = May be absent
  misc_difference 326: note = May be absent
  misc_difference 327: note = May be absent
  misc_difference 328: note = a, c, g, u, unknown, other, or absent
  misc_difference 329: note = May be absent
  misc_difference 330: note = May be absent
  misc_difference 331: note = a, c, g, u, unknown, other, or absent
  misc_difference 332: note = a, c, g, u, unknown, other, or absent
  misc_difference 333: note = a, c, g, u, unknown, other, or absent
  misc_difference 334: note = a, c, g, u, unknown, other, or absent
  misc_difference 335: note = May be absent
  misc_difference 336: note = a, c, g, u, unknown, other, or absent
  misc_difference 337: note = a, c, g, u, unknown, other, or absent
  misc_difference 338: note = a, c, g, u, unknown, other, or absent
  misc_difference 339: note = May be absent
  misc_difference 340: note = May be absent
  misc_difference 341: note = May be absent
  misc_difference 342: note = May be absent
  misc_difference 41..312: note = This region may encompass 1-271 nucleotides
sksnnndtvgbbyagnyygbnyyrdvvynnnnnnhtnggrnnnnnnnnnnnnnnnnnnnnnnnnnnnnnnnnnnnnnnnnnnnnnnnnnnnnnnnnnnnnnnnnnnnnnnnnnnnnnnnnnnnnnnnnnnnnnnnnnnnnnnnnnnnnnnnnnnnnnnnnnnnnnnnnnnnnnnnnnnnnnnnnnnnnnnnnnnnnnnnnnnnnnnnnnnnnnnnnnnnnnnnnnnnnnnnnnnnnnnnnnnnnnnnnnnnnnnnnnnnnnnnnnnnnnnnnnnnnnnnnnnnnnnnnnnnnnnnnnnnnnnnnnnnnnnnnnnnnnnnndgttcranycnnnnhnnnbmsm

SEQ ID NO: 605 - RNA, 338 nt, synthetic construct
  source 1..338: mol_type = other RNA
  misc_difference 1: note = May be absent
  misc_difference 2: note = May be absent
  misc_difference 3: note = May be absent
  misc_difference 4: note = May be absent
  misc_difference 5: note = May be absent
  misc_difference 6: note = May be absent
  misc_difference 7: note = May be absent
  misc_difference 8: note = May be absent
  misc_difference 9: note = May be absent
  misc_difference 10: note = May be absent
  misc_difference 11: note = May be absent
  misc_difference 12: note = May be absent
  misc_difference 13: note = May be absent
  misc_difference 14: note = May be absent
  misc_difference 15: note = May be absent
  misc_difference 16: note = May be absent
  misc_difference 17: note = May be absent
  misc_difference 18: note = May be absent
  misc_difference 19: note = May be absent
  misc_difference 20: note = May be absent
  misc_difference 21: note = May be absent
  misc_difference 22: note = May be absent
  misc_difference 23: note = May be absent
  misc_difference 24: note = May be absent
  misc_difference 25: note = May be absent
  misc_difference 26: note = May be absent
  misc_difference 27: note = May be absent
  misc_difference 28: note = May be absent
  misc_difference 29: note = May be absent
  misc_difference 30: note = May be absent
  misc_difference 31: note = May be absent
  misc_difference 32: note = May be absent
  misc_difference 33: note = May be absent
  misc_difference 34: note = May be absent
  misc_difference 35: note = May be absent
  misc_difference 36: note = May be absent
  misc_difference 37: note = May be absent
  misc_difference 38: note = May be absent
  misc_difference 39: note = a, c, g, u, unknown, other, or absent
  misc_difference 40: note = May be absent
  misc_difference 41: note = May be absent
  misc_difference 42: note = May be absent
  misc_difference 43: note = a, c, g, u, unknown, other, or absent
  misc_difference 44: note = a, c, g, u, unknown, other, or absent
  misc_difference 45: note = a, c, g, u, unknown, other, or absent
  misc_difference 46: note = a, c, g, u, unknown, other, or absent
  misc_difference 47: note = a, c, g, u, unknown, other, or absent
  misc_difference 48: note = a, c, g, u, unknown, other, or absent
  misc_difference 49: note = a, c, g, u, unknown, other, or absent
  misc_difference 50: note = a, c, g, u, unknown, other, or absent
  misc_difference 51: note = a, c, g, u, unknown, other, or absent
  misc_difference 52: note = a, c, g, u, unknown, other, or absent
  misc_difference 53: note = a, c, g, u, unknown, other, or absent
  misc_difference 54: note = a, c, g, u, unknown, other, or absent
  misc_difference 55: note = a, c, g, u, unknown, other, or absent
  misc_difference 56: note = a, c, g, u, unknown, other, or absent
  misc_difference 57: note = a, c, g, u, unknown, other, or absent
  misc_difference 58: note = a, c, g, u, unknown, other, or absent
  misc_difference 59: note = a, c, g, u, unknown, other, or absent
  misc_difference 60: note = a, c, g, u, unknown, other, or absent
  misc_difference 61: note = a, c, g, u, unknown, other, or absent
  misc_difference 62: note = a, c, g, u, unknown, other, or absent
  misc_difference 63: note = a, c, g, u, unknown, other, or absent
  misc_difference 64: note = a, c, g, u, unknown, other, or absent
  misc_difference 65: note = a, c, g, u, unknown, other, or absent
  misc_difference 66: note = a, c, g, u, unknown, other, or absent
  misc_difference 67: note = a, c, g, u, unknown, other, or absent
  misc_difference 68: note = a, c, g, u, unknown, other, or absent
  misc_difference 69: note = a, c, g, u, unknown, other, or absent
  misc_difference 70: note = a, c, g, u, unknown, other, or absent
  misc_difference 71: note = a, c, g, u, unknown, other, or absent
  misc_difference 72: note = a, c, g, u, unknown, other, or absent
  misc_difference 73: note = a, c, g, u, unknown, other, or absent
  misc_difference 74: note = a, c, g, u, unknown, other, or absent
  misc_difference 75: note = a, c, g, u, unknown, other, or absent
  misc_difference 76: note = a, c, g, u, unknown, other, or absent
  misc_difference 77: note = a, c, g, u, unknown, other, or absent
  misc_difference 78: note = a, c, g, u, unknown, other, or absent
  misc_difference 79: note = a, c, g, u, unknown, other, or absent
  misc_difference 80: note = a, c, g, u, unknown, other, or absent
  misc_difference 81: note = a, c, g, u, unknown, other, or absent
  misc_difference 82: note = a, c, g, u, unknown, other, or absent
  misc_difference 83: note = a, c, g, u, unknown, other, or absent
  misc_difference 84: note = a, c, g, u, unknown, other, or absent
  misc_difference 85: note = a, c, g, u, unknown, other, or absent
  misc_difference 86: note = a, c, g, u, unknown, other, or absent
  misc_difference 87: note = a, c, g, u, unknown, other, or absent
  misc_difference 88: note = a, c, g, u, unknown, other, or absent
  misc_difference 89: note = a, c, g, u, unknown, other, or absent
  misc_difference 90: note = a, c, g, u, unknown, other, or absent
  misc_difference 91: note = a, c, g, u, unknown, other, or absent
  misc_difference 92: note = a, c, g, u, unknown, other, or absent
  misc_difference 93: note = a, c, g, u, unknown, other, or absent
  misc_difference 94: note = a, c, g, u, unknown, other, or absent
  misc_difference 95: note = a, c, g, u, unknown, other, or absent
  misc_difference 96: note = a, c, g, u, unknown, other, or absent
  misc_difference 97: note = a, c, g, u, unknown, other, or absent
  misc_difference 98: note = a, c, g, u, unknown, other, or absent
  misc_difference 99: note = a, c, g, u, unknown, other, or absent
  misc_difference 100: note = a, c, g, u, unknown, other, or absent
  misc_difference 101: note = a, c, g, u, unknown, other, or absent
  misc_difference 102: note = a, c, g, u, unknown, other, or absent
  misc_difference 103: note = a, c, g, u, unknown, other, or absent
  misc_difference 104: note = a, c, g, u, unknown, other, or absent
  misc_difference 105: note = a, c, g, u, unknown, other, or absent
  misc_difference 106: note = a, c, g, u, unknown, other, or absent
  misc_difference 107: note = a, c, g, u, unknown, other, or absent
  misc_difference 108: note = a, c, g, u, unknown, other, or absent
  misc_difference 109: note = a, c, g, u, unknown, other, or absent
  misc_difference 110: note = a, c, g, u, unknown, other, or absent
  misc_difference 111: note = a, c, g, u, unknown, other, or absent
  misc_difference 112: note = a, c, g, u, unknown, other, or absent
  misc_difference 113: note = a, c, g, u, unknown, other, or absent
  misc_difference 114: note = a, c, g, u, unknown, other, or absent
  misc_difference 115: note = a, c, g, u, unknown, other, or absent
  misc_difference 116: note = a, c, g, u, unknown, other, or absent
  misc_difference 117: note = a, c, g, u, unknown, other, or absent
  misc_difference 118: note = a, c, g, u, unknown, other, or absent
  misc_difference 119: note = a, c, g, u, unknown, other, or absent
  misc_difference 120: note = a, c, g, u, unknown, other, or absent
  misc_difference 121: note = a, c, g, u, unknown, other, or absent
  misc_difference 122: note = a, c, g, u, unknown, other, or absent
  misc_difference 123: note = a, c, g, u, unknown, other, or absent
  misc_difference 124: note = a, c, g, u, unknown, other, or absent
  misc_difference 125: note = a, c, g, u, unknown, other, or absent
  misc_difference 126: note = a, c, g, u, unknown, other, or absent
  misc_difference 127: note = a, c, g, u, unknown, other, or absent
  misc_difference 128: note = a, c, g, u, unknown, other, or absent
  misc_difference 129: note = a, c, g, u, unknown, other, or absent
  misc_difference 130: note = a, c, g, u, unknown, other, or absent
  misc_difference 131: note = a, c, g, u, unknown, other, or absent
  misc_difference 132: note = a, c, g, u, unknown, other, or absent
  misc_difference 133: note = a, c, g, u, unknown, other, or absent
  misc_difference 134: note = a, c, g, u, unknown, other, or absent
  misc_difference 135: note = a, c, g, u, unknown, other, or absent
  misc_difference 136: note = a, c, g, u, unknown, other, or absent
  misc_difference 137: note = a, c, g, u, unknown, other, or absent
  misc_difference 138: note = a, c, g, u, unknown, other, or absent
  misc_difference 139: note = a, c, g, u, unknown, other, or absent
  misc_difference 140: note = a, c, g, u, unknown, other, or absent
  misc_difference 141: note = a, c, g, u, unknown, other, or absent
  misc_difference 142: note = a, c, g, u, unknown, other, or absent
  misc_difference 143: note = a, c, g, u, unknown, other, or absent
  misc_difference 144: note = a, c, g, u, unknown, other, or absent
  misc_difference 145: note = a, c, g, u, unknown, other, or absent
  misc_difference 146: note = a, c, g, u, unknown, other, or absent
  misc_difference 147: note = a, c, g, u, unknown, other, or absent
  misc_difference 148: note = a, c, g, u, unknown, other, or absent
  misc_difference 149: note = a, c, g, u, unknown, other, or absent
  misc_difference 150: note = a, c, g, u, unknown, other, or absent
  misc_difference 151: note = a, c, g, u, unknown, other, or absent
  misc_difference 152: note = a, c, g, u, unknown, other, or absent
  misc_difference 153: note = a, c, g, u, unknown, other, or absent
  misc_difference 154: note = a, c, g, u, unknown, other, or absent
  misc_difference 155: note = a, c, g, u, unknown, other, or absent
  misc_difference 156: note = a, c, g, u, unknown, other, or absent
  misc_difference 157: note = a, c, g, u, unknown, other, or absent
  misc_difference 158: note = a, c, g, u, unknown, other, or absent
  misc_difference 159: note = a, c, g, u, unknown, other, or absent
  misc_difference 160: note = a, c, g, u, unknown, other, or absent
  misc_difference 161: note = a, c, g, u, unknown, other, or absent
  misc_difference 162: note = a, c, g, u, unknown, other, or absent
  misc_difference 163: note = a, c, g, u, unknown, other, or absent
  misc_difference 164: note = a, c, g, u, unknown, other, or absent
  misc_difference 165: note = a, c, g, u, unknown, other, or absent
  misc_difference 166: note = a, c, g, u, unknown, other, or absent
  misc_difference 167: note = a, c, g, u, unknown, other, or absent
  misc_difference 168: note = a, c, g, u, unknown, other, or absent
  misc_difference 169: note = a, c, g, u, unknown, other, or absent
  misc_difference 170: note = a, c, g, u, unknown, other, or absent
  misc_difference 171: note = a, c, g, u, unknown, other, or absent
  misc_difference 172: note = a, c, g, u, unknown, other, or absent
  misc_difference 173: note = a, c, g, u, unknown, other, or absent
  misc_difference 174: note = a, c, g, u, unknown, other, or absent
  misc_difference 175: note = a, c, g, u, unknown, other, or absent
  misc_difference 176: note = a, c, g, u, unknown, other, or absent
  misc_difference 177: note = a, c, g, u, unknown, other, or absent
  misc_difference 178: note = a, c, g, u, unknown, other, or absent
  misc_difference 179: note = a, c, g, u, unknown, other, or absent
  misc_difference 180: note = a, c, g, u, unknown, other, or absent
  misc_difference 181: note = a, c, g, u, unknown, other, or absent
  misc_difference 182: note = a, c, g, u, unknown, other, or absent
  misc_difference 183: note = a, c, g, u, unknown, other, or absent
  misc_difference 184: note = a, c, g, u, unknown, other, or absent
  misc_difference 185: note = a, c, g, u, unknown, other, or absent
  misc_difference 186: note = a, c, g, u, unknown, other, or absent
  misc_difference 187: note = a, c, g, u, unknown, other, or absent
  misc_difference 188: note = a, c, g, u, unknown, other, or absent
  misc_difference 189: note = a, c, g, u, unknown, other, or absent
  misc_difference 190: note = a, c, g, u, unknown, other, or absent
  misc_difference 191: note = a, c, g, u, unknown, other, or absent
  misc_difference 192: note = a, c, g, u, unknown, other, or absent
  misc_difference 193: note = a, c, g, u, unknown, other, or absent
  misc_difference 194: note = a, c, g, u, unknown, other, or absent
  misc_difference 195: note = a, c, g, u, unknown, other, or absent
  misc_difference 196: note = a, c, g, u, unknown, other, or absent
  misc_difference 197: note = a, c, g, u, unknown, other, or absent
  misc_difference 198: note = a, c, g, u, unknown, other, or absent
  misc_difference 199: note = a, c, g, u, unknown, other, or absent
  misc_difference 200: note = a, c, g, u, unknown, other, or absent
  misc_difference 201: note = a, c, g, u, unknown, other, or absent
  misc_difference 202: note = a, c, g, u, unknown, other, or absent
  misc_difference 203: note = a, c, g, u, unknown, other, or absent
  misc_difference 204: note = a, c, g, u, unknown, other, or absent
  misc_difference 205: note = a, c, g, u, unknown, other, or absent
  misc_difference 206: note = a, c, g, u, unknown, other, or absent
  misc_difference 207: note = a, c, g, u, unknown, other, or absent
  misc_difference 208: note = a, c, g, u, unknown, other, or absent
  misc_difference 209: note = a, c, g, u, unknown, other, or absent
  misc_difference 210: note = a, c, g, u, unknown, other, or absent
  misc_difference 211: note = a, c, g, u, unknown, other, or absent
  misc_difference 212: note = a, c, g, u, unknown, other, or absent
  misc_difference 213: note = a, c, g, u, unknown, other, or absent
  misc_difference 214: note = a, c, g, u, unknown, other, or absent
  misc_difference 215: note = a, c, g, u, unknown, other, or absent
  misc_difference 216: note = a, c, g, u, unknown, other, or absent
  misc_difference 217: note = a, c, g, u, unknown, other, or absent
  misc_difference 218: note = a, c, g, u, unknown, other, or absent
  misc_difference 219: note = a, c, g, u, unknown, other, or absent
  misc_difference 220: note = a, c, g, u, unknown, other, or absent
  misc_difference 221: note = a, c, g, u, unknown, other, or absent
  misc_difference 222: note = a, c, g, u, unknown, other, or absent
  misc_difference 223: note = a, c, g, u, unknown, other, or absent
  misc_difference 224: note = a, c, g, u, unknown, other, or absent
  misc_difference 225: note = a, c, g, u, unknown, other, or absent
  misc_difference 226: note = a, c, g, u, unknown, other, or absent
  misc_difference 227: note = a, c, g, u, unknown, other, or absent
  misc_difference 228: note = a, c, g, u, unknown, other, or absent
  misc_difference 229: note = a, c, g, u, unknown, other, or absent
  misc_difference 230: note = a, c, g, u, unknown, other, or absent
  misc_difference 231: note = a, c, g, u, unknown, other, or absent
  misc_difference 232: note = a, c, g, u, unknown, other, or absent
  misc_difference 233: note = a, c, g, u, unknown, other, or absent
  misc_difference 234: note = a, c, g, u, unknown, other, or absent
  misc_difference 235: note = a, c, g, u, unknown, other, or absent
  misc_difference 236: note = a, c, g, u, unknown, other, or absent
  misc_difference 237: note = a, c, g, u, unknown, other, or absent
  misc_difference 238: note = a, c, g, u, unknown, other, or absent
  misc_difference 239: note = a, c, g, u, unknown, other, or absent
  misc_difference 240: note = a, c, g, u, unknown, other, or absent
  misc_difference 241: note = a, c, g, u, unknown, other, or absent
  misc_difference 242: note = a, c, g, u, unknown, other, or absent
  misc_difference 243: note = a, c, g, u, unknown, other, or absent
  misc_difference 244: note = a, c, g, u, unknown, other, or absent
  misc_difference 245: note = a, c, g, u, unknown, other, or absent
  misc_difference 246: note = a, c, g, u, unknown, other, or absent
  misc_difference 247: note = a, c, g, u, unknown, other, or absent
  misc_difference 248: note = a, c, g, u, unknown, other, or absent
  misc_difference 249: note = a, c, g, u, unknown, other, or absent
  misc_difference 250: note = a, c, g, u, unknown, other, or absent
  misc_difference 251: note = a, c, g, u, unknown, other, or absent
  misc_difference 252: note = a, c, g, u, unknown, other, or absent
  misc_difference 253: note = a, c, g, u, unknown, other, or absent
  misc_difference 254: note = a, c, g, u, unknown, other, or absent
  misc_difference 255: note = a, c, g, u, unknown, other, or absent
  misc_difference 256: note = a, c, g, u, unknown, other, or absent
  misc_difference 257: note = a, c, g, u, unknown, other, or absent
  misc_difference 258: note = a, c, g, u, unknown, other, or absent
  misc_difference 259: note = a, c, g, u, unknown, other, or absent
  misc_difference 260: note = a, c, g, u, unknown, other, or absent
  misc_difference 261: note = a, c, g, u, unknown, other, or absent
  misc_difference 262: note = a, c, g, u, unknown, other, or absent
  misc_difference 263: note = a, c, g, u, unknown, other, or absent
  misc_difference 264: note = a, c, g, u, unknown, other, or absent
  misc_difference 265: note = a, c, g, u, unknown, other, or absent
  misc_difference 266: note = a, c, g, u, unknown, other, or absent
  misc_difference 267: note = a, c, g, u, unknown, other, or absent
  misc_difference 268: note = a, c, g, u, unknown, other, or absent
  misc_difference 269: note = a, c, g, u, unknown, other, or absent
  misc_difference 270: note = a, c, g, u, unknown, other, or absent
  misc_difference 271: note = a, c, g, u, unknown, other, or absent
  misc_difference 272: note = a, c, g, u, unknown, other, or absent
  misc_difference 273: note = a, c, g, u, unknown, other, or absent
  misc_difference 274: note = a, c, g, u, unknown, other, or absent
  misc_difference 275: note = a, c, g, u, unknown, other, or absent
  misc_difference 276: note = a, c, g, u, unknown, other, or absent
  misc_difference 277: note = a, c, g, u, unknown, other, or absent
  misc_difference 278: note = a, c, g, u, unknown, other, or absent
  misc_difference 279: note = a, c, g, u, unknown, other, or absent
  misc_difference 280: note = a, c, g, u, unknown, other, or absent
  misc_difference 281: note = a, c, g, u, unknown, other, or absent
  misc_difference 282: note = a, c, g, u, unknown, other, or absent
  misc_difference 283: note = a, c, g, u, unknown, other, or absent
  misc_difference 284: note = a, c, g, u, unknown, other, or absent
  misc_difference 285: note = a, c, g, u, unknown, other, or absent
  misc_difference 286: note = a, c, g, u, unknown, other, or absent
  misc_difference 287: note = a, c, g, u, unknown, other, or absent
  misc_difference 288: note = a, c, g, u, unknown, other, or absent
  misc_difference 289: note = a, c, g, u, unknown, other, or absent
  misc_difference 290: note = a, c, g, u, unknown, other, or absent
  misc_difference 291: note = a, c, g, u, unknown, other, or absent
  misc_difference 292: note = a, c, g, u, unknown, other, or absent
  misc_difference 293: note = a, c, g, u, unknown, other, or absent
  misc_difference 294: note = a, c, g, u, unknown, other, or absent
  misc_difference 295: note = a, c, g, u, unknown, other, or absent
  misc_difference 296: note = a, c, g, u, unknown, other, or absent
  misc_difference 297: note = a, c, g, u, unknown, other, or absent
  misc_difference 298: note = a, c, g, u, unknown, other, or absent
  misc_difference 299: note = a, c, g, u, unknown, other, or absent
  misc_difference 300: note = a, c, g, u, unknown, other, or absent
  misc_difference 301: note = a, c, g, u, unknown, other, or absent
  misc_difference 302: note = a, c, g, u, unknown, other, or absent
  misc_difference 303: note = a, c, g, u, unknown, other, or absent
  misc_difference 304: note = a, c, g, u, unknown, other, or absent
  misc_difference 305: note = a, c, g, u, unknown, other, or absent
  misc_difference 306: note = a, c, g, u, unknown, other, or absent
  misc_difference 307: note = a, c, g, u, unknown, other, or absent
  misc_difference 308: note = a, c, g, u, unknown, other, or absent
  misc_difference 309: note = a, c, g, u, unknown, other, or absent
  misc_difference 310: note = a, c, g, u, unknown, other, or absent
  misc_difference 311: note = a, c, g, u, unknown, other, or absent
  misc_difference 312: note = a, c, g, u, unknown, other, or absent
  misc_difference 313: note = a, c, g, u, unknown, other, or absent
  misc_difference 314: note = May be absent
  misc_difference 315: note = May be absent
  misc_difference 316: note = May be absent
  misc_difference 317: note = May be absent
  misc_difference 318: note = May be absent
  misc_difference 319: note = May be absent
  misc_difference 320: note = May be absent
  misc_difference 321: note = May be absent
  misc_difference 322: note = May be absent
  misc_difference 323: note = May be absent
  misc_difference 324: note = May be absent
  misc_difference 325: note = May be absent
  misc_difference 326: note = May be absent
  misc_difference 327: note = May be absent
  misc_difference 328: note = May be absent
  misc_difference 329: note = May be absent
  misc_difference 330: note = May be absent
  misc_difference 331: note = May be absent
  misc_difference 332: note = May be absent
  misc_difference 333: note = May be absent
  misc_difference 334: note = May be absent
  misc_difference 335: note = May be absent
  misc_difference 336: note = May be absent
  misc_difference 337: note = May be absent
  misc_difference 338: note = May be absent
  misc_difference 43..314: note = This region may encompass 1-271 nucleotides
ggctsgttggkctagkgbtrtgrttctcrsythggrysnragnnnnnnnnnnnnnnnnnnnnnnnnnnnnnnnnnnnnnnnnnnnnnnnnnnnnnnnnnnnnnnnnnnnnnnnnnnnnnnnnnnnnnnnnnnnnnnnnnnnnnnnnnnnnnnnnnnnnnnnnnnnnnnnnnnnnnnnnnnnnnnnnnnnnnnnnnnnnnnnnnnnnnnnnnnnnnnnnnnnnnnnnnnnnnnnnnnnnnnnnnnnnnnnnnnnnnnnnnnnnnnnnnnnnnnnnnnnnnnnnnnnnnnnnnnnnnnnnnnnnnnnnnnnnnnncygggttcaaatcvyrgasgagccc

SEQ ID NO: 606 - RNA, 338 nt, synthetic construct
  source 1..338: mol_type = other RNA
  misc_difference 1: note = May be absent
  misc_difference 2: note = May be absent
  misc_difference 3: note = May be absent
  misc_difference 4: note = May be absent
  misc_difference 5: note = May be absent
  misc_difference 6: note = May be absent
  misc_difference 7: note = May be absent
  misc_difference 8: note = May be absent
  misc_difference 9: note = May be absent
  misc_difference 10: note = May be absent
  misc_difference 11: note = May be absent
  misc_difference 12: note = May be absent
  misc_difference 13: note = May be absent
  misc_difference 14: note = May be absent
  misc_difference 15: note = May be absent
  misc_difference 16: note = May be absent
  misc_difference 17: note = May be absent
  misc_difference 18: note = May be absent
  misc_difference 19: note = May be absent
  misc_difference 20: note = May be absent
  misc_difference 21: note = May be absent
  misc_difference 22: note = May be absent
  misc_difference 23: note = May be absent
  misc_difference 24: note = May be absent
  misc_difference 25: note = May be absent
  misc_difference 26: note = May be absent
  misc_difference 27: note = May be absent
  misc_difference 28: note = May be absent
  misc_difference 29: note = May be absent
  misc_difference 30: note = May be absent
  misc_difference 31: note = May be absent
  misc_difference 32: note = May be absent
  misc_difference 33: note = May be absent
  misc_difference 34: note = May be absent
  misc_difference 35: note = May be absent
  misc_difference 36: note = May be absent
  misc_difference 37: note = May be absent
  misc_difference 38: note = May be absent
  misc_difference 39: note = May be absent
  misc_difference 40: note = May be absent
  misc_difference 41: note = May be absent
  misc_difference 42: note = May be absent
  misc_difference 43: note = a, c, g, u, unknown, other, or absent
  misc_difference 44: note = a, c, g, u, unknown, other, or absent
  misc_difference 45: note = a, c, g, u, unknown, other, or absent
  misc_difference 46: note = a, c, g, u, unknown, other, or absent
  misc_difference 47: note = a, c, g, u, unknown, other, or absent
  misc_difference 48: note = a, c, g, u, unknown, other, or absent
  misc_difference 49: note = a, c, g, u, unknown, other, or absent
  misc_difference 50: note = a, c, g, u, unknown, other, or absent
  misc_difference 51: note = a, c, g, u, unknown, other, or absent
  misc_difference 52: note = a, c, g, u, unknown, other, or absent
  misc_difference 53: note = a, c, g, u, unknown, other, or absent
  misc_difference 54: note = a, c, g, u, unknown, other, or absent
  misc_difference 55: note = a, c, g, u, unknown, other, or absent
  misc_difference 56: note = a, c, g, u, unknown, other, or absent
  misc_difference 57: note = a, c, g, u, unknown, other, or absent
  misc_difference 58: note = a, c, g, u, unknown, other, or absent
  misc_difference 59: note = a, c, g, u, unknown, other, or absent
  misc_difference 60: note = a, c, g, u, unknown, other, or absent
  misc_difference 61: note = a, c, g, u, unknown, other, or absent
  misc_difference 62: note = a, c, g, u, unknown, other, or absent
  misc_difference 63: note = a, c, g, u, unknown, other, or absent
  misc_difference 64: note = a, c, g, u, unknown, other, or absent
  misc_difference 65: note = a, c, g, u, unknown, other, or absent
  misc_difference 66: note = a, c, g, u, unknown, other, or absent
  misc_difference 67: note = a, c, g, u, unknown, other, or absent
  misc_difference 68: note = a, c, g, u, unknown, other, or absent
  misc_difference 69: note = a, c, g, u, unknown, other, or absent
  misc_difference 70: note = a, c, g, u, unknown, other, or absent
  misc_difference 71: note = a, c, g, u, unknown, other, or absent
  misc_difference 72: note = a, c, g, u, unknown, other, or absent
  misc_difference 73: note = a, c, g, u, unknown, other, or absent
  misc_difference 74: note = a, c, g, u, unknown, other, or absent
  misc_difference 75: note = a, c, g, u, unknown, other, or absent
  misc_difference 76: note = a, c, g, u, unknown, other, or absent
  misc_difference 77: note = a, c, g, u, unknown, other, or absent
  misc_difference 78: note = a, c, g, u, unknown, other, or absent
  misc_difference 79: note = a, c, g, u, unknown, other, or absent
  misc_difference 80: note = a, c, g, u, unknown, other, or absent
  misc_difference 81: note = a, c, g, u, unknown, other, or absent
  misc_difference 82: note = a, c, g, u, unknown, other, or absent
  misc_difference 83: note = a, c, g, u, unknown, other, or absent
  misc_difference 84: note = a, c, g, u, unknown, other, or absent
  misc_difference 85: note = a, c, g, u, unknown, other, or absent
  misc_difference 86: note = a, c, g, u, unknown, other, or absent
  misc_difference 87: note = a, c, g, u, unknown, other, or absent
  misc_difference 88: note = a, c, g, u, unknown, other, or absent
  misc_difference 89: note = a, c, g, u, unknown, other, or absent
  misc_difference 90: note = a, c, g, u, unknown, other, or absent
  misc_difference 91: note = a, c, g, u, unknown, other, or absent
  misc_difference 92: note = a, c, g, u, unknown, other, or absent
  misc_difference 93: note = a, c, g, u, unknown, other, or absent
  misc_difference 94: note = a, c, g, u, unknown, other, or absent
  misc_difference 95: note = a, c, g, u, unknown, other, or absent
  misc_difference 96: note = a, c, g, u, unknown, other, or absent
  misc_difference 97: note = a, c, g, u, unknown, other, or absent
  misc_difference 98: note = a, c, g, u, unknown, other, or absent
  misc_difference 99: note = a, c, g, u, unknown, other, or absent
  misc_difference 100: note = a, c, g, u, unknown, other, or absent
  misc_difference 101: note = a, c, g, u, unknown, other, or absent
  misc_difference 102: note = a, c, g, u, unknown, other, or absent
  misc_difference 103: note = a, c, g, u, unknown, other, or absent
  misc_difference 104: note = a, c, g, u, unknown, other, or absent
  misc_difference 105: note = a, c, g, u, unknown, other, or absent
  misc_difference 106: note = a, c, g, u, unknown, other, or absent
  misc_difference 107: note = a, c, g, u, unknown, other, or absent
  misc_difference 108: note = a, c, g, u, unknown, other, or absent
  misc_difference 109: note = a, c, g, u, unknown, other, or absent
  misc_difference 110: note = a, c, g, u, unknown, other, or absent
  misc_difference 111: note = a, c, g, u, unknown, other, or absent
  misc_difference 112: note = a, c, g, u, unknown, other, or absent
  misc_difference 113: note = a, c, g, u, unknown, other, or absent
  misc_difference 114: note = a, c, g, u, unknown, other, or absent
  misc_difference 115: note = a, c, g, u, unknown, other, or absent
  misc_difference 116: note = a, c, g, u, unknown, other, or absent
  misc_difference 117: note = a, c, g, u, unknown, other, or absent
  misc_difference 118: note = a, c, g, u, unknown, other, or absent
  misc_difference 119: note = a, c, g, u, unknown, other, or absent
  misc_difference 120: note = a, c, g, u, unknown, other, or absent
  misc_difference 121: note = a, c, g, u, unknown, other, or absent
  misc_difference 122: note = a, c, g, u, unknown, other, or absent
  misc_difference 123: note = a, c, g, u, unknown, other, or absent
  misc_difference 124: note = a, c, g, u, unknown, other, or absent
  misc_difference 125: note = a, c, g, u, unknown, other, or absent
  misc_difference 126: note = a, c, g, u, unknown, other, or absent
  misc_difference 127: note = a, c, g, u, unknown, other, or absent
  misc_difference 128: note = a, c, g, u, unknown, other, or absent
  misc_difference 129: note = a, c, g, u, unknown, other, or absent
  misc_difference 130: note = a, c, g, u, unknown, other, or absent
  misc_difference 131: note = a, c, g, u, unknown, other, or absent
  misc_difference 132: note = a, c, g, u, unknown, other, or absent
  misc_difference 133: note = a, c, g, u, unknown, other, or absent
  misc_difference 134: note = a, c, g, u, unknown, other, or absent
  misc_difference 135: note = a, c, g, u, unknown, other, or absent
  misc_difference 136: note = a, c, g, u, unknown, other, or absent
  misc_difference 137: note = a, c, g, u, unknown, other, or absent
  misc_difference 138: note = a, c, g, u, unknown, other, or absent
  misc_difference 139: note = a, c, g, u, unknown, other, or absent
  misc_difference 140: note = a, c, g, u, unknown, other, or absent
  misc_difference 141: note = a, c, g, u, unknown, other, or absent
  misc_difference 142: note = a, c, g, u, unknown, other, or absent
  misc_difference 143: note = a, c, g, u, unknown, other, or absent
  misc_difference 144: note = a, c, g, u, unknown, other, or absent
  misc_difference 145: note = a, c, g, u, unknown, other, or absent
  misc_difference 146: note = a, c, g, u, unknown, other, or absent
  misc_difference 147: note = a, c, g, u, unknown, other, or absent
  misc_difference 148: note = a, c, g, u, unknown, other, or absent
  misc_difference 149: note = a, c, g, u, unknown, other, or absent
  misc_difference 150: note = a, c, g, u, unknown, other, or absent
  misc_difference 151: note = a, c, g, u, unknown, other, or absent
  misc_difference 152: note = a, c, g, u, unknown, other, or absent
  misc_difference 153: note = a, c, g, u, unknown, other, or absent
  misc_difference 154: note = a, c, g, u, unknown, other, or absent
  misc_difference 155: note = a, c, g, u, unknown, other, or absent
  misc_difference 156: note = a, c, g, u, unknown, other, or absent
  misc_difference 157: note = a, c, g, u, unknown, other, or absent
  misc_difference 158: note = a, c, g, u, unknown, other, or absent
  misc_difference 159: note = a, c, g, u, unknown, other, or absent
  misc_difference 160: note = a, c, g, u, unknown, other, or absent
  misc_difference 161: note = a, c, g, u, unknown, other, or absent
  misc_difference 162: note = a, c, g, u, unknown, other, or absent
  misc_difference 163: note = a, c, g, u, unknown, other, or absent
  misc_difference 164: note = a, c, g, u, unknown, other, or absent
  misc_difference 165: note = a, c, g, u, unknown, other, or absent
  misc_difference 166: note = a, c, g, u, unknown, other, or absent
  misc_difference 167: note = a, c, g, u, unknown, other, or absent
  misc_difference 168: note = a, c, g, u, unknown, other, or absent
  misc_difference 169: note = a, c, g, u, unknown, other, or absent
  misc_difference 170: note = a, c, g, u, unknown, other, or absent
  misc_difference 171: note = a, c, g, u, unknown, other, or absent
  misc_difference 172: note = a, c, g, u, unknown, other, or absent
  misc_difference 173: note = a, c, g, u, unknown, other, or absent
  misc_difference 174: note = a, c, g, u, unknown, other, or absent
  misc_difference 175: note = a, c, g, u, unknown, other, or absent
  misc_difference 176: note = a, c, g, u, unknown, other, or absent
  misc_difference 177: note = a, c, g, u, unknown, other, or absent
  misc_difference 178: note = a, c, g, u, unknown, other, or absent
  misc_difference 179: note = a, c, g, u, unknown, other, or absent
  misc_difference 180: note = a, c, g, u, unknown, other, or absent
  misc_difference 181: note = a, c, g, u, unknown, other, or absent
  misc_difference 182: note = a, c, g, u, unknown, other, or absent
  misc_difference 183: note = a, c, g, u, unknown, other, or absent
  misc_difference 184: note = a, c, g, u, unknown, other, or absent
  misc_difference 185: note = a, c, g, u, unknown, other, or absent
  misc_difference 186: note = a, c, g, u, unknown, other, or absent
  misc_difference 187: note = a, c, g, u, unknown, other, or absent
  misc_difference 188: note = a, c, g, u, unknown, other, or absent
  misc_difference 189: note = a, c, g, u, unknown, other, or absent
  misc_difference 190: note = a, c, g, u, unknown, other, or absent
  misc_difference 191: note = a, c, g, u, unknown, other, or absent
  misc_difference 192: note = a, c, g, u, unknown, other, or absent
  misc_difference 193: note = a, c, g, u, unknown, other, or absent
  misc_difference 194: note = a, c, g, u, unknown, other, or absent
  misc_difference 195: note = a, c, g, u, unknown, other, or absent
  misc_difference 196: note = a, c, g, u, unknown, other, or absent
  misc_difference 197: note = a, c, g, u, unknown, other, or absent
  misc_difference 198: note = a, c, g, u, unknown, other, or absent
  misc_difference 199: note = a, c, g, u, unknown, other, or absent
  misc_difference 200: note = a, c, g, u, unknown, other, or absent
  misc_difference 201: note = a, c, g, u, unknown, other, or absent
  misc_difference 202: note = a, c, g, u, unknown, other, or absent
  misc_difference 203: note = a, c, g, u, unknown, other, or absent
  misc_difference 204: note = a, c, g, u, unknown, other, or absent
  misc_difference 205: note = a, c, g, u, unknown, other, or absent
  misc_difference 206: note = a, c, g, u, unknown, other, or absent
  misc_difference 207: note = a, c, g, u, unknown, other, or absent
  misc_difference 208: note = a, c, g, u, unknown, other, or absent
  misc_difference 209: note = a, c, g, u, unknown, other, or absent
  misc_difference 210: note = a, c, g, u, unknown, other, or absent
  misc_difference 211: note = a, c, g, u, unknown, other, or absent
  misc_difference 212: note = a, c, g, u, unknown, other, or absent
  misc_difference 213: note = a, c, g, u, unknown, other, or absent
  misc_difference 214: note = a, c, g, u, unknown, other, or absent
  misc_difference 215: note = a, c, g, u, unknown, other, or absent
  misc_difference 216: note = a, c, g, u, unknown, other, or absent
  misc_difference 217: note = a, c, g, u, unknown, other, or absent
  misc_difference 218: note = a, c, g, u, unknown, other, or absent
  misc_difference 219: note = a, c, g, u, unknown, other, or absent
  misc_difference 220: note = a, c, g, u, unknown, other, or absent
  misc_difference 221: note = a, c, g, u, unknown, other, or absent
  misc_difference 222: note = a, c, g, u, unknown, other, or absent
  misc_difference 223: note = a, c, g, u, unknown, other, or absent
  misc_difference 224: note = a, c, g, u, unknown, other, or absent
  misc_difference 225: note = a, c, g, u, unknown, other, or absent
  misc_difference 226: note = a, c, g, u, unknown, other, or absent
  misc_difference 227: note = a, c, g, u, unknown, other, or absent
  misc_difference 228: note = a, c, g, u, unknown, other, or absent
  misc_difference 229: note = a, c, g, u, unknown, other, or absent
  misc_difference 230: note = a, c, g, u, unknown, other, or absent
  misc_difference 231: note = a, c, g, u, unknown, other, or absent
  misc_difference 232: note = a, c, g, u, unknown, other, or absent
  misc_difference 233: note = a, c, g, u, unknown, other, or absent
  misc_difference 234: note = a, c, g, u, unknown, other, or absent
  misc_difference 235: note = a, c, g, u, unknown, other, or absent
  misc_difference 236: note = a, c, g, u, unknown, other, or absent
  misc_difference 237: note = a, c, g, u, unknown, other, or absent
  misc_difference 238: note = a, c, g, u, unknown, other, or absent
  misc_difference 239: note = a, c, g, u, unknown, other, or absent
  misc_difference 240: note = a, c, g, u, unknown, other, or absent
  misc_difference 241: note = a, c, g, u, unknown, other, or absent
  misc_difference 242: note = a, c, g, u, unknown, other, or absent
  misc_difference 243: note = a, c, g, u, unknown, other, or absent
  misc_difference 244: note = a, c, g, u, unknown, other, or absent
  misc_difference 245: note = a, c, g, u, unknown, other, or absent
  misc_difference 246: note = a, c, g, u, unknown, other, or absent
  misc_difference 247: note = a, c, g, u, unknown, other, or absent
  misc_difference 248: note = a, c, g, u, unknown, other, or absent
  misc_difference 249: note = a, c, g, u, unknown, other, or absent
  misc_difference 250: note = a, c, g, u, unknown, other, or absent
  misc_difference 251: note = a, c, g, u, unknown, other, or absent
  misc_difference 252: note = a, c, g, u, unknown, other, or absent
  misc_difference 253: note = a, c, g, u, unknown, other, or absent
  misc_difference 254: note = a, c, g, u, unknown, other, or absent
  misc_difference 255: note = a, c, g, u, unknown, other, or absent
  misc_difference 256: note = a, c, g, u, unknown, other, or absent
  misc_difference 257: note = a, c, g, u, unknown, other, or absent
  misc_difference 258: note = a, c, g, u, unknown, other, or absent
  misc_difference 259: note = a, c, g, u, unknown, other, or absent
  misc_difference 260: note = a, c, g, u, unknown, other, or absent
  misc_difference 261: note = a, c, g, u, unknown, other, or absent
  misc_difference 262: note = a, c, g, u, unknown, other, or absent
  misc_difference 263: note = a, c, g, u, unknown, other, or absent
  misc_difference 264: note = a, c, g, u, unknown, other, or absent
  misc_difference 265: note = a, c, g, u, unknown, other, or absent
  misc_difference 266: note = a, c, g, u, unknown, other, or absent
  misc_difference 267: note = a, c, g, u, unknown, other, or absent
  misc_difference 268: note = a, c, g, u, unknown, other, or absent
  misc_difference 269: note = a, c, g, u, unknown, other, or absent
  misc_difference 270: note = a, c, g, u, unknown, other, or absent
  misc_difference 271: note = a, c, g, u, unknown, other, or absent
  misc_difference 272: note = a, c, g, u, unknown, other, or absent
  misc_difference 273: note = a, c, g, u, unknown, other, or absent
  misc_difference 274: note = a, c, g, u, unknown, other, or absent
  misc_difference 275: note = a, c, g, u, unknown, other, or absent
  misc_difference 276: note = a, c, g, u, unknown, other, or absent
  misc_difference 277: note = a, c, g, u, unknown, other, or absent
  misc_difference 278: note = a, c, g, u, unknown, other, or absent
  misc_difference 279: note = a, c, g, u, unknown, other, or absent
  misc_difference 280: note = a, c, g, u, unknown, other, or absent
  misc_difference 281: note = a, c, g, u, unknown, other, or absent
  misc_difference 282: note = a, c, g, u, unknown, other, or absent
  misc_difference 283: note = a, c, g, u, unknown, other, or absent
  misc_difference 284: note = a, c, g, u, unknown, other, or absent
  misc_difference 285: note = a, c, g, u, unknown, other, or absent
  misc_difference 286: note = a, c, g, u, unknown, other, or absent
  misc_difference 287: note = a, c, g, u, unknown, other, or absent
  misc_difference 288: note = a, c, g, u, unknown, other, or absent
  misc_difference 289: note = a, c, g, u, unknown, other, or absent
  misc_difference 290: note = a, c, g, u, unknown, other, or absent
  misc_difference 291: note = a, c, g, u, unknown, other, or absent
  misc_difference 292: note = a, c, g, u, unknown, other, or absent
  misc_difference 293: note = a, c, g, u, unknown, other, or absent
  misc_difference 294: note = a, c, g, u, unknown, other, or absent
  misc_difference 295: note = a, c, g, u, unknown, other, or absent
  misc_difference 296: note = a, c, g, u, unknown, other, or absent
  misc_difference 297: note = a, c, g, u, unknown, other, or absent
  misc_difference 298: note = a, c, g, u, unknown, other, or absent
  misc_difference 299: note = a, c, g, u, unknown, other, or absent
  misc_difference 300: note = a, c, g, u, unknown, other, or absent
  misc_difference 301: note = a, c, g, u, unknown, other, or absent
  misc_difference 302: note = a, c, g, u, unknown, other, or absent
  misc_difference 303: note = a, c, g, u, unknown, other, or absent
  misc_difference 304: note = a, c, g, u, unknown, other, or absent
  misc_difference 305: note = a, c, g, u, unknown, other, or absent
  misc_difference 306: note = a, c, g, u, unknown, other, or absent
  misc_difference 307: note = a, c, g, u, unknown, other, or absent
  misc_difference 308: note = a, c, g, u, unknown, other, or absent
  misc_difference 309: note = a, c, g, u, unknown, other, or absent
  misc_difference 310: note = a, c, g, u, unknown, other, or absent
  misc_difference 311: note = a, c, g, u, unknown, other, or absent
  misc_difference 312: note = a, c, g, u, unknown, other, or absent
  misc_difference 313: note = a, c, g, u, unknown, other, or absent
  misc_difference 314: note = May be absent
  misc_difference 315: note = May be absent
  misc_difference 316: note = May be absent
  misc_difference 317: note = May be absent
  misc_difference 318: note = May be absent
  misc_difference 319: note = May be absent
  misc_difference 320: note = May be absent
  misc_difference 321: note = May be absent
  misc_difference 322: note = May be absent
  misc_difference 323: note = May be absent
  misc_difference 324: note = May be absent
  misc_difference 325: note = May be absent
  misc_difference 326: note = May be absent
  misc_difference 327: note = May be absent
  misc_difference 328: note = May be absent
  misc_difference 329: note = May be absent
  misc_difference 330: note = May be absent
  misc_difference 331: note = May be absent
  misc_difference 332: note = May be absent
  misc_difference 333: note = May be absent
  misc_difference 334: note = May be absent
  misc_difference 335: note = May be absent
  misc_difference 336: note = May be absent
  misc_difference 337: note = May be absent
  misc_difference 338: note = May be absent
  misc_difference 43..314: note = This region may encompass 1-271 nucleotides
ggctcgttggtctagkggtrtgrttctcgstthggrysbgagnnnnnnnnnnnnnnnnnnnnnnnnnnnnnnnnnnnnnnnnnnnnnnnnnnnnnnnnnnnnnnnnnnnnnnnnnnnnnnnnnnnnnnnnnnnnnnnnnnnnnnnnnnnnnnnnnnnnnnnnnnnnnnnnnnnnnnnnnnnnnnnnnnnnnnnnnnnnnnnnnnnnnnnnnnnnnnnnnnnnnnnnnnnnnnnnnnnnnnnnnnnnnnnnnnnnnnnnnnnnnnnnnnnnnnnnnnnnnnnnnnnnnnnnnnnnnnnnnnnnnnnnnnnnnnnccgggttcaaatcccggacgagccc

SEQ ID NO: 607 - RNA, 342 nt, synthetic construct
  source 1..342: mol_type = other RNA
  misc_difference 1: note = May be absent
  misc_difference 2: note = a, c, g, u, unknown, other, or absent
  misc_difference 3: note = a, c, g, u, unknown, other, or absent
  misc_difference 4: note = a, c, g, u, unknown, other, or absent
  misc_difference 5: note = a, c, g, u, unknown, other, or absent
  misc_difference 6: note = a, c, g, u, unknown, other, or absent
  misc_difference 7: note = a, c, g, u, unknown, other, or absent
  misc_difference 8: note = May be absent
  misc_difference 9: note = a, c, g, u, unknown, other, or absent
  misc_difference 10: note = a, c, g, u, unknown, other, or absent
  misc_difference 11: note = a, c, g, u, unknown, other, or absent
  misc_difference 12: note = a, c, g, u, unknown, other, or absent
  misc_difference 13: note = a, c, g, u, unknown, other, or absent
  misc_difference 14: note = May be absent
  misc_difference 15: note = May be absent
  misc_difference 16: note = a, c, g, u, unknown, other, or absent
  misc_difference 17: note = May be absent
  misc_difference 18: note = May be absent
  misc_difference 19: note = May be absent
  misc_difference 20: note = May be absent
  misc_difference 21: note = a, c, g, u, unknown, other, or absent
  misc_difference 22: note = May be absent
  misc_difference 23: note = May be absent
  misc_difference 24: note = May be absent
  misc_difference 25: note = a, c, g, u, unknown, other, or absent
  misc_difference 26: note = a, c, g, u, unknown, other, or absent
  misc_difference 27: note = a, c, g, u, unknown, other, or absent
  misc_difference 28: note = a, c, g, u, unknown, other, or absent
  misc_difference 29: note = May be absent
  misc_difference 30: note = a, c, g, u, unknown, other, or absent
  misc_difference 31: note = a, c, g, u, unknown, other, or absent
  misc_difference 32: note = a, c, g, u, unknown, other, or absent
  misc_difference 33: note = a, c, g, u, unknown, other, or absent
  misc_difference 34: note = a, c, g, u, unknown, other, or absent
  misc_difference 35: note = May be absent
  misc_difference 36: note = May be absent
  misc_difference 37: note = a, c, g, u, unknown, other, or absent
  misc_difference 38: note = May be absent
  misc_difference 39: note = May be absent
  misc_difference 40: note = May be absent
  misc_difference 41: note = May be absent
  misc_difference 42: note = a, c, g, u, unknown, other, or absent
  misc_difference 43: note = a, c, g, u, unknown, other, or absent
  misc_difference 44: note = a, c, g, u, unknown, other, or absent
  misc_difference 45: note = a, c, g, u, unknown, other, or absent
  misc_difference 46: note = a, c, g, u, unknown, other, or absent
  misc_difference 47: note = a, c, g, u, unknown, other, or absent
  misc_difference 48: note = a, c, g, u, unknown, other, or absent
  misc_difference 49: note = a, c, g, u, unknown, other, or absent
  misc_difference 50: note = a, c, g, u, unknown, other, or absent
  misc_difference 51: note = a, c, g, u, unknown, other, or absent
  misc_difference 52: note = a, c, g, u, unknown, other, or absent
  misc_difference 53: note = a, c, g, u, unknown, other, or absent
  misc_difference 54: note = a, c, g, u, unknown, other, or absent
  misc_difference 55: note = a, c, g, u, unknown, other, or absent
  misc_difference 56: note = a, c, g, u, unknown, other, or absent
  misc_difference 57: note = a, c, g, u, unknown, other, or absent
  misc_difference 58: note = a, c, g, u, unknown, other, or absent
  misc_difference 59: note = a, c, g, u, unknown, other, or absent
  misc_difference 60: note = a, c, g, u, unknown, other, or absent
  misc_difference 61: note = a, c, g, u, unknown, other, or absent
  misc_difference 62: note = a, c, g, u, unknown, other, or absent
  misc_difference 63: note = a, c, g, u, unknown, other, or absent
  misc_difference 64: note = a, c, g, u, unknown, other, or absent
  misc_difference 65: note = a, c, g, u, unknown, other, or absent
  misc_difference 66: note = a, c, g, u, unknown, other, or absent
  misc_difference 67: note = a, c, g, u, unknown, other, or absent
  misc_difference 68: note = a, c, g, u, unknown, other, or absent
  misc_difference 69: note = a, c, g, u, unknown, other, or absent
  misc_difference 70: note = a, c, g, u, unknown, other, or absent
  misc_difference 71: note = a, c, g, u, unknown, other, or absent
  misc_difference 72: note = a, c, g, u, unknown, other, or absent
  misc_difference 73: note = a, c, g, u, unknown, other, or absent
  misc_difference 74: note = a, c, g, u, unknown, other, or absent
  misc_difference 75: note = a, c, g, u, unknown, other, or absent
  misc_difference 76: note = a, c, g, u, unknown, other, or absent
  misc_difference 77: note = a, c, g, u, unknown, other, or absent
  misc_difference 78: note = a, c, g, u, unknown, other, or absent
  misc_difference 79: note = a, c, g, u, unknown, other, or absent
  misc_difference 80: note = a, c, g, u, unknown, other, or absent
  misc_difference 81: note = a, c, g, u, unknown, other, or absent
  misc_difference 82: note = a, c, g, u, unknown, other, or absent
  misc_difference 83: note = a, c, g, u, unknown, other, or absent
  misc_difference 84: note = a, c, g, u, unknown, other, or absent
  misc_difference 85: note = a, c, g, u, unknown, other, or absent
  misc_difference 86: note = a, c, g, u, unknown, other, or absent
  misc_difference 87: note = a, c, g, u, unknown, other, or absent
  misc_difference 88: note = a, c, g, u, unknown, other, or absent
  misc_difference 89: note = a, c, g, u, unknown, other, or absent
  misc_difference 90: note = a, c, g, u, unknown, other, or absent
  misc_difference 91: note = a, c, g, u, unknown, other, or absent
  misc_difference 92: note = a, c, g, u, unknown, other, or absent
  misc_difference 93: note = a, c, g, u, unknown, other, or absent
  misc_difference 94: note = a, c, g, u, unknown, other, or absent
  misc_difference 95: note = a, c, g, u, unknown, other, or absent
  misc_difference 96: note = a, c, g, u, unknown, other, or absent
  misc_difference 97: note = a, c, g, u, unknown, other, or absent
  misc_difference 98: note = a, c, g, u, unknown, other, or absent
  misc_difference 99: note = a, c, g, u, unknown, other, or absent
  misc_difference 100: note = a, c, g, u, unknown, other, or absent
  misc_difference 101: note = a, c, g, u, unknown, other, or absent
  misc_difference 102: note = a, c, g, u, unknown, other, or absent
  misc_difference 103: note = a, c, g, u, unknown, other, or absent
  misc_difference 104: note = a, c, g, u, unknown, other, or absent
  misc_difference 105: note = a, c, g, u, unknown, other, or absent
  misc_difference 106: note = a, c, g, u, unknown, other, or absent
  misc_difference 107: note = a, c, g, u, unknown, other, or absent
  misc_difference 108: note = a, c, g, u, unknown, other, or absent
  misc_difference 109: note = a, c, g, u, unknown, other, or absent
  misc_difference 110: note = a, c, g, u, unknown, other, or absent
  misc_difference 111: note = a, c, g, u, unknown, other, or absent
  misc_difference 112: note = a, c, g, u, unknown, other, or absent
  misc_difference 113: note = a, c, g, u, unknown, other, or absent
  misc_difference 114: note = a, c, g, u, unknown, other, or absent
  misc_difference 115: note = a, c, g, u, unknown, other, or absent
  misc_difference 116: note = a, c, g, u, unknown, other, or absent
  misc_difference 117: note = a, c, g, u, unknown, other, or absent
  misc_difference 118: note = a, c, g, u, unknown, other, or absent
  misc_difference 119: note = a, c, g, u, unknown, other, or absent
  misc_difference 120: note = a, c, g, u, unknown, other, or absent
  misc_difference 121: note = a, c, g, u, unknown, other, or absent
  misc_difference 122: note = a, c, g, u, unknown, other, or absent
  misc_difference 123: note = a, c, g, u, unknown, other, or absent
  misc_difference 124: note = a, c, g, u, unknown, other, or absent
  misc_difference 125: note = a, c, g, u, unknown, other, or absent
  misc_difference 126: note = a, c, g, u, unknown, other, or absent
  misc_difference 127: note = a, c, g, u, unknown, other, or absent
  misc_difference 128: note = a, c, g, u, unknown, other, or absent
  misc_difference 129: note = a, c, g, u, unknown, other, or absent
  misc_difference 130: note = a, c, g, u, unknown, other, or absent
  misc_difference 131: note = a, c, g, u, unknown, other, or absent
  misc_difference 132: note = a, c, g, u, unknown, other, or absent
  misc_difference 133: note = a, c, g, u, unknown, other, or absent
  misc_difference 134: note = a, c, g, u, unknown, other, or absent
  misc_difference 135: note = a, c, g, u, unknown, other, or absent
  misc_difference 136: note = a, c, g, u, unknown, other, or absent
  misc_difference 137: note = a, c, g, u, unknown, other, or absent
  misc_difference 138: note = a, c, g, u, unknown, other, or absent
  misc_difference 139: note = a, c, g, u, unknown, other, or absent
  misc_difference 140: note = a, c, g, u, unknown, other, or absent
  misc_difference 141: note = a, c, g, u, unknown, other, or absent
  misc_difference 142: note = a, c, g, u, unknown, other, or absent
  misc_difference 143: note = a, c, g, u, unknown, other, or absent
  misc_difference 144: note = a, c, g, u, unknown, other, or absent
  misc_difference 145: note = a, c, g, u, unknown, other, or absent
  misc_difference 146: note = a, c, g, u, unknown, other, or absent
  misc_difference 147: note = a, c, g, u, unknown, other, or absent
  misc_difference 148: note = a, c, g, u, unknown, other, or absent
  misc_difference 149: note = a, c, g, u, unknown, other, or absent
  misc_difference 150: note = a, c, g, u, unknown, other, or absent
  misc_difference 151: note = a, c, g, u, unknown, other, or absent
  misc_difference 152: note = a, c, g, u, unknown, other, or absent
  misc_difference 153: note = a, c, g, u, unknown, other, or absent
  misc_difference 154: note = a, c, g, u, unknown, other, or absent
  misc_difference 155: note = a, c, g, u, unknown, other, or absent
  misc_difference 156: note = a, c, g, u, unknown, other, or absent
  misc_difference 157: note = a, c, g, u, unknown, other, or absent
  misc_difference 158: note = a, c, g, u, unknown, other, or absent
  misc_difference 159: note = a, c, g, u, unknown, other, or absent
  misc_difference 160: note = a, c, g, u, unknown, other, or absent
  misc_difference 161: note = a, c, g, u, unknown, other, or absent
  misc_difference 162: note = a, c, g, u, unknown, other, or absent
  misc_difference 163: note = a, c, g, u, unknown, other, or absent
  misc_difference 164: note = a, c, g, u, unknown, other, or absent
  misc_difference 165: note = a, c, g, u, unknown, other, or absent
  misc_difference 166: note = a, c, g, u, unknown, other, or absent
  misc_difference 167: note = a, c, g, u, unknown, other, or absent
  misc_difference 168: note = a, c, g, u, unknown, other, or absent
  misc_difference 169: note = a, c, g, u, unknown, other, or absent
  misc_difference 170: note = a, c, g, u, unknown, other, or absent
  misc_difference 171: note = a, c, g, u, unknown, other, or absent
  misc_difference 172: note = a, c, g, u, unknown, other, or absent
  misc_difference 173: note = a, c, g, u, unknown, other, or absent
  misc_difference 174: note = a, c, g, u, unknown, other, or absent
  misc_difference 175: note = a, c, g, u, unknown, other, or absent
  misc_difference 176: note = a, c, g, u, unknown, other, or absent
  misc_difference 177: note = a, c, g, u, unknown, other, or absent
  misc_difference 178: note = a, c, g, u, unknown, other, or absent
  misc_difference 179: note = a, c, g, u, unknown, other, or absent
  misc_difference 180: note = a, c, g, u, unknown, other, or absent
  misc_difference 181: note = a, c, g, u, unknown, other, or absent
  misc_difference 182: note = a, c, g, u, unknown, other, or absent
  misc_difference 183: note = a, c, g, u, unknown, other, or absent
  misc_difference 184: note = a, c, g, u, unknown, other, or absent
  misc_difference 185: note = a, c, g, u, unknown, other, or absent
  misc_difference 186: note = a, c, g, u, unknown, other, or absent
  misc_difference 187: note = a, c, g, u, unknown, other, or absent
  misc_difference 188: note = a, c, g, u, unknown, other, or absent
  misc_difference 189: note = a, c, g, u, unknown, other, or absent
  misc_difference 190: note = a, c, g, u, unknown, other, or absent
  misc_difference 191: note = a, c, g, u, unknown, other, or absent
  misc_difference 192: note = a, c, g, u, unknown, other, or absent
  misc_difference 193: note = a, c, g, u, unknown, other, or absent
  misc_difference 194: note = a, c, g, u, unknown, other, or absent
  misc_difference 195: note = a, c, g, u, unknown, other, or absent
  misc_difference 196: note = a, c, g, u, unknown, other, or absent
  misc_difference 197: note = a, c, g, u, unknown, other, or absent
  misc_difference 198: note = a, c, g, u, unknown, other, or absent
  misc_difference 199: note = a, c, g, u, unknown, other, or absent
  misc_difference 200: note = a, c, g, u, unknown, other, or absent
  misc_difference 201: note = a, c, g, u, unknown, other, or absent
  misc_difference 202: note = a, c, g, u, unknown, other, or absent
  misc_difference 203: note = a, c, g, u, unknown, other, or absent
  misc_difference 204: note = a, c, g, u, unknown, other, or absent
  misc_difference 205: note = a, c, g, u, unknown, other, or absent
  misc_difference 206: note = a, c, g, u, unknown, other, or absent
  misc_difference 207: note = a, c, g, u, unknown, other, or absent
  misc_difference 208: note = a, c, g, u, unknown, other, or absent
  misc_difference 209: note = a, c, g, u, unknown, other, or absent
  misc_difference 210: note = a, c, g, u, unknown, other, or absent
  misc_difference 211: note = a, c, g, u, unknown, other, or absent
  misc_difference 212: note = a, c, g, u, unknown, other, or absent
  misc_difference 213: note = a, c, g, u, unknown, other, or absent
  misc_difference 214: note = a, c, g, u, unknown, other, or absent
  misc_difference 215: note = a, c, g, u, unknown, other, or absent
  misc_difference 216: note = a, c, g, u, unknown, other, or absent
  misc_difference 217: note = a, c, g, u, unknown, other, or absent
  misc_difference 218: note = a, c, g, u, unknown, other, or absent
  misc_difference 219: note = a, c, g, u, unknown, other, or absent
  misc_difference 220: note = a, c, g, u, unknown, other, or absent
  misc_difference 221: note = a, c, g, u, unknown, other, or absent
  misc_difference 222: note = a, c, g, u, unknown, other, or absent
  misc_difference 223: note = a, c, g, u, unknown, other, or absent
  misc_difference 224: note = a, c, g, u, unknown, other, or absent
  misc_difference 225: note = a, c, g, u, unknown, other, or absent
  misc_difference 226: note = a, c, g, u, unknown, other, or absent
  misc_difference 227: note = a, c, g, u, unknown, other, or absent
  misc_difference 228: note = a, c, g, u, unknown, other, or absent
  misc_difference 229: note = a, c, g, u, unknown, other, or absent
  misc_difference 230: note = a, c, g, u, unknown, other, or absent
  misc_difference 231: note = a, c, g, u, unknown, other, or absent
  misc_difference 232: note = a, c, g, u, unknown, other, or absent
  misc_difference 233: note = a, c, g, u, unknown, other, or absent
  misc_difference 234: note = a, c, g, u, unknown, other, or absent
  misc_difference 235: note = a, c, g, u, unknown, other, or absent
  misc_difference 236: note = a, c, g, u, unknown, other, or absent
  misc_difference 237: note = a, c, g, u, unknown, other, or absent
  misc_difference 238: note = a, c, g, u, unknown, other, or absent
  misc_difference 239: note = a, c, g, u, unknown, other, or absent
  misc_difference 240: note = a, c, g, u, unknown, other, or absent
  misc_difference 241: note = a, c, g, u, unknown, other, or absent
  misc_difference 242: note = a, c, g, u, unknown, other, or absent
  misc_difference 243: note = a, c, g, u, unknown, other, or absent
  misc_difference 244: note = a, c, g, u, unknown, other, or absent
  misc_difference 245: note = a, c, g, u, unknown, other, or absent
  misc_difference 246: note = a, c, g, u, unknown, other, or absent
  misc_difference 247: note = a, c, g, u, unknown, other, or absent
  misc_difference 248: note = a, c, g, u, unknown, other, or absent
  misc_difference 249: note = a, c, g, u, unknown, other, or absent
  misc_difference 250: note = a, c, g, u, unknown, other, or absent
  misc_difference 251: note = a, c, g, u, unknown, other, or absent
  misc_difference 252: note = a, c, g, u, unknown, other, or absent
  misc_difference 253: note = a, c, g, u, unknown, other, or absent
  misc_difference 254: note = a, c, g, u, unknown, other, or absent
  misc_difference 255: note = a, c, g, u, unknown, other, or absent
  misc_difference 256: note = a, c, g, u, unknown, other, or absent
  misc_difference 257: note = a, c, g, u, unknown, other, or absent
  misc_difference 258: note = a, c, g, u, unknown, other, or absent
  misc_difference 259: note = a, c, g, u, unknown, other, or absent
  misc_difference 260: note = a, c, g, u, unknown, other, or absent
  misc_difference 261: note = a, c, g, u, unknown, other, or absent
  misc_difference 262: note = a, c, g, u, unknown, other, or absent
  misc_difference 263: note = a, c, g, u, unknown, other, or absent
  misc_difference 264: note = a, c, g, u, unknown, other, or absent
  misc_difference 265: note = a, c, g, u, unknown, other, or absent
  misc_difference 266: note = a, c, g, u, unknown, other, or absent
  misc_difference 267: note = a, c, g, u, unknown, other, or absent
  misc_difference 268: note = a, c, g, u, unknown, other, or absent
  misc_difference 269: note = a, c, g, u, unknown, other, or absent
  misc_difference 270: note = a, c, g, u, unknown, other, or absent
  misc_difference 271: note = a, c, g, u, unknown, other, or absent
  misc_difference 272: note = a, c, g, u, unknown, other, or absent
  misc_difference 273: note = a, c, g, u, unknown, other, or absent
  misc_difference 274: note = a, c, g, u, unknown, other, or absent
  misc_difference 275: note = a, c, g, u, unknown, other, or absent
  misc_difference 276: note = a, c, g, u, unknown, other, or absent
  misc_difference 277: note = a, c, g, u, unknown, other, or absent
  misc_difference 278: note = a, c, g, u, unknown, other, or absent
  misc_difference 279: note = a, c, g, u, unknown, other, or absent
  misc_difference 280: note = a, c, g, u, unknown, other, or absent
  misc_difference 281: note = a, c, g, u, unknown, other, or absent
  misc_difference 282: note = a, c, g, u, unknown, other, or absent
  misc_difference 283: note = a, c, g, u, unknown, other, or absent
  misc_difference 284: note = a, c, g, u, unknown, other, or absent
  misc_difference 285: note = a, c, g, u, unknown, other, or absent
  misc_difference 286: note = a, c, g, u, unknown, other, or absent
  misc_difference 287: note = a, c, g, u, unknown, other, or absent
  misc_difference 288: note = a, c, g, u, unknown, other, or absent
  misc_difference 289: note = a, c, g, u, unknown, other, or absent
  misc_difference 290: note = a, c, g, u, unknown, other, or absent
  misc_difference 291: note = a, c, g, u, unknown, other, or absent
  misc_difference 292: note = a, c, g, u, unknown, other, or absent
  misc_difference 293: note = a, c, g, u, unknown, other, or absent
  misc_difference 294: note = a, c, g, u, unknown, other, or absent
  misc_difference 295: note = a, c, g, u, unknown, other, or absent
  misc_difference 296: note = a, c, g, u, unknown, other, or absent
  misc_difference 297: note = a, c, g, u, unknown, other, or absent
  misc_difference 298: note = a, c, g, u, unknown, other, or absent
  misc_difference 299: note = a, c, g, u, unknown, other, or absent
  misc_difference 300: note = a, c, g, u, unknown, other, or absent
  misc_difference 301: note = a, c, g, u, unknown, other, or absent
  misc_difference 302: note = a, c, g, u, unknown, other, or absent
  misc_difference 303: note = a, c, g, u, unknown, other, or absent
  misc_difference 304: note = a, c, g, u, unknown, other, or absent
  misc_difference 305: note = a, c, g, u, unknown, other, or absent
  misc_difference 306: note = a, c, g, u, unknown, other, or absent
  misc_difference 307: note = a, c, g, u, unknown, other, or absent
  misc_difference 308: note = a, c, g, u, unknown, other, or absent
  misc_difference 309: note = a, c, g, u, unknown, other, or absent
  misc_difference 310: note = a, c, g, u, unknown, other, or absent
  misc_difference 311: note = a, c, g, u, unknown, other, or absent
  misc_difference 312: note = a, c, g, u, unknown, other, or absent
  misc_difference 313: note = a, c, g, u, unknown, other, or absent
  misc_difference 314: note = a, c, g, u, unknown, other, or absent
  misc_difference 315: note = a, c, g, u, unknown, other, or absent
  misc_difference 316: note = a, c, g, u, unknown, other, or absent
  misc_difference 317: note = a, c, g, u, unknown, other, or absent
  misc_difference 318: note = a, c, g, u, unknown, other, or absent
  misc_difference 319: note = a, c, g, u, unknown, other, or absent
  misc_difference 320: note = a, c, g, u, unknown, other, or absent
  misc_difference 321: note = May be absent
  misc_difference 322: note = May be absent
  misc_difference 323: note = May be absent
  misc_difference 324: note = May be absent
  misc_difference 325: note = May be absent
  misc_difference 326: note = May be absent
  misc_difference 327: note = May be absent
  misc_difference 328: note = May be absent
  misc_difference 329: note = May be absent
  misc_difference 330: note = May be absent
  misc_difference 331: note = May be absent
  misc_difference 332: note = a, c, g, u, unknown, other, or absent
  misc_difference 333: note = a, c, g, u, unknown, other, or absent
  misc_difference 334: note = a, c, g, u, unknown, other, or absent
  misc_difference 335: note = a, c, g, u, unknown, other, or absent
  misc_difference 336: note = a, c, g, u, unknown, other, or absent
  misc_difference 337: note = a, c, g, u, unknown, other, or absent
  misc_difference 338: note = a, c, g, u, unknown, other, or absent
  misc_difference 339: note = a, c, g, u, unknown, other, or absent
  misc_difference 340: note = a, c, g, u, unknown, other, or absent
  misc_difference 341: note = May be absent
  misc_difference 342: note = May be absent
  misc_difference 42..313: note = This region may encompass 1-271 nucleotides
dnnnnnnynnnnnarnbhggnbbannnndnnnnnyynswrmnnnnnnnnnnnnnnnnnnnnnnnnnnnnnnnnnnnnnnnnnnnnnnnnnnnnnnnnnnnnnnnnnnnnnnnnnnnnnnnnnnnnnnnnnnnnnnnnnnnnnnnnnnnnnnnnnnnnnnnnnnnnnnnnnnnnnnnnnnnnnnnnnnnnnnnnnnnnnnnnnnnnnnnnnnnnnnnnnnnnnnnnnnnnnnnnnnnnnnnnnnnnnnnnnnnnnnnnnnnnnnnnnnnnnnnnnnnnnnnnnnnnnnnnnnnnnnnnnnnnnnnnnnnnnnnnnnnnnnnrkttyradycynnnnnnnnnbd

SEQ ID NO: 608 - RNA, 341 nt, synthetic construct
  source 1..341: mol_type = other RNA
  misc_difference 1: note = May be absent
  misc_difference 2: note = a, c, g, u, unknown, other, or absent
  misc_difference 3: note = a, c, g, u, unknown, other, or absent
  misc_difference 4: note = a, c, g, u, unknown, other, or absent
  misc_difference 5: note = a, c, g, u, unknown, other, or absent
  misc_difference 6: note = May be absent
  misc_difference 7: note = May be absent
  misc_difference 8: note = May be absent
  misc_difference 9: note = May be absent
  misc_difference 10: note = May be absent
  misc_difference 11: note = May be absent
  misc_difference 12: note = May be absent
  misc_difference 13: note = May be absent
  misc_difference 14: note = May be absent
  misc_difference 15: note = May be absent
  misc_difference 16: note = May be absent
  misc_difference 17: note = May be absent
  misc_difference 18: note = May be absent
  misc_difference 19: note = May be absent
  misc_difference 20: note = May be absent
  misc_difference 21: note = May be absent
  misc_difference 22: note = May be absent
  misc_difference 23: note = May be absent
  misc_difference 24: note = May be absent
  misc_difference 25: note = May be absent
  misc_difference 26: note = May be absent
  misc_difference 27: note = May be absent
  misc_difference 28: note = May be absent
  misc_difference 29: note = May be absent
  misc_difference 30: note = May be absent
  misc_difference 31: note = May be absent
  misc_difference 32: note = May be absent
  misc_difference 33: note = May be absent
  misc_difference 34: note = May be absent
  misc_difference 35: note = May be absent
  misc_difference 36: note = a, c, g, u, unknown, other, or absent
  misc_difference 37: note = May be absent
  misc_difference 38: note = May be absent
  misc_difference 39: note = May be absent
  misc_difference 40: note = May be absent
  misc_difference 41: note = May be absent
  misc_difference 42: note = May be absent
  misc_difference 43: note = May be absent
  misc_difference 44: note = May be absent
  misc_difference 45: note = May be absent
  misc_difference 46: note = a, c, g, u, unknown, other, or absent
  misc_difference 47: note = a, c, g, u, unknown, other, or absent
  misc_difference 48: note = a, c, g, u, unknown, other, or absent
  misc_difference 49: note = a, c, g, u, unknown, other, or absent
  misc_difference 50: note = a, c, g, u, unknown, other, or absent
  misc_difference 51: note = a, c, g, u, unknown, other, or absent
  misc_difference 52: note = a, c, g, u, unknown, other, or absent
  misc_difference 53: note = a, c, g, u, unknown, other, or absent
  misc_difference 54: note = a, c, g, u, unknown, other, or absent
  misc_difference 55: note = a, c, g, u, unknown, other, or absent
  misc_difference 56: note = a, c, g, u, unknown, other, or absent
  misc_difference 57: note = a, c, g, u, unknown, other, or absent
  misc_difference 58: note = a, c, g, u, unknown, other, or absent
  misc_difference 59: note = a, c, g, u, unknown, other, or absent
  misc_difference 60: note = a, c, g, u, unknown, other, or absent
  misc_difference 61: note = a, c, g, u, unknown, other, or absent
  misc_difference 62: note = a, c, g, u, unknown, other, or absent
  misc_difference 63: note = a, c, g, u, unknown, other, or absent
  misc_difference 64: note = a, c, g, u, unknown, other, or absent
  misc_difference 65: note = a, c, g, u, unknown, other, or absent
  misc_difference 66: note = a, c, g, u, unknown, other, or absent
  misc_difference 67: note = a, c, g, u, unknown, other, or absent
  misc_difference 68: note = a, c, g, u, unknown, other, or absent
  misc_difference 69: note = a, c, g, u, unknown, other, or absent
  misc_difference 70: note = a, c, g, u, unknown, other, or absent
  misc_difference 71: note = a, c, g, u, unknown, other, or absent
  misc_difference 72: note = a, c, g, u, unknown, other, or absent
  misc_difference 73: note = a, c, g, u, unknown, other, or absent
  misc_difference 74: note = a, c, g, u, unknown, other, or absent
  misc_difference 75: note = a, c, g, u, unknown, other, or absent
  misc_difference 76: note = a, c, g, u, unknown, other, or absent
  misc_difference 77: note = a, c, g, u, unknown, other, or absent
  misc_difference 78: note = a, c, g, u, unknown, other, or absent
  misc_difference 79: note = a, c, g, u, unknown, other, or absent
  misc_difference 80: note = a, c, g, u, unknown, other, or absent
  misc_difference 81: note = a, c, g, u, unknown, other, or absent
  misc_difference 82: note = a, c, g, u, unknown, other, or absent
  misc_difference 83: note = a, c, g, u, unknown, other, or absent
  misc_difference 84: note = a, c, g, u, unknown, other, or absent
  misc_difference 85: note = a, c, g, u, unknown, other, or absent
  misc_difference 86: note = a, c, g, u, unknown, other, or absent
  misc_difference 87: note = a, c, g, u, unknown, other, or absent
  misc_difference 88: note = a, c, g, u, unknown, other, or absent
  misc_difference 89: note = a, c, g, u, unknown, other, or absent
  misc_difference 90: note = a, c, g, u, unknown, other, or absent
  misc_difference 91: note = a, c, g, u, unknown, other, or absent
  misc_difference 92: note = a, c, g, u, unknown, other, or absent
  misc_difference 93: note = a, c, g, u, unknown, other, or absent
  misc_difference 94: note = a, c, g, u, unknown, other, or absent
  misc_difference 95: note = a, c, g, u, unknown, other, or absent
  misc_difference 96: note = a, c, g, u, unknown, other, or absent
  misc_difference 97: note = a, c, g, u, unknown, other, or absent
  misc_difference 98: note = a, c, g, u, unknown, other, or absent
  misc_difference 99: note = a, c, g, u, unknown, other, or absent
  misc_difference 100: note = a, c, g, u, unknown, other, or absent
  misc_difference 101: note = a, c, g, u, unknown, other, or absent
  misc_difference 102: note = a, c, g, u, unknown, other, or absent
  misc_difference 103: note = a, c, g, u, unknown, other, or absent
  misc_difference 104: note = a, c, g, u, unknown, other, or absent
  misc_difference 105: note = a, c, g, u, unknown, other, or absent
  misc_difference 106: note = a, c, g, u, unknown, other, or absent
  misc_difference 107: note = a, c, g, u, unknown, other, or absent
  misc_difference 108: note = a, c, g, u, unknown, other, or absent
  misc_difference 109: note = a, c, g, u, unknown, other, or absent
  misc_difference 110: note = a, c, g, u, unknown, other, or absent
  misc_difference 111: note = a, c, g, u, unknown, other, or absent
  misc_difference 112: note = a, c, g, u, unknown, other, or absent
  misc_difference 113: note = a, c, g, u, unknown, other, or absent
  misc_difference 114: note = a, c, g, u, unknown, other, or absent
  misc_difference 115: note = a, c, g, u, unknown, other, or absent
  misc_difference 116: note = a, c, g, u, unknown, other, or absent
  misc_difference 117: note = a, c, g, u, unknown, other, or absent
  misc_difference 118: note = a, c, g, u, unknown, other, or absent
  misc_difference 119: note = a, c, g, u, unknown, other, or absent
  misc_difference 120: note = a, c, g, u, unknown, other, or absent
  misc_difference 121: note = a, c, g, u, unknown, other, or absent
  misc_difference 122: note = a, c, g, u, unknown, other, or absent
  misc_difference 123: note = a, c, g, u, unknown, other, or absent
  misc_difference 124: note = a, c, g, u, unknown, other, or absent
  misc_difference 125: note = a, c, g, u, unknown, other, or absent
  misc_difference 126: note = a, c, g, u, unknown, other, or absent
  misc_difference 127: note = a, c, g, u, unknown, other, or absent
  misc_difference 128: note = a, c, g, u, unknown, other, or absent
  misc_difference 129: note = a, c, g, u, unknown, other, or absent
  misc_difference 130: note = a, c, g, u, unknown, other, or absent
  misc_difference 131: note = a, c, g, u, unknown, other, or absent
  misc_difference 132: note = a, c, g, u, unknown, other, or absent
  misc_difference 133: note = a, c, g, u, unknown, other, or absent
  misc_difference 134: note = a, c, g, u, unknown, other, or absent
  misc_difference 135: note = a, c, g, u, unknown, other, or absent
  misc_difference 136: note = a, c, g, u, unknown, other, or absent
  misc_difference 137: note = a, c, g, u, unknown, other, or absent
  misc_difference 138: note = a, c, g, u, unknown, other, or absent
  misc_difference 139: note = a, c, g, u, unknown, other, or absent
  misc_difference 140: note = a, c, g, u, unknown, other, or absent
  misc_difference 141: note = a, c, g, u, unknown, other, or absent
  misc_difference 142: note = a, c, g, u, unknown, other, or absent
  misc_difference 143: note = a, c, g, u, unknown, other, or absent
  misc_difference 144: note = a, c, g, u, unknown, other, or absent
  misc_difference 145: note = a, c, g, u, unknown, other, or absent
  misc_difference 146: note = a, c, g, u, unknown, other, or absent
  misc_difference 147: note = a, c, g, u, unknown, other, or absent
  misc_difference 148: note = a, c, g, u, unknown, other, or absent
  misc_difference 149: note = a, c, g, u, unknown, other, or absent
  misc_difference 150: note = a, c, g, u, unknown, other, or absent
  misc_difference 151: note = a, c, g, u, unknown, other, or absent
  misc_difference 152: note = a, c, g, u, unknown, other, or absent
  misc_difference 153: note = a, c, g, u, unknown, other, or absent
  misc_difference 154: note = a, c, g, u, unknown, other, or absent
  misc_difference 155: note = a, c, g, u, unknown, other, or absent
  misc_difference 156: note = a, c, g, u, unknown, other, or absent
  misc_difference 157: note = a, c, g, u, unknown, other, or absent
  misc_difference 158: note = a, c, g, u, unknown, other, or absent
  misc_difference 159: note = a, c, g, u, unknown, other, or absent
  misc_difference 160: note = a, c, g, u, unknown, other, or absent
  misc_difference 161: note = a, c, g, u, unknown, other, or absent
  misc_difference 162: note = a, c, g, u, unknown, other, or absent
  misc_difference 163: note = a, c, g, u, unknown, other, or absent
  misc_difference 164: note = a, c, g, u, unknown, other, or absent
  misc_difference 165: note = a, c, g, u, unknown, other, or absent
  misc_difference 166: note = a, c, g, u, unknown, other, or absent
  misc_difference 167: note = a, c, g, u, unknown, other, or absent
  misc_difference 168: note = a, c, g, u, unknown, other, or absent
  misc_difference 169: note = a, c, g, u, unknown, other, or absent
  misc_difference 170: note = a, c, g, u, unknown, other, or absent
  misc_difference 171: note = a, c, g, u, unknown, other, or absent
  misc_difference 172: note = a, c, g, u, unknown, other, or absent
  misc_difference 173: note = a, c, g, u, unknown, other, or absent
  misc_difference 174: note = a, c, g, u, unknown, other, or absent
  misc_difference 175: note = a, c, g, u, unknown, other, or absent
  misc_difference 176: note = a, c, g, u, unknown, other, or absent
  misc_difference 177: note = a, c, g, u, unknown, other, or absent
  misc_difference 178: note = a, c, g, u, unknown, other, or absent
  misc_difference 179: note = a, c, g, u, unknown, other, or absent
  misc_difference 180: note = a, c, g, u, unknown, other, or absent
  misc_difference 181: note = a, c, g, u, unknown, other, or absent
  misc_difference 182: note = a, c, g, u, unknown, other, or absent
  misc_difference 183: note = a, c, g, u, unknown, other, or absent
  misc_difference 184: note = a, c, g, u, unknown, other, or absent
  misc_difference 185: note = a, c, g, u, unknown, other, or absent
  misc_difference 186: note = a, c, g, u, unknown, other, or absent
  misc_difference 187: note = a, c, g, u, unknown, other, or absent
  misc_difference 188: note = a, c, g, u, unknown, other, or absent
  misc_difference 189: note = a, c, g, u, unknown, other, or absent
  misc_difference 190: note = a, c, g, u, unknown, other, or absent
  misc_difference 191: note = a, c, g, u, unknown, other, or absent
  misc_difference 192: note = a, c, g, u, unknown, other, or absent
  misc_difference 193: note = a, c, g, u, unknown, other, or absent
  misc_difference 194: note = a, c, g, u, unknown, other, or absent
  misc_difference 195: note = a, c, g, u, unknown, other, or absent
  misc_difference 196: note = a, c, g, u, unknown, other, or absent
  misc_difference 197: note = a, c, g, u, unknown, other, or absent
  misc_difference 198: note = a, c, g, u, unknown, other, or absent
  misc_difference 199: note = a, c, g, u, unknown, other, or absent
  misc_difference 200: note = a, c, g, u, unknown, other, or absent
  misc_difference 201: note = a, c, g, u, unknown, other, or absent
  misc_difference 202: note = a, c, g, u, unknown, other, or absent
  misc_difference 203: note = a, c, g, u, unknown, other, or absent
  misc_difference 204: note = a, c, g, u, unknown, other, or absent
  misc_difference 205: note = a, c, g, u, unknown, other, or absent
  misc_difference 206: note = a, c, g, u, unknown, other, or absent
  misc_difference 207: note = a, c, g, u, unknown, other, or absent
  misc_difference 208: note = a, c, g, u, unknown, other, or absent
  misc_difference 209: note = a, c, g, u, unknown, other, or absent
  misc_difference 210: note = a, c, g, u, unknown, other, or absent
  misc_difference 211: note = a, c, g, u, unknown, other, or absent
  misc_difference 212: note = a, c, g, u, unknown, other, or absent
  misc_difference 213: note = a, c, g, u, unknown, other, or absent
  misc_difference 214: note = a, c, g, u, unknown, other, or absent
  misc_difference 215: note = a, c, g, u, unknown, other, or absent
  misc_difference 216: note = a, c, g, u, unknown, other, or absent
  misc_difference 217: note = a, c, g, u, unknown, other, or absent
  misc_difference 218: note = a, c, g, u, unknown, other, or absent
  misc_difference 219: note = a, c, g, u, unknown, other, or absent
  misc_difference 220: note = a, c, g, u, unknown, other, or absent
  misc_difference 221: note = a, c, g, u, unknown, other, or absent
  misc_difference 222: note = a, c, g, u, unknown, other, or absent
  misc_difference 223: note = a, c, g, u, unknown, other, or absent
  misc_difference 224: note = a, c, g, u, unknown, other, or absent
  misc_difference 225: note = a, c, g, u, unknown, other, or absent
  misc_difference 226: note = a, c, g, u, unknown, other, or absent
  misc_difference 227: note = a, c, g, u, unknown, other, or absent
  misc_difference 228: note = a, c, g, u, unknown, other, or absent
  misc_difference 229: note = a, c, g, u, unknown, other, or absent
  misc_difference 230: note = a, c, g, u, unknown, other, or absent
  misc_difference 231: note = a, c, g, u, unknown, other, or absent
  misc_difference 232: note = a, c, g, u, unknown, other, or absent
  misc_difference 233: note = a, c, g, u, unknown, other, or absent
  misc_difference 234: note = a, c, g, u, unknown, other, or absent
  misc_difference 235: note = a, c, g, u, unknown, other, or absent
  misc_difference 236: note = a, c, g, u, unknown, other, or absent
  misc_difference 237: note = a, c, g, u, unknown, other, or absent
  misc_difference 238: note = a, c, g, u, unknown, other, or absent
  misc_difference 239: note = a, c, g, u, unknown, other, or absent
  misc_difference 240: note = a, c, g, u, unknown, other, or absent
  misc_difference 241: note = a, c, g, u, unknown, other, or absent
  misc_difference 242: note = a, c, g, u, unknown, other, or absent
  misc_difference 243: note = a, c, g, u, unknown, other, or absent
  misc_difference 244: note = a, c, g, u, unknown, other, or absent
  misc_difference 245: note = a, c, g, u, unknown, other, or absent
  misc_difference 246: note = a, c, g, u, unknown, other, or absent
  misc_difference 247: note = a, c, g, u, unknown, other, or absent
  misc_difference 248: note = a, c, g, u, unknown, other, or absent
  misc_difference 249: note = a, c, g, u, unknown, other, or absent
  misc_difference 250: note = a, c, g, u, unknown, other, or absent
  misc_difference 251: note = a, c, g, u, unknown, other, or absent
  misc_difference 252: note = a, c, g, u, unknown, other, or absent
  misc_difference 253: note = a, c, g, u, unknown, other, or absent
  misc_difference 254: note = a, c, g, u, unknown, other, or absent
  misc_difference 255: note = a, c, g, u, unknown, other, or absent
  misc_difference 256: note = a, c, g, u, unknown, other, or absent
  misc_difference 257: note = a, c, g, u, unknown, other, or absent
  misc_difference 258: note = a, c, g, u, unknown, other, or absent
  misc_difference 259: note = a, c, g, u, unknown, other, or absent
  misc_difference 260: note = a, c, g, u, unknown, other, or absent
  misc_difference 261: note = a, c, g, u, unknown, other, or absent
  misc_difference 262: note = a, c, g, u, unknown, other, or absent
  misc_difference 263: note = a, c, g, u, unknown, other, or absent
  misc_difference 264: note = a, c, g, u, unknown, other, or absent
  misc_difference 265: note = a, c, g, u, unknown, other, or absent
  misc_difference 266: note = a, c, g, u, unknown, other, or absent
  misc_difference 267: note = a, c, g, u, unknown, other, or absent
  misc_difference 268: note = a, c, g, u, unknown, other, or absent
  misc_difference 269: note = a, c, g, u, unknown, other, or absent
  misc_difference 270: note = a, c, g, u, unknown, other, or absent
  misc_difference 271: note = a, c, g, u, unknown, other, or absent
  misc_difference 272: note = a, c, g, u, unknown, other, or absent
  misc_difference 273: note = a, c, g, u, unknown, other, or absent
  misc_difference 274: note = a, c, g, u, unknown, other, or absent
  misc_difference 275: note = a, c, g, u, unknown, other, or absent
  misc_difference 276: note = a, c, g, u, unknown, other, or absent
  misc_difference 277: note = a, c, g, u, unknown, other, or absent
  misc_difference 278: note = a, c, g, u, unknown, other, or absent
  misc_difference 279: note = a, c, g, u, unknown, other, or absent
  misc_difference 280: note = a, c, g, u, unknown, other, or absent
  misc_difference 281: note = a, c, g, u, unknown, other, or absent
  misc_difference 282: note = a, c, g, u, unknown, other, or absent
  misc_difference 283: note = a, c, g, u, unknown, other, or absent
  misc_difference 284: note = a, c, g, u, unknown, other, or absent
  misc_difference 285: note = a, c, g, u, unknown, other, or absent
  misc_difference 286: note = a, c, g, u, unknown, other, or absent
  misc_difference 287: note = a, c, g, u, unknown, other, or absent
  misc_difference 288: note = a, c, g, u, unknown, other, or absent
  misc_difference 289: note = a, c, g, u, unknown, other, or absent
  misc_difference 290: note = a, c, g, u, unknown, other, or absent
  misc_difference 291: note = a, c, g, u, unknown, other, or absent
  misc_difference 292: note = a, c, g, u, unknown, other, or absent
  misc_difference 293: note = a, c, g, u, unknown, other, or absent
  misc_difference 294: note = a, c, g, u, unknown, other, or absent
  misc_difference 295: note = a, c, g, u, unknown, other, or absent
  misc_difference 296: note = a, c, g, u, unknown, other, or absent
  misc_difference 297: note = a, c, g, u, unknown, other, or absent
  misc_difference 298: note = a, c, g, u, unknown, other, or absent
  misc_difference 299: note = a, c, g, u, unknown, other, or absent
  misc_difference 300: note = a, c, g, u, unknown, other, or absent
  misc_difference 301: note = a, c, g, u, unknown, other, or absent
  misc_difference 302: note = a, c, g, u, unknown, other, or absent
  misc_difference 303: note = a, c, g, u, unknown, other, or absent
  misc_difference 304: note = a, c, g, u, unknown, other, or absent
  misc_difference 305: note = a, c, g, u, unknown, other, or absent
  misc_difference 306: note = a, c, g, u, unknown, other, or absent
  misc_difference 307: note = a, c, g, u, unknown, other, or absent
  misc_difference 308: note = a, c, g, u, unknown, other, or absent
  misc_difference 309: note = a, c, g, u, unknown, other, or absent
  misc_difference 310: note = a, c, g, u, unknown, other, or absent
  misc_difference 311: note = a, c, g, u, unknown, other, or absent
  misc_difference 312: note = a, c, g, u, unknown, other, or absent
  misc_difference 313: note = a, c, g, u, unknown, other, or absent
  misc_difference 314: note = a, c, g, u, unknown, other, or absent
  misc_difference 315: note = a, c, g, u, unknown, other, or absent
  misc_difference 316: note = a, c, g, u, unknown, other, or absent
  misc_difference 317: note = May be absent
  misc_difference 318: note = May be absent
  misc_difference 319: note = a, c, g, u, unknown, other, or absent
  misc_difference 320: note = May be absent
  misc_difference 321: note = May be absent
  misc_difference 322: note = May be absent
  misc_difference 323: note = May be absent
  misc_difference 324: note = May be absent
  misc_difference 325: note = May be absent
  misc_difference 326: note = May be absent
  misc_difference 327: note = May be absent
  misc_difference 328: note = May be absent
  misc_difference 329: note = May be absent
  misc_difference 330: note = May be absent
  misc_difference 331: note = a, c, g, u, unknown, other, or absent
  misc_difference 332: note = May be absent
  misc_difference 333: note = May be absent
  misc_difference 334: note = May be absent
  misc_difference 335: note = a, c, g, u, unknown, other, or absent
  misc_difference 336: note = a, c, g, u, unknown, other, or absent
  misc_difference 337: note = May be absent
  misc_difference 338: note = a, c, g, u, unknown, other, or absent
  misc_difference 339: note = a, c, g, u, unknown, other, or absent
  misc_difference 340: note = May be absent
  misc_difference 341: note = May be absent
  misc_difference 46..317: note = This region may encompass 1-271 nucleotides
knnnnbdtrgchsarkbtggttavdghrdbkdrcynswraybmvdnnnnnnnnnnnnnnnnnnnnnnnnnnnnnnnnnnnnnnnnnnnnnnnnnnnnnnnnnnnnnnnnnnnnnnnnnnnnnnnnnnnnnnnnnnnnnnnnnnnnnnnnnnnnnnnnnnnnnnnnnnnnnnnnnnnnnnnnnnnnnnnnnnnnnnnnnnnnnnnnnnnnnnnnnnnnnnnnnnnnnnnnnnnnnnnnnnnnnnnnnnnnnnnnnnnnnnnnnnnnnnnnnnnnnnnnnnnnnnnnnnnnnnnnnnnnnnnnnnnnnnnnnnnnnnnvyngkttyradyccnrbhnnbnnyd

SEQ ID NO: 609 - RNA, 341 nt, synthetic construct
  source 1..341: mol_type = other RNA
  misc_difference 1: note = May be absent
  misc_difference 2: note = a, c, g, u, unknown, other, or absent
  misc_difference 3: note = a, c, g, u, unknown, other, or absent
  misc_difference 4: note = May be absent
  misc_difference 5: note = a, c, g, u, unknown, other, or absent
  misc_difference 6: note = May be absent
  misc_difference 7: note = May be absent
  misc_difference 8: note = May be absent
  misc_difference 9: note = May be absent
  misc_difference 10: note = May be absent
  misc_difference 11: note = May be absent
  misc_difference 12: note = May be absent
  misc_difference 13: note = May be absent
  misc_difference 14: note = May be absent
  misc_difference 15: note = May be absent
  misc_difference 16: note = May be absent
  misc_difference 17: note = May be absent
  misc_difference 18: note = May be absent
  misc_difference 19: note = May be absent
  misc_difference 20: note = May be absent
  misc_difference 21: note = May be absent
  misc_difference 22: note = May be absent
  misc_difference 23: note = May be absent
  misc_difference 24: note = May be absent
  misc_difference 25: note = May be absent
  misc_difference 26: note = May be absent
  misc_difference 27: note = May be absent
  misc_difference 28: note = May be absent
  misc_difference 29: note = May be absent
  misc_difference 30: note = May be absent
  misc_difference 31: note = May be absent
  misc_difference 32: note = May be absent
  misc_difference 33: note = May be absent
  misc_difference 34: note = May be absent
  misc_difference 35: note = May be absent
  misc_difference 36: note = a, c, g, u, unknown, other, or absent
  misc_difference 37: note = May be absent
  misc_difference 38: note = May be absent
  misc_difference 39: note = May be absent
  misc_difference 40: note = May be absent
  misc_difference 41: note = May be absent
  misc_difference 42: note = May be absent
  misc_difference 43: note = May be absent
  misc_difference 44: note = May be absent
  misc_difference 45: note = May be absent
  misc_difference 46: note = a, c, g, u, unknown, other, or absent
  misc_difference 47: note = a, c, g, u, unknown, other, or absent
  misc_difference 48: note = a, c, g, u, unknown, other, or absent
  misc_difference 49: note = a, c, g, u, unknown, other, or absent
  misc_difference 50: note = a, c, g, u, unknown, other, or absent
  misc_difference 51: note = a, c, g, u, unknown, other, or absent
  misc_difference 52: note = a, c, g, u, unknown, other, or absent
  misc_difference 53: note = a, c, g, u, unknown, other, or absent
  misc_difference 54: note = a, c, g, u, unknown, other, or absent
  misc_difference 55: note = a, c, g, u, unknown, other, or absent
  misc_difference 56: note = a, c, g, u, unknown, other, or absent
  misc_difference 57: note = a, c, g, u, unknown, other, or absent
  misc_difference 58: note = a, c, g, u, unknown, other, or absent
  misc_difference 59: note = a, c, g, u, unknown, other, or absent
  misc_difference 60: note = a, c, g, u, unknown, other, or absent
  misc_difference 61: note = a, c, g, u, unknown, other, or absent
  misc_difference 62: note = a, c, g, u, unknown, other, or absent
  misc_difference 63: note = a, c, g, u, unknown, other, or absent
  misc_difference 64: note = a, c, g, u, unknown, other, or absent
  misc_difference 65: note = a, c, g, u, unknown, other, or absent
  misc_difference 66: note = a, c, g, u, unknown, other, or absent
  misc_difference 67: note = a, c, g, u, unknown, other, or absent
  misc_difference 68: note = a, c, g, u, unknown, other, or absent
  misc_difference 69: note = a, c, g, u, unknown, other, or absent
  misc_difference 70: note = a, c, g, u, unknown, other, or absent
  misc_difference 71: note = a, c, g, u, unknown, other, or absent
  misc_difference 72: note = a, c, g, u, unknown, other, or absent
  misc_difference 73: note = a, c, g, u, unknown, other, or absent
  misc_difference 74: note = a, c, g, u, unknown, other, or absent
  misc_difference 75: note = a, c, g, u, unknown, other, or absent
  misc_difference 76: note = a, c, g, u, unknown, other, or absent
  misc_difference 77: note = a, c, g, u, unknown, other, or absent
  misc_difference 78: note = a, c, g, u, unknown, other, or absent
  misc_difference 79: note = a, c, g, u, unknown, other, or absent
  misc_difference 80: note = a, c, g, u, unknown, other, or absent
  misc_difference 81: note = a, c, g, u, unknown, other, or absent
  misc_difference 82: note = a, c, g, u, unknown, other, or absent
  misc_difference 83: note = a, c, g, u, unknown, other, or absent
  misc_difference 84: note = a, c, g, u, unknown, other, or absent
  misc_difference 85: note = a, c, g, u, unknown, other, or absent
  misc_difference 86: note = a, c, g, u, unknown, other, or absent
  misc_difference 87: note = a, c, g, u, unknown, other, or absent
  misc_difference 88: note = a, c, g, u, unknown, other, or absent
  misc_difference 89: note = a, c, g, u, unknown, other, or absent
  misc_difference 90: note = a, c, g, u, unknown, other, or absent
  misc_difference 91: note = a, c, g, u, unknown, other, or absent
  misc_difference 92: note = a, c, g, u, unknown, other, or absent
  misc_difference 93: note = a, c, g, u, unknown, other, or absent
  misc_difference 94: note = a, c, g, u, unknown, other, or absent
  misc_difference 95: note = a, c, g, u, unknown, other, or absent
  misc_difference 96: note = a, c, g, u, unknown, other, or absent
  misc_difference 97: note = a, c, g, u, unknown, other, or absent
  misc_difference 98: note = a, c, g, u, unknown, other, or absent
  misc_difference 99: note = a, c, g, u, unknown, other, or absent
  misc_difference 100: note = a, c, g, u, unknown, other, or absent
  misc_difference 101: note = a, c, g, u, unknown, other, or absent
  misc_difference 102: note = a, c, g, u, unknown, other, or absent
  misc_difference 103: note = a, c, g, u, unknown, other, or absent
  misc_difference 104: note = a, c, g, u, unknown, other, or absent
  misc_difference 105: note = a, c, g, u, unknown, other, or absent
  misc_difference 106: note = a, c, g, u, unknown, other, or absent
  misc_difference 107: note = a, c, g, u, unknown, other, or absent
  misc_difference 108: note = a, c, g, u, unknown, other, or absent
  misc_difference 109: note = a, c, g, u, unknown, other, or absent
  misc_difference 110: note = a, c, g, u, unknown, other, or absent
  misc_difference 111: note = a, c, g, u, unknown, other, or absent
  misc_difference 112: note = a, c, g, u, unknown, other, or absent
  misc_difference 113: note = a, c, g, u, unknown, other, or absent
  misc_difference 114: note = a, c, g, u, unknown, other, or absent
  misc_difference 115: note = a, c, g, u, unknown, other, or absent
  misc_difference 116: note = a, c, g, u, unknown, other, or absent
  misc_difference 117: note = a, c, g, u, unknown, other, or absent
  misc_difference 118: note = a, c, g, u, unknown, other, or absent
  misc_difference 119: note = a, c, g, u, unknown, other, or absent
  misc_difference 120: note = a, c, g, u, unknown, other, or absent
  misc_difference 121: note = a, c, g, u, unknown, other, or absent
  misc_difference 122: note = a, c, g, u, unknown, other, or absent
  misc_difference 123: note = a, c, g, u, unknown, other, or absent
  misc_difference 124: note = a, c, g, u, unknown, other, or absent
  misc_difference 125: note = a, c, g, u, unknown, other, or absent
  misc_difference 126: note = a, c, g, u, unknown, other, or absent
  misc_difference 127: note = a, c, g, u, unknown, other, or absent
  misc_difference 128: note = a, c, g, u, unknown, other, or absent
  misc_difference 129: note = a, c, g, u, unknown, other, or absent
  misc_difference 130: note = a, c, g, u, unknown, other, or absent
  misc_difference 131: note = a, c, g, u, unknown, other, or absent
  misc_difference 132: note = a, c, g, u, unknown, other, or absent
  misc_difference 133: note = a, c, g, u, unknown, other, or absent
  misc_difference 134: note = a, c, g, u, unknown, other, or absent
  misc_difference 135: note = a, c, g, u, unknown, other, or absent
  misc_difference 136: note = a, c, g, u, unknown, other, or absent
  misc_difference 137: note = a, c, g, u, unknown, other, or absent
  misc_difference 138: note = a, c, g, u, unknown, other, or absent
  misc_difference 139: note = a, c, g, u, unknown, other, or absent
  misc_difference 140: note = a, c, g, u, unknown, other, or absent
  misc_difference 141: note = a, c, g, u, unknown, other, or absent
  misc_difference 142: note = a, c, g, u, unknown, other, or absent
  misc_difference 143: note = a, c, g, u, unknown, other, or absent
  misc_difference 144: note = a, c, g, u, unknown, other, or absent
  misc_difference 145: note = a, c, g, u, unknown, other, or absent
  misc_difference 146: note = a, c, g, u, unknown, other, or absent
  misc_difference 147: note = a, c, g, u, unknown, other, or absent
  misc_difference 148: note = a, c, g, u, unknown, other, or absent
  misc_difference 149: note = a, c, g, u, unknown, other, or absent
  misc_difference 150: note = a, c, g, u, unknown, other, or absent
  misc_difference 151: note = a, c, g, u, unknown, other, or absent
  misc_difference 152: note = a, c, g, u, unknown, other, or absent
  misc_difference 153: note = a, c, g, u, unknown, other, or absent
  misc_difference 154: note = a, c, g, u, unknown, other, or absent
  misc_difference 155: note = a, c, g, u, unknown, other, or absent
  misc_difference 156: note = a, c, g, u, unknown, other, or absent
  misc_difference 157: note = a, c, g, u, unknown, other, or absent
  misc_difference 158: note = a, c, g, u, unknown, other, or absent
  misc_difference 159: note = a, c, g, u, unknown, other, or absent
  misc_difference 160: note = a, c, g, u, unknown, other, or absent
  misc_difference 161: note = a, c, g, u, unknown, other, or absent
  misc_difference 162: note = a, c, g, u, unknown, other, or absent
  misc_difference 163: note = a, c, g, u, unknown, other, or absent
  misc_difference 164: note = a, c, g, u, unknown, other, or absent
  misc_difference 165: note = a, c, g, u, unknown, other, or absent
  misc_difference 166: note = a, c, g, u, unknown, other, or absent
  misc_difference 167: note = a, c, g, u, unknown, other, or absent
  misc_difference 168: note = a, c, g, u, unknown, other, or absent
  misc_difference 169: note = a, c, g, u, unknown, other, or absent
  misc_difference 170: note = a, c, g, u, unknown, other, or absent
  misc_difference 171: note = a, c, g, u, unknown, other, or absent
  misc_difference 172: note = a, c, g, u, unknown, other, or absent
  misc_difference 173: note = a, c, g, u, unknown, other, or absent
  misc_difference 174: note = a, c, g, u, unknown, other, or absent
  misc_difference 175: note = a, c, g, u, unknown, other, or absent
  misc_difference 176: note = a, c, g, u, unknown, other, or absent
  misc_difference 177: note = a, c, g, u, unknown, other, or absent
  misc_difference 178: note = a, c, g, u, unknown, other, or absent
  misc_difference 179: note = a, c, g, u, unknown, other, or absent
  misc_difference 180: note = a, c, g, u, unknown, other, or absent
  misc_difference 181: note = a, c, g, u, unknown, other, or absent
  misc_difference 182: note = a, c, g, u, unknown, other, or absent
  misc_difference 183: note = a, c, g, u, unknown, other, or absent
  misc_difference 184: note = a, c, g, u, unknown, other, or absent
  misc_difference 185: note = a, c, g, u, unknown, other, or absent
  misc_difference 186: note = a, c, g, u, unknown, other, or absent
  misc_difference 187: note = a, c, g, u, unknown, other, or absent
  misc_difference 188: note = a, c, g, u, unknown, other, or absent
  misc_difference 189: note = a, c, g, u, unknown, other, or absent
  misc_difference 190: note = a, c, g, u, unknown, other, or absent
  misc_difference 191: note = a, c, g, u, unknown, other, or absent
  misc_difference 192: note = a, c, g, u, unknown, other, or absent
  misc_difference 193: note = a, c, g, u, unknown, other, or absent
  misc_difference 194: note = a, c, g, u, unknown, other, or absent
  misc_difference 195: note = a, c, g, u, unknown, other, or absent
  misc_difference 196: note = a, c, g, u, unknown, other, or absent
  misc_difference 197: note = a, c, g, u, unknown, other, or absent
  misc_difference 198: note = a, c, g, u, unknown, other, or absent
  misc_difference 199: note = a, c, g, u, unknown, other, or absent
  misc_difference 200: note = a, c, g, u, unknown, other, or absent
  misc_difference 201: note = a, c, g, u, unknown, other, or absent
  misc_difference 202: note = a, c, g, u, unknown, other, or absent
  misc_difference 203: note = a, c, g, u, unknown, other, or absent
  misc_difference 204: note = a, c, g, u, unknown, other, or absent
  misc_difference 205: note = a, c, g, u, unknown, other, or absent
  misc_difference 206: note = a, c, g, u, unknown, other, or absent
  misc_difference 207: note = a, c, g, u, unknown, other, or absent
  misc_difference 208: note = a, c, g, u, unknown, other, or absent
  misc_difference 209: note = a, c, g, u, unknown, other, or absent
  misc_difference 210: note = a, c, g, u, unknown, other, or absent
  misc_difference 211: note = a, c, g, u, unknown, other, or absent
  misc_difference 212: note = a, c, g, u, unknown, other, or absent
  misc_difference 213: note = a, c, g, u, unknown, other, or absent
  misc_difference 214: note = a, c, g, u, unknown, other, or absent
  misc_difference 215: note = a, c, g, u, unknown, other, or absent
  misc_difference 216: note = a, c, g, u, unknown, other, or absent
  misc_difference 217: note = a, c, g, u, unknown, other, or absent
  misc_difference 218: note = a, c, g, u, unknown, other, or absent
  misc_difference 219: note = a, c, g, u, unknown, other, or absent
  misc_difference 220: note = a, c, g, u, unknown, other, or absent
  misc_difference 221: note = a, c, g, u, unknown, other, or absent
  misc_difference 222: note = a, c, g, u, unknown, other, or absent
  misc_difference 223: note = a, c, g, u, unknown, other, or absent
  misc_difference 224: note = a, c, g, u, unknown, other, or absent
  misc_difference 225: note = a, c, g, u, unknown, other, or absent
  misc_difference 226: note = a, c, g, u, unknown, other, or absent
  misc_difference 227: note = a, c, g, u, unknown, other, or absent
  misc_difference 228: note = a, c, g, u, unknown, other, or absent
  misc_difference 229: note = a, c, g, u, unknown, other, or absent
  misc_difference 230: note = a, c, g, u, unknown, other, or absent
  misc_difference 231: note = a, c, g, u, unknown, other, or absent
  misc_difference 232: note = a, c, g, u, unknown, other, or absent
  misc_difference 233: note = a, c, g, u, unknown, other, or absent
  misc_difference 234: note = a, c, g, u, unknown, other, or absent
  misc_difference 235: note = a, c, g, u, unknown, other, or absent
  misc_difference 236: note = a, c, g, u, unknown, other, or absent
  misc_difference 237: note = a, c, g, u, unknown, other, or absent
  misc_difference 238: note = a, c, g, u, unknown, other, or absent
  misc_difference 239: note = a, c, g, u, unknown, other, or absent
  misc_difference 240: note = a, c, g, u, unknown, other, or absent
  misc_difference 241: note = a, c, g, u, unknown, other, or absent
  misc_difference 242: note = a, c, g, u, unknown, other, or absent
  misc_difference 243: note = a, c, g, u, unknown, other, or absent
  misc_difference 244: note = a, c, g, u, unknown, other, or absent
  misc_difference 245: note = a, c, g, u, unknown, other, or absent
  misc_difference 246: note = a, c, g, u, unknown, other, or absent
  misc_difference 247: note = a, c, g, u, unknown, other, or absent
  misc_difference 248: note = a, c, g, u, unknown, other, or absent
  misc_difference 249: note = a, c, g, u, unknown, other, or absent
  misc_difference 250: note = a, c, g, u, unknown, other, or absent
  misc_difference 251: note = a, c, g, u, unknown, other, or absent
  misc_difference 252: note = a, c, g, u, unknown, other, or absent
  misc_difference 253: note = a, c, g, u, unknown, other, or absent
  misc_difference 254: note = a, c, g, u, unknown, other, or absent
  misc_difference 255: note = a, c, g, u, unknown, other, or absent
  misc_difference 256: note = a, c, g, u, unknown, other, or absent
  misc_difference 257: note = a, c, g, u, unknown, other, or absent
  misc_difference 258: note = a, c, g, u, unknown, other, or absent
  misc_difference 259: note = a, c, g, u, unknown, other, or absent
  misc_difference 260: note = a, c, g, u, unknown, other, or absent
  misc_difference 261: note = a, c, g, u, unknown, other, or absent
  misc_difference 262: note = a, c, g, u, unknown, other, or absent
  misc_difference 263: note = a, c, g, u, unknown, other, or absent
  misc_difference 264: note = a, c, g, u, unknown, other, or absent
  misc_difference 265: note = a, c, g, u, unknown, other, or absent
  misc_difference 266: note = a, c, g, u, unknown, other, or absent
  misc_difference 267: note = a, c, g, u, unknown, other, or absent
  misc_difference 268: note = a, c, g, u, unknown, other, or absent
  misc_difference 269: note = a, c, g, u, unknown, other, or absent
  misc_difference 270: note = a, c, g, u, unknown, other, or absent
  misc_difference 271: note = a, c, g, u, unknown, other, or absent
  misc_difference 272: note = a, c, g, u, unknown, other, or absent
  misc_difference 273: note = a, c, g, u, unknown, other, or absent
  misc_difference 274: note = a, c, g, u, unknown, other, or absent
  misc_difference 275: note = a, c, g, u, unknown, other, or absent
  misc_difference 276: note = a, c, g, u, unknown, other, or absent
  misc_difference 277: note = a, c, g, u, unknown, other, or absent
  misc_difference 278: note = a, c, g, u, unknown, other, or absent
  misc_difference 279: note = a, c, g, u, unknown, other, or absent
  misc_difference 280: note = a, c, g, u, unknown, other, or absent
  misc_difference 281: note = a, c, g, u, unknown, other, or absent
  misc_difference 282: note = a, c, g, u, unknown, other, or absent
  misc_difference 283: note = a, c, g, u, unknown, other, or absent
  misc_difference 284: note = a, c, g, u, unknown, other, or absent
  misc_difference 285: note = a, c, g, u, unknown, other, or absent
  misc_difference 286: note = a, c, g, u, unknown, other, or absent
  misc_difference 287: note = a, c, g, u, unknown, other, or absent
  misc_difference 288: note = a, c, g, u, unknown, other, or absent
  misc_difference 289: note = a, c, g, u, unknown, other, or absent
  misc_difference 290: note = a, c, g, u, unknown, other, or absent
  misc_difference 291: note = a, c, g, u, unknown, other, or absent
  misc_difference 292: note = a, c, g, u, unknown, other, or absent
  misc_difference 293: note = a, c, g, u, unknown, other, or absent
  misc_difference 294: note = a, c, g, u, unknown, other, or absent
  misc_difference 295: note = a, c, g, u, unknown, other, or absent
  misc_difference 296: note = a, c, g, u, unknown, other, or absent
  misc_difference 297: note = a, c, g, u, unknown, other, or absent
  misc_difference 298: note = a, c, g, u, unknown, other, or absent
  misc_difference 299: note = a, c, g, u, unknown, other, or absent
  misc_difference 300: note = a, c, g, u, unknown, other, or absent
  misc_difference 301: note = a, c, g, u, unknown, other, or absent
  misc_difference 302: note = a, c, g, u, unknown, other, or absent
  misc_difference 303: note = a, c, g, u, unknown, other, or absent
  misc_difference 304: note = a, c, g, u, unknown, other, or absent
  misc_difference 305: note = a, c, g, u, unknown, other, or absent
  misc_difference 306: note = a, c, g, u, unknown, other, or absent
  misc_difference 307: note = a, c, g, u, unknown, other, or absent
  misc_difference 308: note = a, c, g, u, unknown, other, or absent
  misc_difference 309: note = a, c, g, u, unknown, other, or absent
  misc_difference 310: note = a, c, g, u, unknown, other, or absent
  misc_difference 311: note = a, c, g, u, unknown, other, or absent
  misc_difference 312: note = a, c, g, u, unknown, other, or absent
  misc_difference 313: note = a, c, g, u, unknown, other, or absent
  misc_difference 314: note = a, c, g, u, unknown, other, or absent
  misc_difference 315: note = a, c, g, u, unknown, other, or absent
  misc_difference 316: note = a, c, g, u, unknown, other, or absent
  misc_difference 317: note = May be absent
  misc_difference 318: note = May be absent
  misc_difference 319: note = May be absent
  misc_difference 320: note = May be absent
  misc_difference 321: note = May be absent
  misc_difference 322: note = May be absent
  misc_difference 323: note = May be absent
  misc_difference 324: note = May be absent
  misc_difference 325: note = May be absent
  misc_difference 326: note = May be absent
  misc_difference 327: note = May be absent
  misc_difference 328: note = May be absent
  misc_difference 329: note = May be absent
  misc_difference 330: note = May be absent
  misc_difference 331: note = May be absent
  misc_difference 332: note = May be absent
  misc_difference 333: note = May be absent
  misc_difference 334: note = May be absent
  misc_difference 335: note = a, c, g, u, unknown, other, or absent
  misc_difference 336: note = a, c, g, u, unknown, other, or absent
  misc_difference 337: note = May be absent
  misc_difference 338: note = a, c, g, u, unknown, other, or absent
  misc_difference 339: note = a, c, g, u, unknown, other, or absent
  misc_difference 340: note = May be absent
  misc_difference 341: note = May be absent
  misc_difference 46..317: note = This region may encompass 1-271 nucleotides
knndnbrtrgchsarkctggttavdghrwykrrctnswrayymrdnnnnnnnnnnnnnnnnnnnnnnnnnnnnnnnnnnnnnnnnnnnnnnnnnnnnnnnnnnnnnnnnnnnnnnnnnnnnnnnnnnnnnnnnnnnnnnnnnnnnnnnnnnnnnnnnnnnnnnnnnnnnnnnnnnnnnnnnnnnnnnnnnnnnnnnnnnnnnnnnnnnnnnnnnnnnnnnnnnnnnnnnnnnnnnnnnnnnnnnnnnnnnnnnnnnnnnnnnnnnnnnnnnnnnnnnnnnnnnnnnnnnnnnnnnnnnnnnnnnnnnnnnnnnnnnvydggttyraaycchrbynnynnyk

SEQ ID NO: 610 - RNA, 341 nt, synthetic construct
  source 1..341: mol_type = other RNA
  misc_difference 1: note = May be absent
  misc_difference 2: note = May be absent
  misc_difference 3: note = May be absent
  misc_difference 4: note = a, c, g, u, unknown, other, or absent
  misc_difference 5: note = a, c, g, u, unknown, other, or absent
  misc_difference 6: note = a, c, g, u, unknown, other, or absent
  misc_difference 7: note = a, c, g, u, unknown, other, or absent
  misc_difference 8: note = May be absent
  misc_difference 9: note = May be absent
  misc_difference 10: note = May be absent
  misc_difference 11: note = May be absent
  misc_difference 12: note = a, c, g, u, unknown, other, or absent
  misc_difference 13: note = May be absent
  misc_difference 14: note = May be absent
  misc_difference 15: note = May be absent
  misc_difference 16: note = a, c, g, u, unknown, other, or absent
  misc_difference 17: note = May be absent
  misc_difference 18: note = May be absent
  misc_difference 19: note = May be absent
  misc_difference 20: note = May be absent
  misc_difference 21: note = May be absent
  misc_difference 22: note = May be absent
  misc_difference 23: note = May be absent
  misc_difference 24: note = May be absent
  misc_difference 25: note = a, c, g, u, unknown, other, or absent
  misc_difference 26: note = May be absent
  misc_difference 27: note = May be absent
  misc_difference 28: note = May be absent
  misc_difference 29: note = a, c, g, u, unknown, other, or absent
  misc_difference 30: note = a, c, g, u, unknown, other, or absent
  misc_difference 31: note = a, c, g, u, unknown, other, or absent
  misc_difference 32: note = May be absent
  misc_difference 33: note = a, c, g, u, unknown, other, or absent
  misc_difference 34: note = May be absent
  misc_difference 35: note = May be absent
  misc_difference 36: note = a, c, g, u, unknown, other, or absent
  misc_difference 37: note = May be absent
  misc_difference 38: note = May be absent
  misc_difference 39: note = May be absent
  misc_difference 40: note = May be absent
  misc_difference 41: note = a, c, g, u, unknown, other, or absent
  misc_difference 42: note = May be absent
  misc_difference 43: note = a, c, g, u, unknown, other, or absent
  misc_difference 44: note = a, c, g, u, unknown, other, or absent
  misc_difference 45: note = a, c, g, u, unknown, other, or absent
  misc_difference 46: note = a, c, g, u, unknown, other, or absent
  misc_difference 47: note = a, c, g, u, unknown, other, or absent
  misc_difference 48: note = a, c, g, u, unknown, other, or absent
  misc_difference 49: note = a, c, g, u, unknown, other, or absent
  misc_difference 50: note = a, c, g, u, unknown, other, or absent
  misc_difference 51: note = a, c, g, u, unknown, other, or absent
  misc_difference 52: note = a, c, g, u, unknown, other, or absent
  misc_difference 53: note = a, c, g, u, unknown, other, or absent
  misc_difference 54: note = a, c, g, u, unknown, other, or absent
  misc_difference 55: note = a, c, g, u, unknown, other, or absent
  misc_difference 56: note = a, c, g, u, unknown, other, or absent
  misc_difference 57: note = a, c, g, u, unknown, other, or absent
  misc_difference 58: note = a, c, g, u, unknown, other, or absent
  misc_difference 59: note = a, c, g, u, unknown, other, or absent
  misc_difference 60: note = a, c, g, u, unknown, other, or absent
  misc_difference 61: note = a, c, g, u, unknown, other, or absent
  misc_difference 62: note = a, c, g, u, unknown, other, or absent
  misc_difference 63: note = a, c, g, u, unknown, other, or absent
  misc_difference 64: note = a, c, g, u, unknown, other, or absent
  misc_difference 65: note = a, c, g, u, unknown, other, or absent
  misc_difference 66: note = a, c, g, u, unknown, other, or absent
  misc_difference 67: note = a, c, g, u, unknown, other, or absent
  misc_difference 68: note = a, c, g, u, unknown, other, or absent
  misc_difference 69: note = a, c, g, u, unknown, other, or absent
  misc_difference 70: note = a, c, g, u, unknown, other, or absent
  misc_difference 71: note = a, c, g, u, unknown, other, or absent
  misc_difference 72: note = a, c, g, u, unknown, other, or absent
  misc_difference 73: note = a, c, g, u, unknown, other, or absent
  misc_difference 74: note = a, c, g, u, unknown, other, or absent
  misc_difference 75: note = a, c, g, u, unknown, other, or absent
  misc_difference 76: note = a, c, g, u, unknown, other, or absent
  misc_difference 77: note = a, c, g, u, unknown, other, or absent
  misc_difference 78: note = a, c, g, u, unknown, other, or absent
  misc_difference 79: note = a, c, g, u, unknown, other, or absent
  misc_difference 80: note = a, c, g, u, unknown, other, or absent
  misc_difference 81: note = a, c, g, u, unknown, other, or absent
  misc_difference 82: note = a, c, g, u, unknown, other, or absent
  misc_difference 83: note = a, c, g, u, unknown, other, or absent
  misc_difference 84: note = a, c, g, u, unknown, other, or absent
  misc_difference 85: note = a, c, g, u, unknown, other, or absent
  misc_difference 86: note = a, c, g, u, unknown, other, or absent
  misc_difference 87: note = a, c, g, u, unknown, other, or absent
  misc_difference 88: note = a, c, g, u, unknown, other, or absent
  misc_difference 89: note = a, c, g, u, unknown, other, or absent
  misc_difference 90: note = a, c, g, u, unknown, other, or absent
  misc_difference 91: note = a, c, g, u, unknown, other, or absent
  misc_difference 92: note = a, c, g, u, unknown, other, or absent
  misc_difference 93: note = a, c, g, u, unknown, other, or absent
  misc_difference 94: note = a, c, g, u, unknown, other, or absent
  misc_difference 95: note = a, c, g, u, unknown, other, or absent
  misc_difference 96: note = a, c, g, u, unknown, other, or absent
  misc_difference 97: note = a, c, g, u, unknown, other, or absent
  misc_difference 98: note = a, c, g, u, unknown, other, or absent
  misc_difference 99: note = a, c, g, u, unknown, other, or absent
  misc_difference 100: note = a, c, g, u, unknown, other, or absent
  misc_difference 101: note = a, c, g, u, unknown, other, or absent
  misc_difference 102: note = a, c, g, u, unknown, other, or absent
  misc_difference 103: note = a, c, g, u, unknown, other, or absent
  misc_difference 104: note = a, c, g, u, unknown, other, or absent
  misc_difference 105: note = a, c, g, u, unknown, other, or absent
  misc_difference 106: note = a, c, g, u, unknown, other, or absent
  misc_difference 107: note = a, c, g, u, unknown, other, or absent
  misc_difference 108: note = a, c, g, u, unknown, other, or absent
  misc_difference 109: note = a, c, g, u, unknown, other, or absent
  misc_difference 110: note = a, c, g, u, unknown, other, or absent
  misc_difference 111: note = a, c, g, u, unknown, other, or absent
  misc_difference 112: note = a, c, g, u, unknown, other, or absent
  misc_difference 113: note = a, c, g, u, unknown, other, or absent
  misc_difference 114: note = a, c, g, u, unknown, other, or absent
  misc_difference 115: note = a, c, g, u, unknown, other, or absent
  misc_difference 116: note = a, c, g, u, unknown, other, or absent
  misc_difference 117: note = a, c, g, u, unknown, other, or absent
  misc_difference 118: note = a, c, g, u, unknown, other, or absent
  misc_difference 119: note = a, c, g, u, unknown, other, or absent
  misc_difference 120: note = a, c, g, u, unknown, other, or absent
  misc_difference 121: note = a, c, g, u, unknown, other, or absent
  misc_difference 122: note = a, c, g, u, unknown, other, or absent
  misc_difference 123: note = a, c, g, u, unknown, other, or absent
  misc_difference 124: note = a, c, g, u, unknown, other, or absent
  misc_difference 125: note = a, c, g, u, unknown, other, or absent
  misc_difference 126: note = a, c, g, u, unknown, other, or absent
  misc_difference 127: note = a, c, g, u, unknown, other, or absent
  misc_difference 128: note = a, c, g, u, unknown, other, or absent
  misc_difference 129: note = a, c, g, u, unknown, other, or absent
  misc_difference 130: note = a, c, g, u, unknown, other, or absent
  misc_difference 131: note = a, c, g, u, unknown, other, or absent
  misc_difference 132: note = a, c, g, u, unknown, other, or absent
  misc_difference 133: note = a, c, g, u, unknown, other, or absent
  misc_difference 134: note = a, c, g, u, unknown, other, or absent
  misc_difference 135: note = a, c, g, u, unknown, other, or absent
  misc_difference 136: note = a, c, g, u, unknown, other, or absent
  misc_difference 137: note = a, c, g, u, unknown, other, or absent
  misc_difference 138: note = a, c, g, u, unknown, other, or absent
  misc_difference 139: note = a, c, g, u, unknown, other, or absent
  misc_difference 140: note = a, c, g, u, unknown, other, or absent
  misc_difference 141: note = a, c, g, u, unknown, other, or absent
  misc_difference 142: note = a, c, g, u, unknown, other, or absent
  misc_difference 143: note = a, c, g, u, unknown, other, or absent
  misc_difference 144: note = a, c, g, u, unknown, other, or absent
  misc_difference 145: note = a, c, g, u, unknown, other, or absent
  misc_difference 146: note = a, c, g, u, unknown, other, or absent
  misc_difference 147: note = a, c, g, u, unknown, other, or absent
  misc_difference 148: note = a, c, g, u, unknown, other, or absent
  misc_difference 149: note = a, c, g, u, unknown, other, or absent
  misc_difference 150: note = a, c, g, u, unknown, other, or absent
  misc_difference 151: note = a, c, g, u, unknown, other, or absent
  misc_difference 152: note = a, c, g, u, unknown, other, or absent
  misc_difference 153: note = a, c, g, u, unknown, other, or absent
  misc_difference 154: note = a, c, g, u, unknown, other, or absent
  misc_difference 155: note = a, c, g, u, unknown, other, or absent
  misc_difference 156: note = a, c, g, u, unknown, other, or absent
  misc_difference 157: note = a, c, g, u, unknown, other, or absent
  misc_difference 158: note = a, c, g, u, unknown, other, or absent
  misc_difference 159: note = a, c, g, u, unknown, other, or absent
  misc_difference 160: note = a, c, g, u, unknown, other, or absent
  misc_difference 161: note = a, c, g, u, unknown, other, or absent
  misc_difference 162: note = a, c, g, u, unknown, other, or absent
  misc_difference 163: note = a, c, g, u, unknown, other, or absent
  misc_difference 164: note = a, c, g, u, unknown, other, or absent
  misc_difference 165: note = a, c, g, u, unknown, other, or absent
  misc_difference 166: note = a, c, g, u, unknown, other, or absent
  misc_difference 167: note = a, c, g, u, unknown, other, or absent
  misc_difference 168: note = a, c, g, u, unknown, other, or absent
  misc_difference 169: note = a, c, g, u, unknown, other, or absent
  misc_difference 170: note = a, c, g, u, unknown, other, or absent
  misc_difference 171: note = a, c, g, u, unknown, other, or absent
  misc_difference 172: note = a, c, g, u, unknown, other, or absent
  misc_difference 173: note = a, c, g, u, unknown, other, or absent
  misc_difference 174: note = a, c, g, u, unknown, other, or absent
  misc_difference 175: note = a, c, g, u, unknown, other, or absent
  misc_difference 176: note = a, c, g, u, unknown, other, or absent
  misc_difference 177: note = a, c, g, u, unknown, other, or absent
  misc_difference 178: note = a, c, g, u, unknown, other, or absent
  misc_difference 179: note = a, c, g, u, unknown, other, or absent
  misc_difference 180: note = a, c, g, u, unknown, other, or absent
  misc_difference 181: note = a, c, g, u, unknown, other, or absent
  misc_difference 182: note = a, c, g, u, unknown, other, or absent
  misc_difference 183: note = a, c, g, u, unknown, other, or absent
  misc_difference 184: note = a, c, g, u, unknown, other, or absent
  misc_difference 185: note = a, c, g, u, unknown, other, or absent
  misc_difference 186: note = a, c, g, u, unknown, other, or absent
  misc_difference 187: note = a, c, g, u, unknown, other, or absent
  misc_difference 188: note = a, c, g, u, unknown, other, or absent
  misc_difference 189: note = a, c, g, u, unknown, other, or absent
  misc_difference 190: note = a, c, g, u, unknown, other, or absent
  misc_difference 191: note = a, c, g, u, unknown, other, or absent
  misc_difference 192: note = a, c, g, u, unknown, other, or absent
  misc_difference 193: note = a, c, g, u, unknown, other, or absent
  misc_difference 194: note = a, c, g, u, unknown, other, or absent
  misc_difference 195: note = a, c, g, u, unknown, other, or absent
  misc_difference 196: note = a, c, g, u, unknown, other, or absent
  misc_difference 197: note = a, c, g, u, unknown, other, or absent
  misc_difference 198: note = a, c, g, u, unknown, other, or absent
  misc_difference 199: note = a, c, g, u, unknown, other, or absent
  misc_difference 200: note = a, c, g, u, unknown, other, or absent
  misc_difference 201: note = a, c, g, u, unknown, other, or absent
  misc_difference 202: note = a, c, g, u, unknown, other, or absent
  misc_difference 203: note = a, c, g, u, unknown, other, or absent
  misc_difference 204: note = a, c, g, u, unknown, other, or absent
  misc_difference 205: note = a, c, g, u, unknown, other, or absent
  misc_difference 206: note = a, c, g, u, unknown, other, or absent
  misc_difference 207: note = a, c, g, u, unknown, other, or absent
  misc_difference 208: note = a, c, g, u, unknown, other, or absent
  misc_difference 209: note = a, c, g, u, unknown, other, or absent
  misc_difference 210: note = a, c, g, u, unknown, other, or absent
  misc_difference 211: note = a, c, g, u, unknown, other, or absent
  misc_difference 212: note = a, c, g, u, unknown, other, or absent
  misc_difference 213: note = a, c, g, u, unknown, other, or absent
  misc_difference 214: note = a, c, g, u, unknown, other, or absent
  misc_difference 215: note = a, c, g, u, unknown, other, or absent
  misc_difference 216: note = a, c, g, u, unknown, other, or absent
  misc_difference 217: note = a, c, g, u, unknown, other, or absent
  misc_difference 218: note = a, c, g, u, unknown, other, or absent
  misc_difference 219: note = a, c, g, u, unknown, other, or absent
  misc_difference 220: note = a, c, g, u, unknown, other, or absent
  misc_difference 221: note = a, c, g, u, unknown, other, or absent
  misc_difference 222: note = a, c, g, u, unknown, other, or absent
  misc_difference 223: note = a, c, g, u, unknown, other, or absent
  misc_difference 224: note = a, c, g, u, unknown, other, or absent
  misc_difference 225: note = a, c, g, u, unknown, other, or absent
  misc_difference 226: note = a, c, g, u, unknown, other, or absent
  misc_difference 227: note = a, c, g, u, unknown, other, or absent
  misc_difference 228: note = a, c, g, u, unknown, other, or absent
  misc_difference 229: note = a, c, g, u, unknown, other, or absent
  misc_difference 230: note = a, c, g, u, unknown, other, or absent
  misc_difference 231: note = a, c, g, u, unknown, other, or absent
  misc_difference 232: note = a, c, g, u, unknown, other, or absent
  misc_difference 233: note = a, c, g, u, unknown, other, or absent
  misc_difference 234: note = a, c, g, u, unknown, other, or absent
  misc_difference 235: note = a, c, g, u, unknown, other, or absent
  misc_difference 236: note = a, c, g, u, unknown, other, or absent
  misc_difference 237: note = a, c, g, u, unknown, other, or absent
  misc_difference 238: note = a, c, g, u, unknown, other, or absent
  misc_difference 239: note = a, c, g, u, unknown, other, or absent
  misc_difference 240: note = a, c, g, u, unknown, other, or absent
  misc_difference 241: note = a, c, g, u, unknown, other, or absent
  misc_difference 242: note = a, c, g, u, unknown, other, or absent
  misc_difference 243: note = a, c, g, u, unknown, other, or absent
  misc_difference 244: note = a, c, g, u, unknown, other, or absent
  misc_difference 245: note = a, c, g, u, unknown, other, or absent
  misc_difference 246: note = a, c, g, u, unknown, other, or absent
  misc_difference 247: note = a, c, g, u, unknown, other, or absent
  misc_difference 248: note = a, c, g, u, unknown, other, or absent
  misc_difference 249: note = a, c, g, u, unknown, other, or absent
  misc_difference 250: note = a, c, g, u, unknown, other, or absent
  misc_difference 251: note = a, c, g, u, unknown, other, or absent
  misc_difference 252: note = a, c, g, u, unknown, other, or absent
  misc_difference 253: note = a, c, g, u, unknown, other, or absent
  misc_difference 254: note = a, c, g, u, unknown, other, or absent
  misc_difference 255: note = a, c, g, u, unknown, other, or absent
  misc_difference 256: note = a, c, g, u, unknown, other, or absent
  misc_difference 257: note = a, c, g, u, unknown, other, or absent
  misc_difference 258: note = a, c, g, u, unknown, other, or absent
  misc_difference 259: note = a, c, g, u, unknown, other, or absent
  misc_difference 260: note = a, c, g, u, unknown, other, or absent
  misc_difference 261: note = a, c, g, u, unknown, other, or absent
  misc_difference 262: note = a, c, g, u, unknown, other, or absent
  misc_difference 263: note = a, c, g, u, unknown, other, or absent
  misc_difference 264: note = a, c, g, u, unknown, other, or absent
  misc_difference 265: note = a, c, g, u, unknown, other, or absent
  misc_difference 266: note = a, c, g, u, unknown, other, or absent
  misc_difference 267: note = a, c, g, u, unknown, other, or absent
  misc_difference 268: note = a, c, g, u, unknown, other, or absent
  misc_difference 269: note = a, c, g, u, unknown, other, or absent
  misc_difference 270: note = a, c, g, u, unknown, other, or absent
  misc_difference 271: note = a, c, g, u, unknown, other, or absent
  misc_difference 272: note = a, c, g, u, unknown, other, or absent
  misc_difference 273: note = a, c, g, u, unknown, other, or absent
  misc_difference 274: note = a, c, g, u, unknown, other, or absent
  misc_difference 275: note = a, c, g, u, unknown, other, or absent
  misc_difference 276: note = a, c, g, u, unknown, other, or absent
  misc_difference 277: note = a, c, g, u, unknown, other, or absent
  misc_difference 278: note = a, c, g, u, unknown, other, or absent
  misc_difference 279: note = a, c, g, u, unknown, other, or absent
  misc_difference 280: note = a, c, g, u, unknown, other, or absent
  misc_difference 281: note = a, c, g, u, unknown, other, or absent
  misc_difference 282: note = a, c, g, u, unknown, other, or absent
  misc_difference 283: note = a, c, g, u, unknown, other, or absent
  misc_difference 284: note = a, c, g, u, unknown, other, or absent
  misc_difference 285: note = a, c, g, u, unknown, other, or absent
  misc_difference 286: note = a, c, g, u, unknown, other, or absent
  misc_difference 287: note = a, c, g, u, unknown, other, or absent
  misc_difference 288: note = a, c, g, u, unknown, other, or absent
  misc_difference 289: note = a, c, g, u, unknown, other, or absent
  misc_difference 290: note = a, c, g, u, unknown, other, or absent
  misc_difference 291: note = a, c, g, u, unknown, other, or absent
  misc_difference 292: note = a, c, g, u, unknown, other, or absent
  misc_difference 293: note = a, c, g, u, unknown, other, or absent
  misc_difference 294: note = a, c, g, u, unknown, other, or absent
  misc_difference 295: note = a, c, g, u, unknown, other, or absent
  misc_difference 296: note = a, c, g, u, unknown, other, or absent
  misc_difference 297: note = a, c, g, u, unknown, other, or absent
  misc_difference 298: note = a, c, g, u, unknown, other, or absent
  misc_difference 299: note = a, c, g, u, unknown, other, or absent
  misc_difference 300: note = a, c, g, u, unknown, other, or absent
  misc_difference 301: note = a, c, g, u, unknown, other, or absent
  misc_difference 302: note = a, c, g, u, unknown, other, or absent
  misc_difference 303: note = a, c, g, u, unknown, other, or absent
  misc_difference 304: note = a, c, g, u, unknown, other, or absent
  misc_difference 305: note = a, c, g, u, unknown, other, or absent
  misc_difference 306: note = a, c, g, u, unknown, other, or absent
  misc_difference 307: note = a, c, g, u, unknown, other, or absent
  misc_difference 308: note = a, c, g, u, unknown, other, or absent
  misc_difference 309: note = a, c, g, u, unknown, other, or absent
  misc_difference 310: note = a, c, g, u, unknown, other, or absent
  misc_difference 311: note = a, c, g, u, unknown, other, or absent
  misc_difference 312: note = a, c, g, u, unknown, other, or absent
  misc_difference 313: note = a, c, g, u, unknown, other, or absent
  misc_difference 314: note = a, c, g, u, unknown, other, or absent
  misc_difference 315: note = a, c, g, u, unknown, other, or absent
  misc_difference 316: note = a, c, g, u, unknown, other, or absent
  misc_difference 317: note = a, c, g, u, unknown, other, or absent
  misc_difference 318: note = a, c, g, u, unknown, other, or absent
  misc_difference 319: note = a, c, g, u, unknown, other, or absent
  misc_difference 320: note = May be absent
  misc_difference 321: note = May be absent
  misc_difference 322: note = May be absent
  misc_difference 323: note = May be absent
  misc_difference 324: note = May be absent
  misc_difference 325: note = May be absent
  misc_difference 326: note = May be absent
  misc_difference 327: note = a, c, g, u, unknown, other, or absent
  misc_difference 328: note = May be absent
  misc_difference 329: note = May be absent
  misc_difference 330: note = May be absent
  misc_difference 331: note = a, c, g, u, unknown, other, or absent
  misc_difference 332: note = a, c, g, u, unknown, other, or absent
  misc_difference 333: note = a, c, g, u, unknown, other, or absent
  misc_difference 334: note = a, c, g, u, unknown, other, or absent
  misc_difference 335: note = a, c, g, u, unknown, other, or absent
  misc_difference 336: note = a, c, g, u, unknown, other, or absent
  misc_difference 337: note = a, c, g, u, unknown, other, or absent
  misc_difference 338: note = May be absent
  misc_difference 339: note = May be absent
  misc_difference 340: note = May be absent
  misc_difference 341: note = a, c, g, u, unknown, other, or absent
  misc_difference 43..314: note = This region may encompass 1-271 nucleotides
rbbnnnntrgynhadnhykghyrdnryrnnnsnhyngtwansnnnnnnnnnnnnnnnnnnnnnnnnnnnnnnnnnnnnnnnnnnnnnnnnnnnnnnnnnnnnnnnnnnnnnnnnnnnnnnnnnnnnnnnnnnnnnnnnnnnnnnnnnnnnnnnnnnnnnnnnnnnnnnnnnnnnnnnnnnnnnnnnnnnnnnnnnnnnnnnnnnnnnnnnnnnnnnnnnnnnnnnnnnnnnnnnnnnnnnnnnnnnnnnnnnnnnnnnnnnnnnnnnnnnnnnnnnnnnnnnnnnnnnnnnnnnnnnnnnnnnnnnnnnnnnnnnnnnndgwyyvanbyhnnnnnnnrvyn

SEQ ID NO: 611 - RNA, 340 nt, synthetic construct
  source 1..340: mol_type = other RNA
  misc_difference 1: note = May be absent
  misc_difference 2: note = May be absent
  misc_difference 3: note = May be absent
  misc_difference 4: note = a, c, g, u, unknown, other, or absent
  misc_difference 5: note = May be absent
  misc_difference 6: note = a, c, g, u, unknown, other, or absent
  misc_difference 7: note = May be absent
  misc_difference 8: note = May be absent
  misc_difference 9: note = May be absent
  misc_difference 10: note = May be absent
  misc_difference 11: note = May be absent
  misc_difference 12: note = a, c, g, u, unknown, other, or absent
  misc_difference 13: note = May be absent
  misc_difference 14: note = May be absent
  misc_difference 15: note = May be absent
  misc_difference 16: note = May be absent
  misc_difference 17: note = May be absent
  misc_difference 18: note = May be absent
  misc_difference 19: note = May be absent
  misc_difference 20: note = May be absent
  misc_difference 21: note = May be absent
  misc_difference 22: note = May be absent
  misc_difference 23: note = May be absent
  misc_difference 24: note = a, c, g, u, unknown, other, or absent
  misc_difference 25: note = May be absent
  misc_difference 26: note = May be absent
  misc_difference 27: note = May be absent
  misc_difference 28: note = May be absent
  misc_difference 29: note = May be absent
  misc_difference 30: note = May be absent
  misc_difference 31: note = May be absent
  misc_difference 32: note = May be absent
  misc_difference 33: note = May be absent
  misc_difference 34: note = May be absent
  misc_difference 35: note = May be absent
  misc_difference 36: note = May be absent
  misc_difference 37: note = May be absent
  misc_difference 38: note = May be absent
  misc_difference 39: note = May be absent
  misc_difference 40: note = May be absent
  misc_difference 41: note = May be absent
  misc_difference 42: note = May be absent
  misc_difference 43: note = May be absent
  misc_difference 44: note = May be absent
  misc_difference 45: note = a, c, g, u, unknown, other, or absent
  misc_difference 46: note = a, c, g, u, unknown, other, or absent
  misc_difference 47: note = a, c, g, u, unknown, other, or absent
  misc_difference 48: note = a, c, g, u, unknown, other, or absent
  misc_difference 49: note = a, c, g, u, unknown, other, or absent
  misc_difference 50: note = a, c, g, u, unknown, other, or absent
  misc_difference 51: note = a, c, g, u, unknown, other, or absent
  misc_difference 52: note = a, c, g, u, unknown, other, or absent
  misc_difference 53: note = a, c, g, u, unknown, other, or absent
  misc_difference 54: note = a, c, g, u, unknown, other, or absent
  misc_difference 55: note = a, c, g, u, unknown, other, or absent
  misc_difference 56: note = a, c, g, u, unknown, other, or absent
  misc_difference 57: note = a, c, g, u, unknown, other, or absent
  misc_difference 58: note = a, c, g, u, unknown, other, or absent
  misc_difference 59: note = a, c, g, u, unknown, other, or absent
  misc_difference 60: note = a, c, g, u, unknown, other, or absent
  misc_difference 61: note = a, c, g, u, unknown, other, or absent
  misc_difference 62: note = a, c, g, u, unknown, other, or absent
  misc_difference 63: note = a, c, g, u, unknown, other, or absent
  misc_difference 64: note = a, c, g, u, unknown, other, or absent
  misc_difference 65: note = a, c, g, u, unknown, other, or absent
  misc_difference 66: note = a, c, g, u, unknown, other, or absent
  misc_difference 67: note = a, c, g, u, unknown, other, or absent
  misc_difference 68: note = a, c, g, u, unknown, other, or absent
  misc_difference 69: note = a, c, g, u, unknown, other, or absent
  misc_difference 70: note = a, c, g, u, unknown, other, or absent
  misc_difference 71: note = a, c, g, u, unknown, other, or absent
  misc_difference 72: note = a, c, g, u, unknown, other, or absent
  misc_difference 73: note = a, c, g, u, unknown, other, or absent
  misc_difference 74: note = a, c, g, u, unknown, other, or absent
  misc_difference 75: note = a, c, g, u, unknown, other, or absent
  misc_difference 76: note = a, c, g, u, unknown, other, or absent
  misc_difference 77: note = a, c, g, u, unknown, other, or absent
  misc_difference 78: note = a, c, g, u, unknown, other, or absent
  misc_difference 79: note = a, c, g, u, unknown, other, or absent
  misc_difference 80: note = a, c, g, u, unknown, other, or absent
  misc_difference 81: note = a, c, g, u, unknown, other, or absent
  misc_difference 82: note = a, c, g, u, unknown, other, or absent
  misc_difference 83: note = a, c, g, u, unknown, other, or absent
  misc_difference 84: note = a, c, g, u, unknown, other, or absent
  misc_difference 85: note = a, c, g, u, unknown, other, or absent
  misc_difference 86: note = a, c, g, u, unknown, other, or absent
  misc_difference 87: note = a, c, g, u, unknown, other, or absent
  misc_difference 88: note = a, c, g, u, unknown, other, or absent
  misc_difference 89: note = a, c, g, u, unknown, other, or absent
  misc_difference 90: note = a, c, g, u, unknown, other, or absent
  misc_difference 91: note = a, c, g, u, unknown, other, or absent
  misc_difference 92: note = a, c, g, u, unknown, other, or absent
  misc_difference 93: note = a, c, g, u, unknown, other, or absent
  misc_difference 94: note = a, c, g, u, unknown, other, or absent
  misc_difference 95: note = a, c, g, u, unknown, other, or absent
  misc_difference 96: note = a, c, g, u, unknown, other, or absent
  misc_difference 97: note = a, c, g, u, unknown, other, or absent
  misc_difference 98: note = a, c, g, u, unknown, other, or absent
  misc_difference 99: note = a, c, g, u, unknown, other, or absent
  misc_difference 100: note = a, c, g, u, unknown, other, or absent
  misc_difference 101: note = a, c, g, u, unknown, other, or absent
  misc_difference 102: note = a, c, g, u, unknown, other, or absent
  misc_difference 103: note = a, c, g, u, unknown, other, or absent
  misc_difference 104: note = a, c, g, u, unknown, other, or absent
  misc_difference 105: note = a, c, g, u, unknown, other, or absent
  misc_difference 106: note = a, c, g, u, unknown, other, or absent
  misc_difference 107: note = a, c, g, u, unknown, other, or absent
  misc_difference 108: note = a, c, g, u, unknown, other, or absent
  misc_difference 109: note = a, c, g, u, unknown, other, or absent
  misc_difference 110: note = a, c, g, u, unknown, other, or absent
  misc_difference 111: note = a, c, g, u, unknown, other, or absent
  misc_difference 112: note = a, c, g, u, unknown, other, or absent
  misc_difference 113: note = a, c, g, u, unknown, other, or absent
  misc_difference 114: note = a, c, g, u, unknown, other, or absent
  misc_difference 115: note = a, c, g, u, unknown, other, or absent
  misc_difference 116: note = a, c, g, u, unknown, other, or absent
  misc_difference 117: note = a, c, g, u, unknown, other, or absent
  misc_difference 118: note = a, c, g, u, unknown, other, or absent
  misc_difference 119: note = a, c, g, u, unknown, other, or absent
  misc_difference 120: note = a, c, g, u, unknown, other, or absent
  misc_difference 121: note = a, c, g, u, unknown, other, or absent
  misc_difference 122: note = a, c, g, u, unknown, other, or absent
  misc_difference 123: note = a, c, g, u, unknown, other, or absent
  misc_difference 124: note = a, c, g, u, unknown, other, or absent
  misc_difference 125: note = a, c, g, u, unknown, other, or absent
  misc_difference 126: note = a, c, g, u, unknown, other, or absent
  misc_difference 127: note = a, c, g, u, unknown, other, or absent
  misc_difference 128: note = a, c, g, u, unknown, other, or absent
  misc_difference 129: note = a, c, g, u, unknown, other, or absent
  misc_difference 130: note = a, c, g, u, unknown, other, or absent
  misc_difference 131: note = a, c, g, u, unknown, other, or absent
  misc_difference 132: note = a, c, g, u, unknown, other, or absent
  misc_difference 133: note = a, c, g, u, unknown, other, or absent
  misc_difference 134: note = a, c, g, u, unknown, other, or absent
  misc_difference 135: note = a, c, g, u, unknown, other, or absent
  misc_difference 136: note = a, c, g, u, unknown, other, or absent
  misc_difference 137: note = a, c, g, u, unknown, other, or absent
  misc_difference 138: note = a, c, g, u, unknown, other, or absent
  misc_difference 139: note = a, c, g, u, unknown, other, or absent
  misc_difference 140: note = a, c, g, u, unknown, other, or absent
  misc_difference 141: note = a, c, g, u, unknown, other, or absent
  misc_difference 142: note = a, c, g, u, unknown, other, or absent
  misc_difference 143: note = a, c, g, u, unknown, other, or absent
  misc_difference 144: note = a, c, g, u, unknown, other, or absent
  misc_difference 145: note = a, c, g, u, unknown, other, or absent
  misc_difference 146: note = a, c, g, u, unknown, other, or absent
  misc_difference 147: note = a, c, g, u, unknown, other, or absent
  misc_difference 148: note = a, c, g, u, unknown, other, or absent
  misc_difference 149: note = a, c, g, u, unknown, other, or absent
  misc_difference 150: note = a, c, g, u, unknown, other, or absent
  misc_difference 151: note = a, c, g, u, unknown, other, or absent
  misc_difference 152: note = a, c, g, u, unknown, other, or absent
  misc_difference 153: note = a, c, g, u, unknown, other, or absent
  misc_difference 154: note = a, c, g, u, unknown, other, or absent
  misc_difference 155: note = a, c, g, u, unknown, other, or absent
  misc_difference 156: note = a, c, g, u, unknown, other, or absent
  misc_difference 157: note = a, c, g, u, unknown, other, or absent
  misc_difference 158: note = a, c, g, u, unknown, other, or absent
  misc_difference 159: note = a, c, g, u, unknown, other, or absent
  misc_difference 160: note = a, c, g, u, unknown, other, or absent
  misc_difference 161: note = a, c, g, u, unknown, other, or absent
  misc_difference 162: note = a, c, g, u, unknown, other, or absent
  misc_difference 163: note = a, c, g, u, unknown, other, or absent
  misc_difference 164: note = a, c, g, u, unknown, other, or absent
  misc_difference 165: note = a, c, g, u, unknown, other, or absent
  misc_difference 166: note = a, c, g, u, unknown, other, or absent
  misc_difference 167: note = a, c, g, u, unknown, other, or absent
  misc_difference 168: note = a, c, g, u, unknown, other, or absent
  misc_difference 169: note = a, c, g, u, unknown, other, or absent
  misc_difference 170: note = a, c, g, u, unknown, other, or absent
  misc_difference 171: note = a, c, g, u, unknown, other, or absent
  misc_difference 172: note = a, c, g, u, unknown, other, or absent
  misc_difference 173: note = a, c, g, u, unknown, other, or absent
  misc_difference 174: note = a, c, g, u, unknown, other, or absent
  misc_difference 175: note = a, c, g, u, unknown, other, or absent
  misc_difference 176: note = a, c, g, u, unknown, other, or absent
  misc_difference 177: note = a, c, g, u, unknown, other, or absent
  misc_difference 178: note = a, c, g, u, unknown, other, or absent
  misc_difference 179: note = a, c, g, u, unknown, other, or absent
  misc_difference 180: note = a, c, g, u, unknown, other, or absent
  misc_difference 181: note = a, c, g, u, unknown, other, or absent
  misc_difference 182: note = a, c, g, u, unknown, other, or absent
  misc_difference 183: note = a, c, g, u, unknown, other, or absent
  misc_difference 184: note = a, c, g, u, unknown, other, or absent
  misc_difference 185: note = a, c, g, u, unknown, other, or absent
  misc_difference 186: note = a, c, g, u, unknown, other, or absent
  misc_difference 187: note = a, c, g, u, unknown, other, or absent
  misc_difference 188: note = a, c, g, u, unknown, other, or absent
  misc_difference 189: note = a, c, g, u, unknown, other, or absent
  misc_difference 190: note = a, c, g, u, unknown, other, or absent
  misc_difference 191: note = a, c, g, u, unknown, other, or absent
  misc_difference 192: note = a, c, g, u, unknown, other, or absent
  misc_difference 193: note = a, c, g, u, unknown, other, or absent
  misc_difference 194: note = a, c, g, u, unknown, other, or absent
  misc_difference 195: note = a, c, g, u, unknown, other, or absent
  misc_difference 196: note = a, c, g, u, unknown, other, or absent
  misc_difference 197: note = a, c, g, u, unknown, other, or absent
  misc_difference 198: note = a, c, g, u, unknown, other, or absent
  misc_difference 199: note = a, c, g, u, unknown, other, or absent
  misc_difference 200: note = a, c, g, u, unknown, other, or absent
  misc_difference 201: note = a, c, g, u, unknown, other, or absent
  misc_difference 202: note = a, c, g, u, unknown, other, or absent
  misc_difference 203: note = a, c, g, u, unknown, other, or absent
  misc_difference 204: note = a, c, g, u, unknown, other, or absent
  misc_difference 205: note = a, c, g, u, unknown, other, or absent
  misc_difference 206: note = a, c, g, u, unknown, other, or absent
  misc_difference 207: note = a, c, g, u, unknown, other, or absent
  misc_difference 208: note = a, c, g, u, unknown, other, or absent
  misc_difference 209: note = a, c, g, u, unknown, other, or absent
  misc_difference 210: note = a, c, g, u, unknown, other, or absent
  misc_difference 211: note = a, c, g, u, unknown, other, or absent
  misc_difference 212: note = a, c, g, u, unknown, other, or absent
  misc_difference 213: note = a, c, g, u, unknown, other, or absent
  misc_difference 214: note = a, c, g, u, unknown, other, or absent
  misc_difference 215: note = a, c, g, u, unknown, other, or absent
  misc_difference 216: note = a, c, g, u, unknown, other, or absent
  misc_difference 217: note = a, c, g, u, unknown, other, or absent
  misc_difference 218: note = a, c, g, u, unknown, other, or absent
  misc_difference 219: note = a, c, g, u, unknown, other, or absent
  misc_difference 220: note = a, c, g, u, unknown, other, or absent
  misc_difference 221: note = a, c, g, u, unknown, other, or absent
  misc_difference 222: note = a, c, g, u, unknown, other, or absent
  misc_difference 223: note = a, c, g, u, unknown, other, or absent
  misc_difference 224: note = a, c, g, u, unknown, other, or absent
  misc_difference 225: note = a, c, g, u, unknown, other, or absent
  misc_difference 226: note = a, c, g, u, unknown, other, or absent
  misc_difference 227: note = a, c, g, u, unknown, other, or absent
  misc_difference 228: note = a, c, g, u, unknown, other, or absent
  misc_difference 229: note = a, c, g, u, unknown, other, or absent
  misc_difference 230: note = a, c, g, u, unknown, other, or absent
  misc_difference 231: note = a, c, g, u, unknown, other, or absent
  misc_difference 232: note = a, c, g, u, unknown, other, or absent
  misc_difference 233: note = a, c, g, u, unknown, other, or absent
  misc_difference 234: note = a, c, g, u, unknown, other, or absent
  misc_difference 235: note = a, c, g, u, unknown, other, or absent
  misc_difference 236: note = a, c, g, u, unknown, other, or absent
  misc_difference 237: note = a, c, g, u, unknown, other, or absent
  misc_difference 238: note = a, c, g, u, unknown, other, or absent
  misc_difference 239: note = a, c, g, u, unknown, other, or absent
  misc_difference 240: note = a, c, g, u, unknown, other, or absent
  misc_difference 241: note = a, c, g, u, unknown, other, or absent
  misc_difference 242: note = a, c, g, u, unknown, other, or absent
  misc_difference 243: note = a, c, g, u, unknown, other, or absent
  misc_difference 244: note = a, c, g, u, unknown, other, or absent
  misc_difference 245: note = a, c, g, u, unknown, other, or absent
  misc_difference 246: note = a, c, g, u, unknown, other, or absent
  misc_difference 247: note = a, c, g, u, unknown, other, or absent
  misc_difference 248: note = a, c, g, u, unknown, other, or absent
  misc_difference 249: note = a, c, g, u, unknown, other, or absent
  misc_difference 250: note = a, c, g, u, unknown, other, or absent
  misc_difference 251: note = a, c, g, u, unknown, other, or absent
  misc_difference 252: note = a, c, g, u, unknown, other, or absent
  misc_difference 253: note = a, c, g, u, unknown, other, or absent
  misc_difference 254: note = a, c, g, u, unknown, other, or absent
  misc_difference 255: note = a, c, g, u, unknown, other, or absent
  misc_difference 256: note = a, c, g, u, unknown, other, or absent
  misc_difference 257: note = a, c, g, u, unknown, other, or absent
  misc_difference 258: note = a, c, g, u, unknown, other, or absent
  misc_difference 259: note = a, c, g, u, unknown, other, or absent
  misc_difference 260: note = a, c, g, u, unknown, other, or absent
  misc_difference 261: note = a, c, g, u, unknown, other, or absent
  misc_difference 262: note = a, c, g, u, unknown, other, or absent
  misc_difference 263: note = a, c, g, u, unknown, other, or absent
  misc_difference 264: note = a, c, g, u, unknown, other, or absent
  misc_difference 265: note = a, c, g, u, unknown, other, or absent
  misc_difference 266: note = a, c, g, u, unknown, other, or absent
  misc_difference 267: note = a, c, g, u, unknown, other, or absent
  misc_difference 268: note = a, c, g, u, unknown, other, or absent
  misc_difference 269: note = a, c, g, u, unknown, other, or absent
  misc_difference 270: note = a, c, g, u, unknown, other, or absent
  misc_difference 271: note = a, c, g, u, unknown, other, or absent
  misc_difference 272: note = a, c, g, u, unknown, other, or absent
  misc_difference 273: note = a, c, g, u, unknown, other, or absent
  misc_difference 274: note = a, c, g, u, unknown, other, or absent
  misc_difference 275: note = a, c, g, u, unknown, other, or absent
  misc_difference 276: note = a, c, g, u, unknown, other, or absent
  misc_difference 277: note = a, c, g, u, unknown, other, or absent
  misc_difference 278: note = a, c, g, u, unknown, other, or absent
  misc_difference 279: note = a, c, g, u, unknown, other, or absent
  misc_difference 280: note = a, c, g, u, unknown, other, or absent
  misc_difference 281: note = a, c, g, u, unknown, other, or absent
  misc_difference 282: note = a, c, g, u, unknown, other, or absent
  misc_difference 283: note = a, c, g, u, unknown, other, or absent
  misc_difference 284: note = a, c, g, u, unknown, other, or absent
  misc_difference 285: note = a, c, g, u, unknown, other, or absent
  misc_difference 286: note = a, c, g, u, unknown, other, or absent
  misc_difference 287: note = a, c, g, u, unknown, other, or absent
  misc_difference 288: note = a, c, g, u, unknown, other, or absent
  misc_difference 289: note = a, c, g, u, unknown, other, or absent
  misc_difference 290: note = a, c, g, u, unknown, other, or absent
  misc_difference 291: note = a, c, g, u, unknown, other, or absent
  misc_difference 292: note = a, c, g, u, unknown, other, or absent
  misc_difference 293: note = a, c, g, u, unknown, other, or absent
  misc_difference 294: note = a, c, g, u, unknown, other, or absent
  misc_difference 295: note = a, c, g, u, unknown, other, or absent
  misc_difference 296: note = a, c, g, u, unknown, other, or absent
  misc_difference 297: note = a, c, g, u, unknown, other, or absent
  misc_difference 298: note = a, c, g, u, unknown, other, or absent
  misc_difference 299: note = a, c, g, u, unknown, other, or absent
  misc_difference 300: note = a, c, g, u, unknown, other, or absent
  misc_difference 301: note = a, c, g, u, unknown, other, or absent
  misc_difference 302: note = a, c, g, u, unknown, other, or absent
  misc_difference 303: note = a, c, g, u, unknown, other, or absent
  misc_difference 304: note = a, c, g, u, unknown, other, or absent
  misc_difference 305: note = a, c, g, u, unknown, other, or absent
  misc_difference 306: note = a, c, g, u, unknown, other, or absent
  misc_difference 307: note = a, c, g, u, unknown, other, or absent
  misc_difference 308: note = a, c, g, u, unknown, other, or absent
  misc_difference 309: note = a, c, g, u, unknown, other, or absent
  misc_difference 310: note = a, c, g, u, unknown, other, or absent
  misc_difference 311: note = a, c, g, u, unknown, other, or absent
  misc_difference 312: note = a, c, g, u, unknown, other, or absent
  misc_difference 313: note = a, c, g, u, unknown, other, or absent
  misc_difference 314: note = a, c, g, u, unknown, other, or absent
  misc_difference 315: note = a, c, g, u, unknown, other, or absent
  misc_difference 316: note = May be absent
  misc_difference 317: note = a, c, g, u, unknown, other, or absent
  misc_difference 318: note = May be absent
  misc_difference 319: note = May be absent
  misc_difference 320: note = May be absent
  misc_difference 321: note = May be absent
  misc_difference 322: note = May be absent
  misc_difference 323: note = May be absent
  misc_difference 324: note = May be absent
  misc_difference 325: note = May be absent
  misc_difference 326: note = a, c, g, u, unknown, other, or absent
  misc_difference 327: note = May be absent
  misc_difference 328: note = May be absent
  misc_difference 329: note = May be absent
  misc_difference 330: note = May be absent
  misc_difference 331: note = a, c, g, u, unknown, other, or absent
  misc_difference 332: note = a, c, g, u, unknown, other, or absent
  misc_difference 333: note = May be absent
  misc_difference 334: note = a, c, g, u, unknown, other, or absent
  misc_difference 335: note = May be absent
  misc_difference 336: note = a, c, g, u, unknown, other, or absent
  misc_difference 337: note = May be absent
  misc_difference 338: note = May be absent
  misc_difference 339: note = May be absent
  misc_difference 340: note = May be absent
  misc_difference 45..316: note = This region may encompass 1-271 nucleotides
rbbnbndtvgynharbygghyrdnryryhbsbcyhgtwavsvdrnnnnnnnnnnnnnnnnnnnnnnnnnnnnnnnnnnnnnnnnnnnnnnnnnnnnnnnnnnnnnnnnnnnnnnnnnnnnnnnnnnnnnnnnnnnnnnnnnnnnnnnnnnnnnnnnnnnnnnnnnnnnnnnnnnnnnnnnnnnnnnnnnnnnnnnnnnnnnnnnnnnnnnnnnnnnnnnnnnnnnnnnnnnnnnnnnnnnnnnnnnnnnnnnnnnnnnnnnnnnnnnnnnnnnnnnnnnnnnnnnnnnnnnnnnnnnnnnnnnnnnnnnnnnnnnvndrgwtyvanbyyhnnbndnrvyb

SEQ ID NO: 612 - RNA, 340 nt, synthetic construct
  source 1..340: mol_type = other RNA
  misc_difference 1: note = May be absent
  misc_difference 2: note = May be absent
  misc_difference 3: note = May be absent
  misc_difference 4: note = a, c, g, u, unknown, other, or absent
  misc_difference 5: note = May be absent
  misc_difference 6: note = a, c, g, u, unknown, other, or absent
  misc_difference 7: note = May be absent
  misc_difference 8: note = May be absent
  misc_difference 9: note = May be absent
  misc_difference 10: note = May be absent
  misc_difference 11: note = May be absent
  misc_difference 12: note = a, c, g, u, unknown, other, or absent
  misc_difference 13: note = May be absent
  misc_difference 14: note = May be absent
  misc_difference 15: note = May be absent
  misc_difference 16: note = May be absent
  misc_difference 17: note = May be absent
  misc_difference 18: note = May be absent
  misc_difference 19: note = May be absent
  misc_difference 20: note = May be absent
  misc_difference 21: note = May be absent
  misc_difference 22: note = May be absent
  misc_difference 23: note = May be absent
  misc_difference 24: note = a, c, g, u, unknown, other, or absent
  misc_difference 25: note = May be absent
  misc_difference 26: note = May be absent
  misc_difference 27: note = May be absent
  misc_difference 28: note = May be absent
  misc_difference 29: note = May be absent
  misc_difference 30: note = May be absent
  misc_difference 31: note = May be absent
  misc_difference 32: note = May be absent
  misc_difference 33: note = May be absent
  misc_difference 34: note = May be absent
  misc_difference 35: note = May be absent
  misc_difference 36: note = May be absent
  misc_difference 37: note = May be absent
  misc_difference 38: note = May be absent
  misc_difference 39: note = May be absent
  misc_difference 40: note = May be absent
  misc_difference 41: note = May be absent
  misc_difference 42: note = May be absent
  misc_difference 43: note = May be absent
  misc_difference 44: note = May be absent
  misc_difference 45: note = a, c, g, u, unknown, other, or absent
  misc_difference 46: note = a, c, g, u, unknown, other, or absent
  misc_difference 47: note = a, c, g, u, unknown, other, or absent
  misc_difference 48: note = a, c, g, u, unknown, other, or absent
  misc_difference 49: note = a, c, g, u, unknown, other, or absent
  misc_difference 50: note = a, c, g, u, unknown, other, or absent
  misc_difference 51: note = a, c, g, u, unknown, other, or absent
  misc_difference 52: note = a, c, g, u, unknown, other, or absent
  misc_difference 53: note = a, c, g, u, unknown, other, or absent
  misc_difference 54: note = a, c, g, u, unknown, other, or absent
  misc_difference 55: note = a, c, g, u, unknown, other, or absent
  misc_difference 56: note = a, c, g, u, unknown, other, or absent
  misc_difference 57: note = a, c, g, u, unknown, other, or absent
  misc_difference 58: note = a, c, g, u, unknown, other, or absent
  misc_difference 59: note = a, c, g, u, unknown, other, or absent
  misc_difference 60: note = a, c, g, u, unknown, other, or absent
  misc_difference 61: note = a, c, g, u, unknown, other, or absent
  misc_difference 62: note = a, c, g, u, unknown, other, or absent
  misc_difference 63: note = a, c, g, u, unknown, other, or absent
  misc_difference 64: note = a, c, g, u, unknown, other, or absent
  misc_difference 65: note = a, c, g, u, unknown, other, or absent
  misc_difference 66: note = a, c, g, u, unknown, other, or absent
  misc_difference 67: note = a, c, g, u, unknown, other, or absent
  misc_difference 68: note = a, c, g, u, unknown, other, or absent
  misc_difference 69: note = a, c, g, u, unknown, other, or absent
  misc_difference 70: note = a, c, g, u, unknown, other, or absent
  misc_difference 71: note = a, c, g, u, unknown, other, or absent
  misc_difference 72: note = a, c, g, u, unknown, other, or absent
  misc_difference 73: note = a, c, g, u, unknown, other, or absent
  misc_difference 74: note = a, c, g, u, unknown, other, or absent
  misc_difference 75: note = a, c, g, u, unknown, other, or absent
  misc_difference 76: note = a, c, g, u, unknown, other, or absent
  misc_difference 77: note = a, c, g, u, unknown, other, or absent
  misc_difference 78: note = a, c, g, u, unknown, other, or absent
  misc_difference 79: note = a, c, g, u, unknown, other, or absent
  misc_difference 80: note = a, c, g, u, unknown, other, or absent
  misc_difference 81: note = a, c, g, u, unknown, other, or absent
  misc_difference 82: note = a, c, g, u, unknown, other, or absent
  misc_difference 83: note = a, c, g, u, unknown, other, or absent
  misc_difference 84: note = a, c, g, u, unknown, other, or absent
  misc_difference 85: note = a, c, g, u, unknown, other, or absent
  misc_difference 86: note = a, c, g, u, unknown, other, or absent
  misc_difference 87: note = a, c, g, u, unknown, other, or absent
  misc_difference 88: note = a, c, g, u, unknown, other, or absent
  misc_difference 89: note = a, c, g, u, unknown, other, or absent
  misc_difference 90: note = a, c, g, u, unknown, other, or absent
  misc_difference 91: note = a, c, g, u, unknown, other, or absent
  misc_difference 92: note = a, c, g, u, unknown, other, or absent
  misc_difference 93: note = a, c, g, u, unknown, other, or absent
  misc_difference 94: note = a, c, g, u, unknown, other, or absent
  misc_difference 95: note = a, c, g, u, unknown, other, or absent
  misc_difference 96: note = a, c, g, u, unknown, other, or absent
  misc_difference 97: note = a, c, g, u, unknown, other, or absent
  misc_difference 98: note = a, c, g, u, unknown, other, or absent
  misc_difference 99: note = a, c, g, u, unknown, other, or absent
  misc_difference 100: note = a, c, g, u, unknown, other, or absent
  misc_difference 101: note = a, c, g, u, unknown, other, or absent
  misc_difference 102: note = a, c, g, u, unknown, other, or absent
  misc_difference 103: note = a, c, g, u, unknown, other, or absent
  misc_difference 104: note = a, c, g, u, unknown, other, or absent
  misc_difference 105: note = a, c, g, u, unknown, other, or absent
  misc_difference 106: note = a, c, g, u, unknown, other, or absent
  misc_difference 107: note = a, c, g, u, unknown, other, or absent
  misc_difference 108: note = a, c, g, u, unknown, other, or absent
  misc_difference 109: note = a, c, g, u, unknown, other, or absent
  misc_difference 110: note = a, c, g, u, unknown, other, or absent
  misc_difference 111: note = a, c, g, u, unknown, other, or absent
  misc_difference 112: note = a, c, g, u, unknown, other, or absent
  misc_difference 113: note = a, c, g, u, unknown, other, or absent
  misc_difference 114: note = a, c, g, u, unknown, other, or absent
  misc_difference 115: note = a, c, g, u, unknown, other, or absent
  misc_difference 116: note = a, c, g, u, unknown, other, or absent
  misc_difference 117: note = a, c, g, u, unknown, other, or absent
  misc_difference 118: note = a, c, g, u, unknown, other, or absent
  misc_difference 119: note = a, c, g, u, unknown, other, or absent
  misc_difference 120: note = a, c, g, u, unknown, other, or absent
  misc_difference 121: note = a, c, g, u, unknown, other, or absent
  misc_difference 122: note = a, c, g, u, unknown, other, or absent
  misc_difference 123: note = a, c, g, u, unknown, other, or absent
  misc_difference 124: note = a, c, g, u, unknown, other, or absent
  misc_difference 125: note = a, c, g, u, unknown, other, or absent
  misc_difference 126: note = a, c, g, u, unknown, other, or absent
  misc_difference 127: note = a, c, g, u, unknown, other, or absent
  misc_difference 128: note = a, c, g, u, unknown, other, or absent
  misc_difference 129: note = a, c, g, u, unknown, other, or absent
  misc_difference 130: note = a, c, g, u, unknown, other, or absent
  misc_difference 131: note = a, c, g, u, unknown, other, or absent
  misc_difference 132: note = a, c, g, u, unknown, other, or absent
  misc_difference 133: note = a, c, g, u, unknown, other, or absent
  misc_difference 134: note = a, c, g, u, unknown, other, or absent
  misc_difference 135: note = a, c, g, u, unknown, other, or absent
  misc_difference 136: note = a, c, g, u, unknown, other, or absent
  misc_difference 137: note = a, c, g, u, unknown, other, or absent
  misc_difference 138: note = a, c, g, u, unknown, other, or absent
  misc_difference 139: note = a, c, g, u, unknown, other, or absent
  misc_difference 140: note = a, c, g, u, unknown, other, or absent
  misc_difference 141: note = a, c, g, u, unknown, other, or absent
  misc_difference 142: note = a, c, g, u, unknown, other, or absent
  misc_difference 143: note = a, c, g, u, unknown, other, or absent
  misc_difference 144: note = a, c, g, u, unknown, other, or absent
  misc_difference 145: note = a, c, g, u, unknown, other, or absent
  misc_difference 146: note = a, c, g, u, unknown, other, or absent
  misc_difference 147: note = a, c, g, u, unknown, other, or absent
  misc_difference 148: note = a, c, g, u, unknown, other, or absent
  misc_difference 149: note = a, c, g, u, unknown, other, or absent
  misc_difference 150: note = a, c, g, u, unknown, other, or absent
  misc_difference 151: note = a, c, g, u, unknown, other, or absent
  misc_difference 152: note = a, c, g, u, unknown, other, or absent
  misc_difference 153: note = a, c, g, u, unknown, other, or absent
  misc_difference 154: note = a, c, g, u, unknown, other, or absent
  misc_difference 155: note = a, c, g, u, unknown, other, or absent
  misc_difference 156: note = a, c, g, u, unknown, other, or absent
  misc_difference 157: note = a, c, g, u, unknown, other, or absent
  misc_difference 158: note = a, c, g, u, unknown, other, or absent
  misc_difference 159: note = a, c, g, u, unknown, other, or absent
  misc_difference 160: note = a, c, g, u, unknown, other, or absent
  misc_difference 161: note = a, c, g, u, unknown, other, or absent
  misc_difference 162: note = a, c, g, u, unknown, other, or absent
  misc_difference 163: note = a, c, g, u, unknown, other, or absent
  misc_difference 164: note = a, c, g, u, unknown, other, or absent
  misc_difference 165: note = a, c, g, u, unknown, other, or absent
  misc_difference 166: note = a, c, g, u, unknown, other, or absent
  misc_difference 167: note = a, c, g, u, unknown, other, or absent
  misc_difference 168: note = a, c, g, u, unknown, other, or absent
  misc_difference 169: note = a, c, g, u, unknown, other, or absent
  misc_difference 170: note = a, c, g, u, unknown, other, or absent
  misc_difference 171: note = a, c, g, u, unknown, other, or absent
  misc_difference 172: note = a, c, g, u, unknown, other, or absent
  misc_difference 173: note = a, c, g, u, unknown, other, or absent
  misc_difference 174: note = a, c, g, u, unknown, other, or absent
  misc_difference 175: note = a, c, g, u, unknown, other, or absent
  misc_difference 176: note = a, c, g, u, unknown, other, or absent
  misc_difference 177: note = a, c, g, u, unknown, other, or absent
  misc_difference 178: note = a, c, g, u, unknown, other, or absent
  misc_difference 179: note = a, c, g, u, unknown, other, or absent
  misc_difference 180: note = a, c, g, u, unknown, other, or absent
  misc_difference 181: note = a, c, g, u, unknown, other, or absent
  misc_difference 182: note = a, c, g, u, unknown, other, or absent
  misc_difference 183: note = a, c, g, u, unknown, other, or absent
  misc_difference 184: note = a, c, g, u, unknown, other, or absent
  misc_difference 185: note = a, c, g, u, unknown, other, or absent
  misc_difference 186: note = a, c, g, u, unknown, other, or absent
  misc_difference 187: note = a, c, g, u, unknown, other, or absent
  misc_difference 188: note = a, c, g, u, unknown, other, or absent
  misc_difference 189: note = a, c, g, u, unknown, other, or absent
  misc_difference 190: note = a, c, g, u, unknown, other, or absent
  misc_difference 191: note = a, c, g, u, unknown, other, or absent
  misc_difference 192: note = a, c, g, u, unknown, other, or absent
  misc_difference 193: note = a, c, g, u, unknown, other, or absent
  misc_difference 194: note = a, c, g, u, unknown, other, or absent
  misc_difference 195: note = a, c, g, u, unknown, other, or absent
  misc_difference 196: note = a, c, g, u, unknown, other, or absent
  misc_difference 197: note = a, c, g, u, unknown, other, or absent
  misc_difference 198: note = a, c, g, u, unknown, other, or absent
  misc_difference 199: note = a, c, g, u, unknown, other, or absent
  misc_difference 200: note = a, c, g, u, unknown, other, or absent
  misc_difference 201: note = a, c, g, u, unknown, other, or absent
  misc_difference 202: note = a, c, g, u, unknown, other, or absent
  misc_difference 203: note = a, c, g, u, unknown, other, or absent
  misc_difference 204: note = a, c, g, u, unknown, other, or absent
  misc_difference 205: note = a, c, g, u, unknown, other, or absent
  misc_difference 206: note = a, c, g, u, unknown, other, or absent
  misc_difference 207: note = a, c, g, u, unknown, other, or absent
  misc_difference 208: note = a, c, g, u, unknown, other, or absent
  misc_difference 209: note = a, c, g, u, unknown, other, or absent
  misc_difference 210: note = a, c, g, u, unknown, other, or absent
  misc_difference 211: note = a, c, g, u, unknown, other, or absent
  misc_difference 212: note = a, c, g, u, unknown, other, or absent
  misc_difference 213: note = a, c, g, u, unknown, other, or absent
  misc_difference 214: note = a, c, g, u, unknown, other, or absent
  misc_difference 215: note = a, c, g, u, unknown, other, or absent
  misc_difference 216: note = a, c, g, u, unknown, other, or absent
  misc_difference 217: note = a, c, g, u, unknown, other, or absent
  misc_difference 218: note = a, c, g, u, unknown, other, or absent
  misc_difference 219: note = a, c, g, u, unknown, other, or absent
  misc_difference 220: note = a, c, g, u, unknown, other, or absent
  misc_difference 221: note = a, c, g, u, unknown, other, or absent
  misc_difference 222: note = a, c, g, u, unknown, other, or absent
  misc_difference 223: note = a, c, g, u, unknown, other, or absent
  misc_difference 224: note = a, c, g, u, unknown, other, or absent
  misc_difference 225: note = a, c, g, u, unknown, other, or absent
  misc_difference 226: note = a, c, g, u, unknown, other, or absent
  misc_difference 227: note = a, c, g, u, unknown, other, or absent
  misc_difference 228: note = a, c, g, u, unknown, other, or absent
  misc_difference 229: note = a, c, g, u, unknown, other, or absent
  misc_difference 230: note = a, c, g, u, unknown, other, or absent
  misc_difference 231: note = a, c, g, u, unknown, other, or absent
  misc_difference 232: note = a, c, g, u, unknown, other, or absent
  misc_difference 233: note = a, c, g, u, unknown, other, or absent
  misc_difference 234: note = a, c, g, u, unknown, other, or absent
  misc_difference 235: note = a, c, g, u, unknown, other, or absent
  misc_difference 236: note = a, c, g, u, unknown, other, or absent
  misc_difference 237: note = a, c, g, u, unknown, other, or absent
  misc_difference 238: note = a, c, g, u, unknown, other, or absent
  misc_difference 239: note = a, c, g, u, unknown, other, or absent
  misc_difference 240: note = a, c, g, u, unknown, other, or absent
  misc_difference 241: note = a, c, g, u, unknown, other, or absent
  misc_difference 242: note = a, c, g, u, unknown, other, or absent
  misc_difference 243: note = a, c, g, u, unknown, other, or absent
  misc_difference 244: note = a, c, g, u, unknown, other, or absent
  misc_difference 245: note = a, c, g, u, unknown, other, or absent
  misc_difference 246: note = a, c, g, u, unknown, other, or absent
  misc_difference 247: note = a, c, g, u, unknown, other, or absent
  misc_difference 248: note = a, c, g, u, unknown, other, or absent
  misc_difference 249: note = a, c, g, u, unknown, other, or absent
  misc_difference 250: note = a, c, g, u, unknown, other, or absent
  misc_difference 251: note = a, c, g, u, unknown, other, or absent
  misc_difference 252: note = a, c, g, u, unknown, other, or absent
  misc_difference 253: note = a, c, g, u, unknown, other, or absent
  misc_difference 254: note = a, c, g, u, unknown, other, or absent
  misc_difference 255: note = a, c, g, u, unknown, other, or absent
  misc_difference 256: note = a, c, g, u, unknown, other, or absent
  misc_difference 257: note = a, c, g, u, unknown, other, or absent
  misc_difference 258: note = a, c, g, u, unknown, other, or absent
  misc_difference 259: note = a, c, g, u, unknown, other, or absent
  misc_difference 260: note = a, c, g, u, unknown, other, or absent
  misc_difference 261: note = a, c, g, u, unknown, other, or absent
  misc_difference 262: note = a, c, g, u, unknown, other, or absent
  misc_difference 263: note = a, c, g, u, unknown, other, or absent
  misc_difference 264: note = a, c, g, u, unknown, other, or absent
  misc_difference 265: note = a, c, g, u, unknown, other, or absent
  misc_difference 266: note = a, c, g, u, unknown, other, or absent
  misc_difference 267: note = a, c, g, u, unknown, other, or absent
  misc_difference 268: note = a, c, g, u, unknown, other, or absent
  misc_difference 269: note = a, c, g, u, unknown, other, or absent
  misc_difference 270: note = a, c, g, u, unknown, other, or absent
  misc_difference 271: note = a, c, g, u, unknown, other, or absent
  misc_difference 272: note = a, c, g, u, unknown, other, or absent
  misc_difference 273: note = a, c, g, u, unknown, other, or absent
  misc_difference 274: note = a, c, g, u, unknown, other, or absent
  misc_difference 275: note = a, c, g, u, unknown, other, or absent
  misc_difference 276: note = a, c, g, u, unknown, other, or absent
  misc_difference 277: note = a, c, g, u, unknown, other, or absent
  misc_difference 278: note = a, c, g, u, unknown, other, or absent
  misc_difference 279: note = a, c, g, u, unknown, other, or absent
  misc_difference 280: note = a, c, g, u, unknown, other, or absent
  misc_difference 281: note = a, c, g, u, unknown, other, or absent
  misc_difference 282: note = a, c, g, u, unknown, other, or absent
  misc_difference 283: note = a, c, g, u, unknown, other, or absent
  misc_difference 284: note = a, c, g, u, unknown, other, or absent
  misc_difference 285: note = a, c, g, u, unknown, other, or absent
  misc_difference 286: note = a, c, g, u, unknown, other, or absent
  misc_difference 287: note = a, c, g, u, unknown, other, or absent
  misc_difference 288: note = a, c, g, u, unknown, other, or absent
  misc_difference 289: note = a, c, g, u, unknown, other, or absent
  misc_difference 290: note = a, c, g, u, unknown, other, or absent
  misc_difference 291: note = a, c, g, u, unknown, other, or absent
  misc_difference 292: note = a, c, g, u, unknown, other, or absent
  misc_difference 293: note = a, c, g, u, unknown, other, or absent
  misc_difference 294: note = a, c, g, u, unknown, other, or absent
  misc_difference 295: note = a, c, g, u, unknown, other, or absent
  misc_difference 296: note = a, c, g, u, unknown, other, or absent
  misc_difference 297: note = a, c, g, u, unknown, other, or absent
  misc_difference 298: note = a, c, g, u, unknown, other, or absent
  misc_difference 299: note = a, c, g, u, unknown, other, or absent
  misc_difference 300: note = a, c, g, u, unknown, other, or absent
  misc_difference 301: note = a, c, g, u, unknown, other, or absent
  misc_difference 302: note = a, c, g, u, unknown, other, or absent
  misc_difference 303: note = a, c, g, u, unknown, other, or absent
  misc_difference 304: note = a, c, g, u, unknown, other, or absent
  misc_difference 305: note = a, c, g, u, unknown, other, or absent
  misc_difference 306: note = a, c, g, u, unknown, other, or absent
  misc_difference 307: note = a, c, g, u, unknown, other, or absent
  misc_difference 308: note = a, c, g, u, unknown, other, or absent
  misc_difference 309: note = a, c, g, u, unknown, other, or absent
  misc_difference 310: note = a, c, g, u, unknown, other, or absent
  misc_difference 311: note = a, c, g, u, unknown, other, or absent
  misc_difference 312: note = a, c, g, u, unknown, other, or absent
  misc_difference 313: note = a, c, g, u, unknown, other, or absent
  misc_difference 314: note = a, c, g, u, unknown, other, or absent
  misc_difference 315: note = a, c, g, u, unknown, other, or absent
  misc_difference 316: note = May be absent
  misc_difference 317: note = May be absent
  misc_difference 318: note = May be absent
  misc_difference 319: note = May be absent
  misc_difference 320: note = May be absent
  misc_difference 321: note = May be absent
  misc_difference 322: note = May be absent
  misc_difference 323: note = May be absent
  misc_difference 324: note = May be absent
  misc_difference 325: note = May be absent
  misc_difference 326: note = a, c, g, u, unknown, other, or absent
  misc_difference 327: note = May be absent
  misc_difference 328: note = May be absent
  misc_difference 329: note = May be absent
  misc_difference 330: note = May be absent
  misc_difference 331: note = May be absent
  misc_difference 332: note = a, c, g, u, unknown, other, or absent
  misc_difference 333: note = May be absent
  misc_difference 334: note = a, c, g, u, unknown, other, or absent
  misc_difference 335: note = May be absent
  misc_difference 336: note = a, c, g, u, unknown, other, or absent
  misc_difference 337: note = May be absent
  misc_difference 338: note = May be absent
  misc_difference 339: note = May be absent
  misc_difference 340: note = May be absent
  misc_difference 45..316: note = This region may encompass 1-271 nucleotides
rsynbndtvgynharbtgghyrdnryryhksbcyhgtaavsmdrnnnnnnnnnnnnnnnnnnnnnnnnnnnnnnnnnnnnnnnnnnnnnnnnnnnnnnnnnnnnnnnnnnnnnnnnnnnnnnnnnnnnnnnnnnnnnnnnnnnnnnnnnnnnnnnnnnnnnnnnnnnnnnnnnnnnnnnnnnnnnnnnnnnnnnnnnnnnnnnnnnnnnnnnnnnnnnnnnnnnnnnnnnnnnnnnnnnnnnnnnnnnnnnnnnnnnnnnnnnnnnnnnnnnnnnnnnnnnnnnnnnnnnnnnnnnnnnnnnnnnnnnnnnnnnnvhdrgwtyvanbyyhdnbndnrsyt

SEQ ID NO: 613 - RNA, 342 nt, synthetic construct
  source 1..342: mol_type = other RNA
  misc_difference 1: note = May be absent
  misc_difference 2: note = May be absent
  misc_difference 3: note = May be absent
  misc_difference 4: note = a, c, g, u, unknown, other, or absent
  misc_difference 5: note = a, c, g, u, unknown, other, or absent
  misc_difference 6: note = a, c, g, u, unknown, other, or absent
  misc_difference 7: note = May be absent
  misc_difference 8: note = May be absent
  misc_difference 9: note = May be absent
  misc_difference 10: note = May be absent
  misc_difference 11: note = May be absent
  misc_difference 12: note = May be absent
  misc_difference 13: note = May be absent
  misc_difference 14: note = May be absent
  misc_difference 15: note = May be absent
  misc_difference 16: note = May be absent
  misc_difference 17: note = May be absent
  misc_difference 18: note = May be absent
  misc_difference 19: note = May be absent
  misc_difference 20: note = May be absent
  misc_difference 21: note = May be absent
  misc_difference 22: note = May be absent
  misc_difference 23: note = May be absent
  misc_difference 24: note = May be absent
  misc_difference 25: note = May be absent
  misc_difference 26: note = May be absent
  misc_difference 27: note = May be absent
  misc_difference 28: note = May be absent
  misc_difference 29: note = a, c, g, u, unknown, other, or absent
  misc_difference 30: note = a, c, g, u, unknown, other, or absent
  misc_difference 31: note = a, c, g, u, unknown, other, or absent
  misc_difference 32: note = a, c, g, u, unknown, other, or absent
  misc_difference 33: note = May be absent
  misc_difference 34: note = a, c, g, u, unknown, other, or absent
  misc_difference 35: note = May be absent
  misc_difference 36: note = May be absent
  misc_difference 37: note = May be absent
  misc_difference 38: note = May be absent
  misc_difference 39: note = May be absent
  misc_difference 40: note = May be absent
  misc_difference 41: note = May be absent
  misc_difference 42: note = a, c, g, u, unknown, other, or absent
  misc_difference 43: note = May be absent
  misc_difference 44: note = a, c, g, u, unknown, other, or absent
  misc_difference 45: note = a, c, g, u, unknown, other, or absent
  misc_difference 46: note = a, c, g, u, unknown, other, or absent
  misc_difference 47: note = a, c, g, u, unknown, other, or absent
  misc_difference 48: note = a, c, g, u, unknown, other, or absent
  misc_difference 49: note = a, c, g, u, unknown, other, or absent
  misc_difference 50: note = a, c, g, u, unknown, other, or absent
  misc_difference 51: note = a, c, g, u, unknown, other, or absent
  misc_difference 52: note = a, c, g, u, unknown, other, or absent
  misc_difference 53: note = a, c, g, u, unknown, other, or absent
  misc_difference 54: note = a, c, g, u, unknown, other, or absent
  misc_difference 55: note = a, c, g, u, unknown, other, or absent
  misc_difference 56: note = a, c, g, u, unknown, other, or absent
  misc_difference 57: note = a, c, g, u, unknown, other, or absent
  misc_difference 58: note = a, c, g, u, unknown, other, or absent
  misc_difference 59: note = a, c, g, u, unknown, other, or absent
  misc_difference 60: note = a, c, g, u, unknown, other, or absent
  misc_difference 61: note = a, c, g, u, unknown, other, or absent
  misc_difference 62: note = a, c, g, u, unknown, other, or absent
  misc_difference 63: note = a, c, g, u, unknown, other, or absent
  misc_difference 64: note = a, c, g, u, unknown, other, or absent
  misc_difference 65: note = a, c, g, u, unknown, other, or absent
  misc_difference 66: note = a, c, g, u, unknown, other, or absent
  misc_difference 67: note = a, c, g, u, unknown, other, or absent
  misc_difference 68: note = a, c, g, u, unknown, other, or absent
  misc_difference 69: note = a, c, g, u, unknown, other, or absent
  misc_difference 70: note = a, c, g, u, unknown, other, or absent
  misc_difference 71: note = a, c, g, u, unknown, other, or absent
  misc_difference 72: note = a, c, g, u, unknown, other, or absent
  misc_difference 73: note = a, c, g, u, unknown, other, or absent
  misc_difference 74: note = a, c, g, u, unknown, other, or absent
  misc_difference 75: note = a, c, g, u, unknown, other, or absent
  misc_difference 76: note = a, c, g, u, unknown, other, or absent
  misc_difference 77: note = a, c, g, u, unknown, other, or absent
  misc_difference 78: note = a, c, g, u, unknown, other, or absent
  misc_difference 79: note = a, c, g, u, unknown, other, or absent
  misc_difference 80: note = a, c, g, u, unknown, other, or absent
  misc_difference 81: note = a, c, g, u, unknown, other, or absent
  misc_difference 82: note = a, c, g, u, unknown, other, or absent
  misc_difference 83: note = a, c, g, u, unknown, other, or absent
  misc_difference 84: note = a, c, g, u, unknown, other, or absent
  misc_difference 85: note = a, c, g, u, unknown, other, or absent
  misc_difference 86: note = a, c, g, u, unknown, other, or absent
  misc_difference 87: note = a, c, g, u, unknown, other, or absent
  misc_difference 88: note = a, c, g, u, unknown, other, or absent
  misc_difference 89: note = a, c, g, u, unknown, other, or absent
  misc_difference 90: note = a, c, g, u, unknown, other, or absent
  misc_difference 91: note = a, c, g, u, unknown, other, or absent
  misc_difference 92: note = a, c, g, u, unknown, other, or absent
  misc_difference 93: note = a, c, g, u, unknown, other, or absent
  misc_difference 94: note = a, c, g, u, unknown, other, or absent
  misc_difference 95: note = a, c, g, u, unknown, other, or absent
  misc_difference 96: note = a, c, g, u, unknown, other, or absent
  misc_difference 97: note = a, c, g, u, unknown, other, or absent
  misc_difference 98: note = a, c, g, u, unknown, other, or absent
  misc_difference 99: note = a, c, g, u, unknown, other, or absent
  misc_difference 100: note = a, c, g, u, unknown, other, or absent
  misc_difference 101: note = a, c, g, u, unknown, other, or absent
  misc_difference 102: note = a, c, g, u, unknown, other, or absent
  misc_difference 103: note = a, c, g, u, unknown, other, or absent
  misc_difference 104: note = a, c, g, u, unknown, other, or absent
  misc_difference 105: note = a, c, g, u, unknown, other, or absent
  misc_difference 106: note = a, c, g, u, unknown, other, or absent
  misc_difference 107: note = a, c, g, u, unknown, other, or absent
  misc_difference 108: note = a, c, g, u, unknown, other, or absent
  misc_difference 109: note = a, c, g, u, unknown, other, or absent
  misc_difference 110: note = a, c, g, u, unknown, other, or absent
  misc_difference 111: note = a, c, g, u, unknown, other, or absent
  misc_difference 112: note = a, c, g, u, unknown, other, or absent
  misc_difference 113: note = a, c, g, u, unknown, other, or absent
  misc_difference 114: note = a, c, g, u, unknown, other, or absent
  misc_difference 115: note = a, c, g, u, unknown, other, or absent
  misc_difference 116: note = a, c, g, u, unknown, other, or absent
  misc_difference 117: note = a, c, g, u, unknown, other, or absent
  misc_difference 118: note = a, c, g, u, unknown, other, or absent
  misc_difference 119: note = a, c, g, u, unknown, other, or absent
  misc_difference 120: note = a, c, g, u, unknown, other, or absent
  misc_difference 121: note = a, c, g, u, unknown, other, or absent
  misc_difference 122: note = a, c, g, u, unknown, other, or absent
  misc_difference 123: note = a, c, g, u, unknown, other, or absent
  misc_difference 124: note = a, c, g, u, unknown, other, or absent
  misc_difference 125: note = a, c, g, u, unknown, other, or absent
  misc_difference 126: note = a, c, g, u, unknown, other, or absent
  misc_difference 127: note = a, c, g, u, unknown, other, or absent
  misc_difference 128: note = a, c, g, u, unknown, other, or absent
  misc_difference 129: note = a, c, g, u, unknown, other, or absent
  misc_difference 130: note = a, c, g, u, unknown, other, or absent
  misc_difference 131: note = a, c, g, u, unknown, other, or absent
  misc_difference 132: note = a, c, g, u, unknown, other, or absent
  misc_difference 133: note = a, c, g, u, unknown, other, or absent
  misc_difference 134: note = a, c, g, u, unknown, other, or absent
  misc_difference 135: note = a, c, g, u, unknown, other, or absent
  misc_difference 136: note = a, c, g, u, unknown, other, or absent
  misc_difference 137: note = a, c, g, u, unknown, other, or absent
  misc_difference 138: note = a, c, g, u, unknown, other, or absent
  misc_difference 139: note = a, c, g, u, unknown, other, or absent
  misc_difference 140: note = a, c, g, u, unknown, other, or absent
  misc_difference 141: note = a, c, g, u, unknown, other, or absent
  misc_difference 142: note = a, c, g, u, unknown, other, or absent
  misc_difference 143: note = a, c, g, u, unknown, other, or absent
  misc_difference 144: note = a, c, g, u, unknown, other, or absent
  misc_difference 145: note = a, c, g, u, unknown, other, or absent
  misc_difference 146: note = a, c, g, u, unknown, other, or absent
  misc_difference 147: note = a, c, g, u, unknown, other, or absent
  misc_difference 148: note = a, c, g, u, unknown, other, or absent
  misc_difference 149: note = a, c, g, u, unknown, other, or absent
  misc_difference 150: note = a, c, g, u, unknown, other, or absent
  misc_difference 151: note = a, c, g, u, unknown, other, or absent
  misc_difference 152: note = a, c, g, u, unknown, other, or absent
  misc_difference 153: note = a, c, g, u, unknown, other, or absent
  misc_difference 154: note = a, c, g, u, unknown, other, or absent
  misc_difference 155: note = a, c, g, u, unknown, other, or absent
  misc_difference 156: note = a, c, g, u, unknown, other, or absent
  misc_difference 157: note = a, c, g, u, unknown, other, or absent
  misc_difference 158: note = a, c, g, u, unknown, other, or absent
  misc_difference 159: note = a, c, g, u, unknown, other, or absent
  misc_difference 160: note = a, c, g, u, unknown, other, or absent
  misc_difference 161: note = a, c, g, u, unknown, other, or absent
  misc_difference 162: note = a, c, g, u, unknown, other, or absent
  misc_difference 163: note = a, c, g, u, unknown, other, or absent
  misc_difference 164: note = a, c, g, u, unknown, other, or absent
  misc_difference 165: note = a, c, g, u, unknown, other, or absent
  misc_difference 166: note = a, c, g, u, unknown, other, or absent
  misc_difference 167: note = a, c, g, u, unknown, other, or absent
  misc_difference 168: note = a, c, g, u, unknown, other, or absent
  misc_difference 169: note = a, c, g, u, unknown, other, or absent
  misc_difference 170: note = a, c, g, u, unknown, other, or absent
  misc_difference 171: note = a, c, g, u, unknown, other, or absent
  misc_difference 172: note = a, c, g, u, unknown, other, or absent
  misc_difference 173: note = a, c, g, u, unknown, other, or absent
  misc_difference 174: note = a, c, g, u, unknown, other, or absent
  misc_difference 175: note = a, c, g, u, unknown, other, or absent
  misc_difference 176: note = a, c, g, u, unknown, other, or absent
  misc_difference 177: note = a, c, g, u, unknown, other, or absent
  misc_difference 178: note = a, c, g, u, unknown, other, or absent
  misc_difference 179: note = a, c, g, u, unknown, other, or absent
  misc_difference 180: note = a, c, g, u, unknown, other, or absent
  misc_difference 181: note = a, c, g, u, unknown, other, or absent
  misc_difference 182: note = a, c, g, u, unknown, other, or absent
  misc_difference 183: note = a, c, g, u, unknown, other, or absent
  misc_difference 184: note = a, c, g, u, unknown, other, or absent
  misc_difference 185: note = a, c, g, u, unknown, other, or absent
  misc_difference 186: note = a, c, g, u, unknown, other, or absent
  misc_difference 187: note = a, c, g, u, unknown, other, or absent
  misc_difference 188: note = a, c, g, u, unknown, other, or absent
  misc_difference 189: note = a, c, g, u, unknown, other, or absent
  misc_difference 190: note = a, c, g, u, unknown, other, or absent
  misc_difference 191: note = a, c, g, u, unknown, other, or absent
  misc_difference 192: note = a, c, g, u, unknown, other, or absent
  misc_difference 193: note = a, c, g, u, unknown, other, or absent
  misc_difference 194: note = a, c, g, u, unknown, other, or absent
  misc_difference 195: note = a, c, g, u, unknown, other, or absent
  misc_difference 196: note = a, c, g, u, unknown, other, or absent
  misc_difference 197: note = a, c, g, u, unknown, other, or absent
  misc_difference 198: note = a, c, g, u, unknown, other, or absent
  misc_difference 199: note = a, c, g, u, unknown, other, or absent
  misc_difference 200: note = a, c, g, u, unknown, other, or absent
  misc_difference 201: note = a, c, g, u, unknown, other, or absent
  misc_difference 202: note = a, c, g, u, unknown, other, or absent
  misc_difference 203: note = a, c, g, u, unknown, other, or absent
  misc_difference 204: note = a, c, g, u, unknown, other, or absent
  misc_difference 205: note = a, c, g, u, unknown, other, or absent
  misc_difference 206: note = a, c, g, u, unknown, other, or absent
  misc_difference 207: note = a, c, g, u, unknown, other, or absent
  misc_difference 208: note = a, c, g, u, unknown, other, or absent
  misc_difference 209: note = a, c, g, u, unknown, other, or absent
  misc_difference 210: note = a, c, g, u, unknown, other, or absent
  misc_difference 211: note = a, c, g, u, unknown, other, or absent
  misc_difference 212: note = a, c, g, u, unknown, other, or absent
  misc_difference 213: note = a, c, g, u, unknown, other, or absent
  misc_difference 214: note = a, c, g, u, unknown, other, or absent
  misc_difference 215: note = a, c, g, u, unknown, other, or absent
  misc_difference 216: note = a, c, g, u, unknown, other, or absent
  misc_difference 217: note = a, c, g, u, unknown, other, or absent
  misc_difference 218: note = a, c, g, u, unknown, other, or absent
  misc_difference 219: note = a, c, g, u, unknown, other, or absent
  misc_difference 220: note = a, c, g, u, unknown, other, or absent
  misc_difference 221: note = a, c, g, u, unknown, other, or absent
  misc_difference 222: note = a, c, g, u, unknown, other, or absent
  misc_difference 223: note = a, c, g, u, unknown, other, or absent
  misc_difference 224: note = a, c, g, u, unknown, other, or absent
  misc_difference 225: note = a, c, g, u, unknown, other, or absent
  misc_difference 226: note = a, c, g, u, unknown, other, or absent
  misc_difference 227: note = a, c, g, u, unknown, other, or absent
  misc_difference 228: note = a, c, g, u, unknown, other, or absent
  misc_difference 229: note = a, c, g, u, unknown, other, or absent
  misc_difference 230: note = a, c, g, u, unknown, other, or absent
  misc_difference 231: note = a, c, g, u, unknown, other, or absent
  misc_difference 232: note = a, c, g, u, unknown, other, or absent
  misc_difference 233: note = a, c, g, u, unknown, other, or absent
  misc_difference 234: note = a, c, g, u, unknown, other, or absent
  misc_difference 235: note = a, c, g, u, unknown, other, or absent
  misc_difference 236: note = a, c, g, u, unknown, other, or absent
  misc_difference 237: note = a, c, g, u, unknown, other, or absent
  misc_difference 238: note = a, c, g, u, unknown, other, or absent
  misc_difference 239: note = a, c, g, u, unknown, other, or absent
  misc_difference 240: note = a, c, g, u, unknown, other, or absent
  misc_difference 241: note = a, c, g, u, unknown, other, or absent
  misc_difference 242: note = a, c, g, u, unknown, other, or absent
  misc_difference 243: note = a, c, g, u, unknown, other, or absent
  misc_difference 244: note = a, c, g, u, unknown, other, or absent
  misc_difference 245: note = a, c, g, u, unknown, other, or absent
  misc_difference 246: note = a, c, g, u, unknown, other, or absent
  misc_difference 247: note = a, c, g, u, unknown, other, or absent
  misc_difference 248: note = a, c, g, u, unknown, other, or absent
  misc_difference 249: note = a, c, g, u, unknown, other, or absent
  misc_difference 250: note = a, c, g, u, unknown, other, or absent
  misc_difference 251: note = a, c, g, u, unknown, other, or absent
  misc_difference 252: note = a, c, g, u, unknown, other, or absent
  misc_difference 253: note = a, c, g, u, unknown, other, or absent
  misc_difference 254: note = a, c, g, u, unknown, other, or absent
  misc_difference 255: note = a, c, g, u, unknown, other, or absent
  misc_difference 256: note = a, c, g, u, unknown, other, or absent
  misc_difference 257: note = a, c, g, u, unknown, other, or absent
  misc_difference 258: note = a, c, g, u, unknown, other, or absent
  misc_difference 259: note = a, c, g, u, unknown, other, or absent
  misc_difference 260: note = a, c, g, u, unknown, other, or absent
  misc_difference 261: note = a, c, g, u, unknown, other, or absent
  misc_difference 262: note = a, c, g, u, unknown, other, or absent
  misc_difference 263: note = a, c, g, u, unknown, other, or absent
  misc_difference 264: note = a, c, g, u, unknown, other, or absent
  misc_difference 265: note = a, c, g, u, unknown, other, or absent
  misc_difference 266: note = a, c, g, u, unknown, other, or absent
  misc_difference 267: note = a, c, g, u, unknown, other, or absent
  misc_difference 268: note = a, c, g, u, unknown, other, or absent
  misc_difference 269: note = a, c, g, u, unknown, other, or absent
  misc_difference 270: note = a, c, g, u, unknown, other, or absent
  misc_difference 271: note = a, c, g, u, unknown, other, or absent
  misc_difference 272: note = a, c, g, u, unknown, other, or absent
  misc_difference 273: note = a, c, g, u, unknown, other, or absent
  misc_difference 274: note = a, c, g, u, unknown, other, or absent
  misc_difference 275: note = a, c, g, u, unknown, other, or absent
  misc_difference 276: note = a, c, g, u, unknown, other, or absent
  misc_difference 277: note = a, c, g, u, unknown, other, or absent
  misc_difference 278: note = a, c, g, u, unknown, other, or absent
  misc_difference 279: note = a, c, g, u, unknown, other, or absent
  misc_difference 280: note = a, c, g, u, unknown, other, or absent
  misc_difference 281: note = a, c, g, u, unknown, other, or absent
  misc_difference 282: note = a, c, g, u, unknown, other, or absent
  misc_difference 283: note = a, c, g, u, unknown, other, or absent
  misc_difference 284: note = a, c, g, u, unknown, other, or absent
  misc_difference 285: note = a, c, g, u, unknown, other, or absent
  misc_difference 286: note = a, c, g, u, unknown, other, or absent
  misc_difference 287: note = a, c, g, u, unknown, other, or absent
  misc_difference 288: note = a, c, g, u, unknown, other, or absent
  misc_difference 289: note = a, c, g, u, unknown, other, or absent
  misc_difference 290: note = a, c, g, u, unknown, other, or absent
  misc_difference 291: note = a, c, g, u, unknown, other, or absent
  misc_difference 292: note = a, c, g, u, unknown, other, or absent
  misc_difference 293: note = a, c, g, u, unknown, other, or absent
  misc_difference 294: note = a, c, g, u, unknown, other, or absent
  misc_difference 295: note = a, c, g, u, unknown, other, or absent
  misc_difference 296: note = a, c, g, u, unknown, other, or absent
  misc_difference 297: note = a, c, g, u, unknown, other, or absent
  misc_difference 298: note = a, c, g, u, unknown, other, or absent
  misc_difference 299: note = a, c, g, u, unknown, other, or absent
  misc_difference 300: note = a, c, g, u, unknown, other, or absent
  misc_difference 301: note = a, c, g, u, unknown, other, or absent
  misc_difference 302: note = a, c, g, u, unknown, other, or absent
  misc_difference 303: note = a, c, g, u, unknown, other, or absent
  misc_difference 304: note = a, c, g, u, unknown, other, or absent
  misc_difference 305: note = a, c, g, u, unknown, other, or absent
  misc_difference 306: note = a, c, g, u, unknown, other, or absent
  misc_difference 307: note = a, c, g, u, unknown, other, or absent
  misc_difference 308: note = a, c, g, u, unknown, other, or absent
  misc_difference 309: note = a, c, g, u, unknown, other, or absent
  misc_difference 310: note = a, c, g, u, unknown, other, or absent
  misc_difference 311: note = a, c, g, u, unknown, other, or absent
  misc_difference 312: note = a, c, g, u, unknown, other, or absent
  misc_difference 313: note = a, c, g, u, unknown, other, or absent
  misc_difference 314: note = a, c, g, u, unknown, other, or absent
  misc_difference 315: note = a, c, g, u, unknown, other, or absent
  misc_difference 316: note = a, c, g, u, unknown, other, or absent
  misc_difference 317: note = a, c, g, u, unknown, other, or absent
  misc_difference 318: note = May be absent
  misc_difference 319: note = a, c, g, u, unknown, other, or absent
  misc_difference 320: note = May be absent
  misc_difference 321: note = a, c, g, u, unknown, other, or absent
  misc_difference 322: note = May be absent
  misc_difference 323: note = May be absent
  misc_difference 324: note = May be absent
  misc_difference 325: note = May be absent
  misc_difference 326: note = May be absent
  misc_difference 327: note = May be absent
  misc_difference 328: note = a, c, g, u, unknown, other, or absent
  misc_difference 329: note = May be absent
  misc_difference 330: note = May be absent
  misc_difference 331: note = May be absent
  misc_difference 332: note = May be absent
  misc_difference 333: note = a, c, g, u, unknown, other, or absent
  misc_difference 334: note = May be absent
  misc_difference 335: note = May be absent
  misc_difference 336: note = a, c, g, u, unknown, other, or absent
  misc_difference 337: note = a, c, g, u, unknown, other, or absent
  misc_difference 338: note = a, c, g, u, unknown, other, or absent
  misc_difference 339: note = May be absent
  misc_difference 340: note = May be absent
  misc_difference 341: note = May be absent
  misc_difference 342: note = May be absent
  misc_difference 44..315: note = This region may encompass 1-271 nucleotides
rvvnnndtrrybhhrhyhgghytadvvynnnnrnbtccavanbnnnnnnnnnnnnnnnnnnnnnnnnnnnnnnnnnnnnnnnnnnnnnnnnnnnnnnnnnnnnnnnnnnnnnnnnnnnnnnnnnnnnnnnnnnnnnnnnnnnnnnnnnnnnnnnnnnnnnnnnnnnnnnnnnnnnnnnnnnnnnnnnnnnnnnnnnnnnnnnnnnnnnnnnnnnnnnnnnnnnnnnnnnnnnnnnnnnnnnnnnnnnnnnnnnnnnnnnnnnnnnnnnnnnnnnnnnnnnnnnnnnnnnnnnnnnnnnnnnnnnnnnnnnnnnnnnnvnrngttcranychynbhnnnbbhd

SEQ ID NO: 614 - RNA, 339 nt, synthetic construct
  source 1..339: mol_type = other RNA
  misc_difference 1: note = May be absent
  misc_difference 2: note = May be absent
  misc_difference 3: note = May be absent
  misc_difference 4: note = May be absent
  misc_difference 5: note = May be absent
  misc_difference 6: note = May be absent
  misc_difference 7: note = May be absent
  misc_difference 8: note = May be absent
  misc_difference 9: note = May be absent
  misc_difference 10: note = May be absent
  misc_difference 11: note = May be absent
  misc_difference 12: note = May be absent
  misc_difference 13: note = May be absent
  misc_difference 14: note = May be absent
  misc_difference 15: note = May be absent
  misc_difference 16: note = May be absent
  misc_difference 17: note = May be absent
  misc_difference 18: note = May be absent
  misc_difference 19: note = May be absent
  misc_difference 20: note = May be absent
  misc_difference 21: note = May be absent
  misc_difference 22: note = May be absent
  misc_difference 23: note = May be absent
  misc_difference 24: note = May be absent
  misc_difference 25: note = May be absent
  misc_difference 26: note = May be absent
  misc_difference 27: note = May be absent
  misc_difference 28: note = May be absent
  misc_difference 29: note = May be absent
  misc_difference 30: note = May be absent
  misc_difference 31: note = May be absent
  misc_difference 32: note = May be absent
  misc_difference 33: note = May be absent
  misc_difference 34: note = May be absent
  misc_difference 35: note = May be absent
  misc_difference 36: note = May be absent
  misc_difference 37: note = May be absent
  misc_difference 38: note = May be absent
  misc_difference 39: note = May be absent
  misc_difference 40: note = May be absent
  misc_difference 41: note = May be absent
  misc_difference 42: note = May be absent
  misc_difference 43: note = May be absent
  misc_difference 44: note = a, c, g, u, unknown, other, or absent
  misc_difference 45: note = a, c, g, u, unknown, other, or absent
  misc_difference 46: note = a, c, g, u, unknown, other, or absent
  misc_difference 47: note = a, c, g, u, unknown, other, or absent
  misc_difference 48: note = a, c, g, u, unknown, other, or absent
  misc_difference 49: note = a, c, g, u, unknown, other, or absent
  misc_difference 50: note = a, c, g, u, unknown, other, or absent
  misc_difference 51: note = a, c, g, u, unknown, other, or absent
  misc_difference 52: note = a, c, g, u, unknown, other, or absent
  misc_difference 53: note = a, c, g, u, unknown, other, or absent
  misc_difference 54: note = a, c, g, u, unknown, other, or absent
  misc_difference 55: note = a, c, g, u, unknown, other, or absent
  misc_difference 56: note = a, c, g, u, unknown, other, or absent
  misc_difference 57: note = a, c, g, u, unknown, other, or absent
  misc_difference 58: note = a, c, g, u, unknown, other, or absent
  misc_difference 59: note = a, c, g, u, unknown, other, or absent
  misc_difference 60: note = a, c, g, u, unknown, other, or absent
  misc_difference 61: note = a, c, g, u, unknown, other, or absent
  misc_difference 62: note = a, c, g, u, unknown, other, or absent
  misc_difference 63: note = a, c, g, u, unknown, other, or absent
  misc_difference 64: note = a, c, g, u, unknown, other, or absent
  misc_difference 65: note = a, c, g, u, unknown, other, or absent
  misc_difference 66: note = a, c, g, u, unknown, other, or absent
  misc_difference 67: note = a, c, g, u, unknown, other, or absent
  misc_difference 68: note = a, c, g, u, unknown, other, or absent
  misc_difference 69: note = a, c, g, u, unknown, other, or absent
  misc_difference 70: note = a, c, g, u, unknown, other, or absent
  misc_difference 71: note = a, c, g, u, unknown, other, or absent
  misc_difference 72: note = a, c, g, u, unknown, other, or absent
  misc_difference 73: note = a, c, g, u, unknown, other, or absent
  misc_difference 74: note = a, c, g, u, unknown, other, or absent
  misc_difference 75: note = a, c, g, u, unknown, other, or absent
  misc_difference 76: note = a, c, g, u, unknown, other, or absent
  misc_difference 77: note = a, c, g, u, unknown, other, or absent
  misc_difference 78: note = a, c, g, u, unknown, other, or absent
  misc_difference 79: note = a, c, g, u, unknown, other, or absent
  misc_difference 80: note = a, c, g, u, unknown, other, or absent
  misc_difference 81: note = a, c, g, u, unknown, other, or absent
  misc_difference 82: note = a, c, g, u, unknown, other, or absent
  misc_difference 83: note = a, c, g, u, unknown, other, or absent
  misc_difference 84: note = a, c, g, u, unknown, other, or absent
  misc_difference 85: note = a, c, g, u, unknown, other, or absent
  misc_difference 86: note = a, c, g, u, unknown, other, or absent
  misc_difference 87: note = a, c, g, u, unknown, other, or absent
  misc_difference 88: note = a, c, g, u, unknown, other, or absent
  misc_difference 89: note = a, c, g, u, unknown, other, or absent
  misc_difference 90: note = a, c, g, u, unknown, other, or absent
  misc_difference 91: note = a, c, g, u, unknown, other, or absent
  misc_difference 92: note = a, c, g, u, unknown, other, or absent
  misc_difference 93: note = a, c, g, u, unknown, other, or absent
  misc_difference 94: note = a, c, g, u, unknown, other, or absent
  misc_difference 95: note = a, c, g, u, unknown, other, or absent
  misc_difference 96: note = a, c, g, u, unknown, other, or absent
  misc_difference 97: note = a, c, g, u, unknown, other, or absent
  misc_difference 98: note = a, c, g, u, unknown, other, or absent
  misc_difference 99: note = a, c, g, u, unknown, other, or absent
  misc_difference 100: note = a, c, g, u, unknown, other, or absent
  misc_difference 101: note = a, c, g, u, unknown, other, or absent
  misc_difference 102: note = a, c, g, u, unknown, other, or absent
  misc_difference 103: note = a, c, g, u, unknown, other, or absent
  misc_difference 104: note = a, c, g, u, unknown, other, or absent
  misc_difference 105: note = a, c, g, u, unknown, other, or absent
  misc_difference 106: note = a, c, g, u, unknown, other, or absent
  misc_difference 107: note = a, c, g, u, unknown, other, or absent
  misc_difference 108: note = a, c, g, u, unknown, other, or absent
  misc_difference 109: note = a, c, g, u, unknown, other, or absent
  misc_difference 110: note = a, c, g, u, unknown, other, or absent
  misc_difference 111: note = a, c, g, u, unknown, other, or absent
  misc_difference 112: note = a, c, g, u, unknown, other, or absent
  misc_difference 113: note = a, c, g, u, unknown, other, or absent
  misc_difference 114: note = a, c, g, u, unknown, other, or absent
  misc_difference 115: note = a, c, g, u, unknown, other, or absent
  misc_difference 116: note = a, c, g, u, unknown, other, or absent
  misc_difference 117: note = a, c, g, u, unknown, other, or absent
  misc_difference 118: note = a, c, g, u, unknown, other, or absent
  misc_difference 119: note = a, c, g, u, unknown, other, or absent
  misc_difference 120: note = a, c, g, u, unknown, other, or absent
  misc_difference 121: note = a, c, g, u, unknown, other, or absent
  misc_difference 122: note = a, c, g, u, unknown, other, or absent
  misc_difference 123: note = a, c, g, u, unknown, other, or absent
  misc_difference 124: note = a, c, g, u, unknown, other, or absent
  misc_difference 125: note = a, c, g, u, unknown, other, or absent
  misc_difference 126: note = a, c, g, u, unknown, other, or absent
  misc_difference 127: note = a, c, g, u, unknown, other, or absent
  misc_difference 128: note = a, c, g, u, unknown, other, or absent
  misc_difference 129: note = a, c, g, u, unknown, other, or absent
  misc_difference 130: note = a, c, g, u, unknown, other, or absent
  misc_difference 131: note = a, c, g, u, unknown, other, or absent
  misc_difference 132: note = a, c, g, u, unknown, other, or absent
  misc_difference 133: note = a, c, g, u, unknown, other, or absent
  misc_difference 134: note = a, c, g, u, unknown, other, or absent
  misc_difference 135: note = a, c, g, u, unknown, other, or absent
  misc_difference 136: note = a, c, g, u, unknown, other, or absent
  misc_difference 137: note = a, c, g, u, unknown, other, or absent
  misc_difference 138: note = a, c, g, u, unknown, other, or absent
  misc_difference 139: note = a, c, g, u, unknown, other, or absent
  misc_difference 140: note = a, c, g, u, unknown, other, or absent
  misc_difference 141: note = a, c, g, u, unknown, other, or absent
  misc_difference 142: note = a, c, g, u, unknown, other, or absent
  misc_difference 143: note = a, c, g, u, unknown, other, or absent
  misc_difference 144: note = a, c, g, u, unknown, other, or absent
  misc_difference 145: note = a, c, g, u, unknown, other, or absent
  misc_difference 146: note = a, c, g, u, unknown, other, or absent
  misc_difference 147: note = a, c, g, u, unknown, other, or absent
  misc_difference 148: note = a, c, g, u, unknown, other, or absent
  misc_difference 149: note = a, c, g, u, unknown, other, or absent
  misc_difference 150: note = a, c, g, u, unknown, other, or absent
  misc_difference 151: note = a, c, g, u, unknown, other, or absent
  misc_difference 152: note = a, c, g, u, unknown, other, or absent
  misc_difference 153: note = a, c, g, u, unknown, other, or absent
  misc_difference 154: note = a, c, g, u, unknown, other, or absent
  misc_difference 155: note = a, c, g, u, unknown, other, or absent
  misc_difference 156: note = a, c, g, u, unknown, other, or absent
  misc_difference 157: note = a, c, g, u, unknown, other, or absent
  misc_difference 158: note = a, c, g, u, unknown, other, or absent
  misc_difference 159: note = a, c, g, u, unknown, other, or absent
  misc_difference 160: note = a, c, g, u, unknown, other, or absent
  misc_difference 161: note = a, c, g, u, unknown, other, or absent
  misc_difference 162: note = a, c, g, u, unknown, other, or absent
  misc_difference 163: note = a, c, g, u, unknown, other, or absent
  misc_difference 164: note = a, c, g, u, unknown, other, or absent
  misc_difference 165: note = a, c, g, u, unknown, other, or absent
  misc_difference 166: note = a, c, g, u, unknown, other, or absent
  misc_difference 167: note = a, c, g, u, unknown, other, or absent
  misc_difference 168: note = a, c, g, u, unknown, other, or absent
  misc_difference 169: note = a, c, g, u, unknown, other, or absent
  misc_difference 170: note = a, c, g, u, unknown, other, or absent
  misc_difference 171: note = a, c, g, u, unknown, other, or absent
  misc_difference 172: note = a, c, g, u, unknown, other, or absent
  misc_difference 173: note = a, c, g, u, unknown, other, or absent
  misc_difference 174: note = a, c, g, u, unknown, other, or absent
  misc_difference 175: note = a, c, g, u, unknown, other, or absent
  misc_difference 176: note = a, c, g, u, unknown, other, or absent
  misc_difference 177: note = a, c, g, u, unknown, other, or absent
  misc_difference 178: note = a, c, g, u, unknown, other, or absent
  misc_difference 179: note = a, c, g, u, unknown, other, or absent
  misc_difference 180: note = a, c, g, u, unknown, other, or absent
  misc_difference 181: note = a, c, g, u, unknown, other, or absent
  misc_difference 182: note = a, c, g, u, unknown, other, or absent
  misc_difference 183: note = a, c, g, u, unknown, other, or absent
  misc_difference 184: note = a, c, g, u, unknown, other, or absent
  misc_difference 185: note = a, c, g, u, unknown, other, or absent
  misc_difference 186: note = a, c, g, u, unknown, other, or absent
  misc_difference 187: note = a, c, g, u, unknown, other, or absent
  misc_difference 188: note = a, c, g, u, unknown, other, or absent
  misc_difference 189: note = a, c, g, u, unknown, other, or absent
  misc_difference 190: note = a, c, g, u, unknown, other, or absent
  misc_difference 191: note = a, c, g, u, unknown, other, or absent
  misc_difference 192: note = a, c, g, u, unknown, other, or absent
  misc_difference 193: note = a, c, g, u, unknown, other, or absent
  misc_difference 194: note = a, c, g, u, unknown, other, or absent
  misc_difference 195: note = a, c, g, u, unknown, other, or absent
  misc_difference 196: note = a, c, g, u, unknown, other, or absent
  misc_difference 197: note = a, c, g, u, unknown, other, or absent
  misc_difference 198: note = a, c, g, u, unknown, other, or absent
  misc_difference 199: note = a, c, g, u, unknown, other, or absent
  misc_difference 200: note = a, c, g, u, unknown, other, or absent
  misc_difference 201: note = a, c, g, u, unknown, other, or absent
  misc_difference 202: note = a, c, g, u, unknown, other, or absent
  misc_difference 203: note = a, c, g, u, unknown, other, or absent
  misc_difference 204: note = a, c, g, u, unknown, other, or absent
  misc_difference 205: note = a, c, g, u, unknown, other, or absent
  misc_difference 206: note = a, c, g, u, unknown, other, or absent
  misc_difference 207: note = a, c, g, u, unknown, other, or absent
  misc_difference 208: note = a, c, g, u, unknown, other, or absent
  misc_difference 209: note = a, c, g, u, unknown, other, or absent
  misc_difference 210: note = a, c, g, u, unknown, other, or absent
  misc_difference 211: note = a, c, g, u, unknown, other, or absent
  misc_difference 212: note = a, c, g, u, unknown, other, or absent
  misc_difference 213: note = a, c, g, u, unknown, other, or absent
  misc_difference 214: note = a, c, g, u, unknown, other, or absent
  misc_difference 215: note = a, c, g, u, unknown, other, or absent
  misc_difference 216: note = a, c, g, u, unknown, other, or absent
  misc_difference 217: note = a, c, g, u, unknown, other, or absent
  misc_difference 218: note = a, c, g, u, unknown, other, or absent
  misc_difference 219: note = a, c, g, u, unknown, other, or absent
  misc_difference 220: note = a, c, g, u, unknown, other, or absent
  misc_difference 221: note = a, c, g, u, unknown, other, or absent
  misc_difference 222: note = a, c, g, u, unknown, other, or absent
  misc_difference 223: note = a, c, g, u, unknown, other, or absent
  misc_difference 224: note = a, c, g, u, unknown, other, or absent
  misc_difference 225: note = a, c, g, u, unknown, other, or absent
  misc_difference 226: note = a, c, g, u, unknown, other, or absent
  misc_difference 227: note = a, c, g, u, unknown, other, or absent
  misc_difference 228: note = a, c, g, u, unknown, other, or absent
  misc_difference 229: note = a, c, g, u, unknown, other, or absent
  misc_difference 230: note = a, c, g, u, unknown, other, or absent
  misc_difference 231: note = a, c, g, u, unknown, other, or absent
  misc_difference 232: note = a, c, g, u, unknown, other, or absent
  misc_difference 233: note = a, c, g, u, unknown, other, or absent
  misc_difference 234: note = a, c, g, u, unknown, other, or absent
  misc_difference 235: note = a, c, g, u, unknown, other, or absent
  misc_difference 236: note = a, c, g, u, unknown, other, or absent
  misc_difference 237: note = a, c, g, u, unknown, other, or absent
  misc_difference 238: note = a, c, g, u, unknown, other, or absent
  misc_difference 239: note = a, c, g, u, unknown, other, or absent
  misc_difference 240: note = a, c, g, u, unknown, other, or absent
  misc_difference 241: note = a, c, g, u, unknown, other, or absent
  misc_difference 242: note = a, c, g, u, unknown, other, or absent
  misc_difference 243: note = a, c, g, u, unknown, other, or absent
  misc_difference 244: note = a, c, g, u, unknown, other, or absent
  misc_difference 245: note = a, c, g, u, unknown, other, or absent
  misc_difference 246: note = a, c, g, u, unknown, other, or absent
  misc_difference 247: note = a, c, g, u, unknown, other, or absent
  misc_difference 248: note = a, c, g, u, unknown, other, or absent
  misc_difference 249: note = a, c, g, u, unknown, other, or absent
  misc_difference 250: note = a, c, g, u, unknown, other, or absent
  misc_difference 251: note = a, c, g, u, unknown, other, or absent
  misc_difference 252: note = a, c, g, u, unknown, other, or absent
  misc_difference 253: note = a, c, g, u, unknown, other, or absent
  misc_difference 254: note = a, c, g, u, unknown, other, or absent
  misc_difference 255: note = a, c, g, u, unknown, other, or absent
  misc_difference 256: note = a, c, g, u, unknown, other, or absent
  misc_difference 257: note = a, c, g, u, unknown, other, or absent
  misc_difference 258: note = a, c, g, u, unknown, other, or absent
  misc_difference 259: note = a, c, g, u, unknown, other, or absent
  misc_difference 260: note = a, c, g, u, unknown, other, or absent
  misc_difference 261: note = a, c, g, u, unknown, other, or absent
  misc_difference 262: note = a, c, g, u, unknown, other, or absent
  misc_difference 263: note = a, c, g, u, unknown, other, or absent
  misc_difference 264: note = a, c, g, u, unknown, other, or absent
  misc_difference 265: note = a, c, g, u, unknown, other, or absent
  misc_difference 266: note = a, c, g, u, unknown, other, or absent
  misc_difference 267: note = a, c, g, u, unknown, other, or absent
  misc_difference 268: note = a, c, g, u, unknown, other, or absent
  misc_difference 269: note = a, c, g, u, unknown, other, or absent
  misc_difference 270: note = a, c, g, u, unknown, other, or absent
  misc_difference 271: note = a, c, g, u, unknown, other, or absent
  misc_difference 272: note = a, c, g, u, unknown, other, or absent
  misc_difference 273: note = a, c, g, u, unknown, other, or absent
  misc_difference 274: note = a, c, g, u, unknown, other, or absent
  misc_difference 275: note = a, c, g, u, unknown, other, or absent
  misc_difference 276: note = a, c, g, u, unknown, other, or absent
  misc_difference 277: note = a, c, g, u, unknown, other, or absent
  misc_difference 278: note = a, c, g, u, unknown, other, or absent
  misc_difference 279: note = a, c, g, u, unknown, other, or absent
  misc_difference 280: note = a, c, g, u, unknown, other, or absent
  misc_difference 281: note = a, c, g, u, unknown, other, or absent
  misc_difference 282: note = a, c, g, u, unknown, other, or absent
  misc_difference 283: note = a, c, g, u, unknown, other, or absent
  misc_difference 284: note = a, c, g, u, unknown, other, or absent
  misc_difference 285: note = a, c, g, u, unknown, other, or absent
  misc_difference 286: note = a, c, g, u, unknown, other, or absent
  misc_difference 287: note = a, c, g, u, unknown, other, or absent
  misc_difference 288: note = a, c, g, u, unknown, other, or absent
  misc_difference 289: note = a, c, g, u, unknown, other, or absent
  misc_difference 290: note = a, c, g, u, unknown, other, or absent
  misc_difference 291: note = a, c, g, u, unknown, other, or absent
  misc_difference 292: note = a, c, g, u, unknown, other, or absent
  misc_difference 293: note = a, c, g, u, unknown, other, or absent
  misc_difference 294: note = a, c, g, u, unknown, other, or absent
  misc_difference 295: note = a, c, g, u, unknown, other, or absent
  misc_difference 296: note = a, c, g, u, unknown, other, or absent
  misc_difference 297: note = a, c, g, u, unknown, other, or absent
  misc_difference 298: note = a, c, g, u, unknown, other, or absent
  misc_difference 299: note = a, c, g, u, unknown, other, or absent
  misc_difference 300: note = a, c, g, u, unknown, other, or absent
  misc_difference 301: note = a, c, g, u, unknown, other, or absent
  misc_difference 302: note = a, c, g, u, unknown, other, or absent
  misc_difference 303: note = a, c, g, u, unknown, other, or absent
  misc_difference 304: note = a, c, g, u, unknown, other, or absent
  misc_difference 305: note = a, c, g, u, unknown, other, or absent
  misc_difference 306: note = a, c, g, u, unknown, other, or absent
  misc_difference 307: note = a, c, g, u, unknown, other, or absent
  misc_difference 308: note = a, c, g, u, unknown, other, or absent
  misc_difference 309: note = a, c, g, u, unknown, other, or absent
  misc_difference 310: note = a, c, g, u, unknown, other, or absent
  misc_difference 311: note = a, c, g, u, unknown, other, or absent
  misc_difference 312: note = a, c, g, u, unknown, other, or absent
  misc_difference 313: note = a, c, g, u, unknown, other, or absent
  misc_difference 314: note = a, c, g, u, unknown, other, or absent
  misc_difference 315: note = May be absent
  misc_difference 316: note = May be absent
  misc_difference 317: note = May be absent
  misc_difference 318: note = May be absent
  misc_difference 319: note = May be absent
  misc_difference 320: note = May be absent
  misc_difference 321: note = May be absent
  misc_difference 322: note = May be absent
  misc_difference 323: note = May be absent
  misc_difference 324: note = May be absent
  misc_difference 325: note = May be absent
  misc_difference 326: note = May be absent
  misc_difference 327: note = May be absent
  misc_difference 328: note = May be absent
  misc_difference 329: note = May be absent
  misc_difference 330: note = May be absent
  misc_difference 331: note = May be absent
  misc_difference 332: note = May be absent
  misc_difference 333: note = May be absent
  misc_difference 334: note = May be absent
  misc_difference 335: note = May be absent
  misc_difference 336: note = May be absent
  misc_difference 337: note = May be absent
  misc_difference 338: note = May be absent
  misc_difference 339: note = May be absent
  misc_difference 44..315: note = This region may encompass 1-271 nucleotides
grmmkvrkggysmarytggharssykkybrrstccasakbvrwnnnnnnnnnnnnnnnnnnnnnnnnnnnnnnnnnnnnnnnnnnnnnnnnnnnnnnnnnnnnnnnnnnnnnnnnnnnnnnnnnnnnnnnnnnnnnnnnnnnnnnnnnnnnnnnnnnnnnnnnnnnnnnnnnnnnnnnnnnnnnnnnnnnnnnnnnnnnnnnnnnnnnnnnnnnnnnnnnnnnnnnnnnnnnnnnnnnnnnnnnnnnnnnnnnnnnnnnnnnnnnnnnnnnnnnnnnnnnnnnnnnnnnnnnnnnnnnnnnnnnnnnnnnnnnnsygkgttcradycmcrkyksbgyma

SEQ ID NO: 615 - RNA, 339 nt, synthetic construct; identical to SEQ ID NO: 614
  source 1..339: mol_type = other RNA
  misc_difference 1: note = May be absent
  misc_difference 2: note = May be absent
  misc_difference 3: note = May be absent
  misc_difference 4: note = May be absent
  misc_difference 5: note = May be absent
  misc_difference 6: note = May be absent
  misc_difference 7: note = May be absent
  misc_difference 8: note = May be absent
  misc_difference 9: note = May be absent
  misc_difference 10: note = May be absent
  misc_difference 11: note = May be absent
  misc_difference 12: note = May be absent
  misc_difference 13: note = May be absent
  misc_difference 14: note = May be absent
  misc_difference 15: note = May be absent
  misc_difference 16: note = May be absent
  misc_difference 17: note = May be absent
  misc_difference 18: note = May be absent
  misc_difference 19: note = May be absent
  misc_difference 20: note = May be absent
  misc_difference 21: note = May be absent
  misc_difference 22: note = May be absent
  misc_difference 23: note = May be absent
  misc_difference 24: note = May be absent
  misc_difference 25: note = May be absent
  misc_difference 26: note = May be absent
  misc_difference 27: note = May be absent
  misc_difference 28: note = May be absent
  misc_difference 29: note = May be absent
  misc_difference 30: note = May be absent
  misc_difference 31: note = May be absent
  misc_difference 32: note = May be absent
  misc_difference 33: note = May be absent
  misc_difference 34: note = May be absent
  misc_difference 35: note = May be absent
  misc_difference 36: note = May be absent
  misc_difference 37: note = May be absent
  misc_difference 38: note = May be absent
  misc_difference 39: note = May be absent
  misc_difference 40: note = May be absent
  misc_difference 41: note = May be absent
  misc_difference 42: note = May be absent
  misc_difference 43: note = May be absent
  misc_difference 44: note = a, c, g, u, unknown, other, or absent
  misc_difference 45: note = a, c, g, u, unknown, other, or absent
  misc_difference 46: note = a, c, g, u, unknown, other, or absent
  misc_difference 47: note = a, c, g, u, unknown, other, or absent
  misc_difference 48: note = a, c, g, u, unknown, other, or absent
  misc_difference 49: note = a, c, g, u, unknown, other, or absent
  misc_difference 50: note = a, c, g, u, unknown, other, or absent
  misc_difference 51: note = a, c, g, u, unknown, other, or absent
  misc_difference 52: note = a, c, g, u, unknown, other, or absent
  misc_difference 53: note = a, c, g, u, unknown, other, or absent
  misc_difference 54: note = a, c, g, u, unknown, other, or absent
  misc_difference 55: note = a, c, g, u, unknown, other, or absent
  misc_difference 56: note = a, c, g, u, unknown, other, or absent
  misc_difference 57: note = a, c, g, u, unknown, other, or absent
  misc_difference 58: note = a, c, g, u, unknown, other, or absent
  misc_difference 59: note = a, c, g, u, unknown, other, or absent
  misc_difference 60: note = a, c, g, u, unknown, other, or absent
  misc_difference 61: note = a, c, g, u, unknown, other, or absent
  misc_difference 62: note = a, c, g, u, unknown, other, or absent
  misc_difference 63: note = a, c, g, u, unknown, other, or absent
  misc_difference 64: note = a, c, g, u, unknown, other, or absent
  misc_difference 65: note = a, c, g, u, unknown, other, or absent
  misc_difference 66: note = a, c, g, u, unknown, other, or absent
  misc_difference 67: note = a, c, g, u, unknown, other, or absent
  misc_difference 68: note = a, c, g, u, unknown, other, or absent
  misc_difference 69: note = a, c, g, u, unknown, other, or absent
  misc_difference 70: note = a, c, g, u, unknown, other, or absent
  misc_difference 71: note = a, c, g, u, unknown, other, or absent
  misc_difference 72: note = a, c, g, u, unknown, other, or absent
  misc_difference 73: note = a, c, g, u, unknown, other, or absent
  misc_difference 74: note = a, c, g, u, unknown, other, or absent
  misc_difference 75: note = a, c, g, u, unknown, other, or absent
  misc_difference 76: note = a, c, g, u, unknown, other, or absent
  misc_difference 77: note = a, c, g, u, unknown, other, or absent
  misc_difference 78: note = a, c, g, u, unknown, other, or absent
  misc_difference 79: note = a, c, g, u, unknown, other, or absent
  misc_difference 80: note = a, c, g, u, unknown, other, or absent
  misc_difference 81: note = a, c, g, u, unknown, other, or absent
  misc_difference 82: note = a, c, g, u, unknown, other, or absent
  misc_difference 83: note = a, c, g, u, unknown, other, or absent
  misc_difference 84: note = a, c, g, u, unknown, other, or absent
  misc_difference 85: note = a, c, g, u, unknown, other, or absent
  misc_difference 86: note = a, c, g, u, unknown, other, or absent
  misc_difference 87: note = a, c, g, u, unknown, other, or absent
  misc_difference 88: note = a, c, g, u, unknown, other, or absent
  misc_difference 89: note = a, c, g, u, unknown, other, or absent
  misc_difference 90: note = a, c, g, u, unknown, other, or absent
  misc_difference 91: note = a, c, g, u, unknown, other, or absent
  misc_difference 92: note = a, c, g, u, unknown, other, or absent
  misc_difference 93: note = a, c, g, u, unknown, other, or absent
  misc_difference 94: note = a, c, g, u, unknown, other, or absent
  misc_difference 95: note = a, c, g, u, unknown, other, or absent
  misc_difference 96: note = a, c, g, u, unknown, other, or absent
  misc_difference 97: note = a, c, g, u, unknown, other, or absent
  misc_difference 98: note = a, c, g, u, unknown, other, or absent
  misc_difference 99: note = a, c, g, u, unknown, other, or absent
  misc_difference 100: note = a, c, g, u, unknown, other, or absent
  misc_difference 101: note = a, c, g, u, unknown, other, or absent
  misc_difference 102: note = a, c, g, u, unknown, other, or absent
  misc_difference 103: note = a, c, g, u, unknown, other, or absent
  misc_difference 104: note = a, c, g, u, unknown, other, or absent
  misc_difference 105: note = a, c, g, u, unknown, other, or absent
  misc_difference 106: note = a, c, g, u, unknown, other, or absent
  misc_difference 107: note = a, c, g, u, unknown, other, or absent
  misc_difference 108: note = a, c, g, u, unknown, other, or absent
  misc_difference 109: note = a, c, g, u, unknown, other, or absent
  misc_difference 110: note = a, c, g, u, unknown, other, or absent
  misc_difference 111: note = a, c, g, u, unknown, other, or absent
  misc_difference 112: note = a, c, g, u, unknown, other, or absent
  misc_difference 113: note = a, c, g, u, unknown, other, or absent
  misc_difference 114: note = a, c, g, u, unknown, other, or absent
  misc_difference 115: note = a, c, g, u, unknown, other, or absent
  misc_difference 116: note = a, c, g, u, unknown, other, or absent
  misc_difference 117: note = a, c, g, u, unknown, other, or absent
  misc_difference 118: note = a, c, g, u, unknown, other, or absent
  misc_difference 119: note = a, c, g, u, unknown, other, or absent
  misc_difference 120: note = a, c, g, u, unknown, other, or absent
  misc_difference 121: note = a, c, g, u, unknown, other, or absent
  misc_difference 122: note = a, c, g, u, unknown, other, or absent
  misc_difference 123: note = a, c, g, u, unknown, other, or absent
  misc_difference 124: note = a, c, g, u, unknown, other, or absent
  misc_difference 125: note = a, c, g, u, unknown, other, or absent
  misc_difference 126: note = a, c, g, u, unknown, other, or absent
  misc_difference 127: note = a, c, g, u, unknown, other, or absent
  misc_difference 128: note = a, c, g, u, unknown, other, or absent
  misc_difference 129: note = a, c, g, u, unknown, other, or absent
  misc_difference 130: note = a, c, g, u, unknown, other, or absent
  misc_difference 131: note = a, c, g, u, unknown, other, or absent
  misc_difference 132: note = a, c, g, u, unknown, other, or absent
  misc_difference 133: note = a, c, g, u, unknown, other, or absent
  misc_difference 134: note = a, c, g, u, unknown, other, or absent
  misc_difference 135: note = a, c, g, u, unknown, other, or absent
  misc_difference 136: note = a, c, g, u, unknown, other, or absent
  misc_difference 137: note = a, c, g, u, unknown, other, or absent
  misc_difference 138: note = a, c, g, u, unknown, other, or absent
  misc_difference 139: note = a, c, g, u, unknown, other, or absent
  misc_difference 140: note = a, c, g, u, unknown, other, or absent
  misc_difference 141: note = a, c, g, u, unknown, other, or absent
  misc_difference 142: note = a, c, g, u, unknown, other, or absent
  misc_difference 143: note = a, c, g, u, unknown, other, or absent
  misc_difference 144: note = a, c, g, u, unknown, other, or absent
  misc_difference 145: note = a, c, g, u, unknown, other, or absent
  misc_difference 146: note = a, c, g, u, unknown, other, or absent
  misc_difference 147: note = a, c, g, u, unknown, other, or absent
  misc_difference 148: note = a, c, g, u, unknown, other, or absent
  misc_difference 149: note = a, c, g, u, unknown, other, or absent
  misc_difference 150: note = a, c, g, u, unknown, other, or absent
  misc_difference 151: note = a, c, g, u, unknown, other, or absent
  misc_difference 152: note = a, c, g, u, unknown, other, or absent
  misc_difference 153: note = a, c, g, u, unknown, other, or absent
  misc_difference 154: note = a, c, g, u, unknown, other, or absent
  misc_difference 155: note = a, c, g, u, unknown, other, or absent
  misc_difference 156: note = a, c, g, u, unknown, other, or absent
  misc_difference 157: note = a, c, g, u, unknown, other, or absent
  misc_difference 158: note = a, c, g, u, unknown, other, or absent
  misc_difference 159: note = a, c, g, u, unknown, other, or absent
  misc_difference 160: note = a, c, g, u, unknown, other, or absent
  misc_difference 161: note = a, c, g, u, unknown, other, or absent
  misc_difference 162: note = a, c, g, u, unknown, other, or absent
  misc_difference 163: note = a, c, g, u, unknown, other, or absent
  misc_difference 164: note = a, c, g, u, unknown, other, or absent
  misc_difference 165: note = a, c, g, u, unknown, other, or absent
  misc_difference 166: note = a, c, g, u, unknown, other, or absent
  misc_difference 167: note = a, c, g, u, unknown, other, or absent
  misc_difference 168: note = a, c, g, u, unknown, other, or absent
  misc_difference 169: note = a, c, g, u, unknown, other, or absent
  misc_difference 170: note = a, c, g, u, unknown, other, or absent
  misc_difference 171: note = a, c, g, u, unknown, other, or absent
  misc_difference 172: note = a, c, g, u, unknown, other, or absent
  misc_difference 173: note = a, c, g, u, unknown, other, or absent
  misc_difference 174: note = a, c, g, u, unknown, other, or absent
  misc_difference 175: note = a, c, g, u, unknown, other, or absent
  misc_difference 176: note = a, c, g, u, unknown, other, or absent
  misc_difference 177: note = a, c, g, u, unknown, other, or absent
  misc_difference 178: note = a, c, g, u, unknown, other, or absent
  misc_difference 179: note = a, c, g, u, unknown, other, or absent
  misc_difference 180: note = a, c, g, u, unknown, other, or absent
  misc_difference 181: note = a, c, g, u, unknown, other, or absent
  misc_difference 182: note = a, c, g, u, unknown, other, or absent
  misc_difference 183: note = a, c, g, u, unknown, other, or absent
  misc_difference 184: note = a, c, g, u, unknown, other, or absent
  misc_difference 185: note = a, c, g, u, unknown, other, or absent
  misc_difference 186: note = a, c, g, u, unknown, other, or absent
  misc_difference 187: note = a, c, g, u, unknown, other, or absent
  misc_difference 188: note = a, c, g, u, unknown, other, or absent
  misc_difference 189: note = a, c, g, u, unknown, other, or absent
  misc_difference 190: note = a, c, g, u, unknown, other, or absent
  misc_difference 191: note = a, c, g, u, unknown, other, or absent
  misc_difference 192: note = a, c, g, u, unknown, other, or absent
  misc_difference 193: note = a, c, g, u, unknown, other, or absent
  misc_difference 194: note = a, c, g, u, unknown, other, or absent
  misc_difference 195: note = a, c, g, u, unknown, other, or absent
  misc_difference 196: note = a, c, g, u, unknown, other, or absent
  misc_difference 197: note = a, c, g, u, unknown, other, or absent
  misc_difference 198: note = a, c, g, u, unknown, other, or absent
  misc_difference 199: note = a, c, g, u, unknown, other, or absent
  misc_difference 200: note = a, c, g, u, unknown, other, or absent
  misc_difference 201: note = a, c, g, u, unknown, other, or absent
  misc_difference 202: note = a, c, g, u, unknown, other, or absent
  misc_difference 203: note = a, c, g, u, unknown, other, or absent
  misc_difference 204: note = a, c, g, u, unknown, other, or absent
  misc_difference 205: note = a, c, g, u, unknown, other, or absent
  misc_difference 206: note = a, c, g, u, unknown, other, or absent
  misc_difference 207: note = a, c, g, u, unknown, other, or absent
  misc_difference 208: note = a, c, g, u, unknown, other, or absent
  misc_difference 209: note = a, c, g, u, unknown, other, or absent
  misc_difference 210: note = a, c, g, u, unknown, other, or absent
  misc_difference 211: note = a, c, g, u, unknown, other, or absent
  misc_difference 212: note = a, c, g, u, unknown, other, or absent
  misc_difference 213: note = a, c, g, u, unknown, other, or absent
  misc_difference 214: note = a, c, g, u, unknown, other, or absent
  misc_difference 215: note = a, c, g, u, unknown, other, or absent
  misc_difference 216: note = a, c, g, u, unknown, other, or absent
  misc_difference 217: note = a, c, g, u, unknown, other, or absent
  misc_difference 218: note = a, c, g, u, unknown, other, or absent
  misc_difference 219: note = a, c, g, u, unknown, other, or absent
  misc_difference 220: note = a, c, g, u, unknown, other, or absent
  misc_difference 221: note = a, c, g, u, unknown, other, or absent
  misc_difference 222: note = a, c, g, u, unknown, other, or absent
  misc_difference 223: note = a, c, g, u, unknown, other, or absent
  misc_difference 224: note = a, c, g, u, unknown, other, or absent
  misc_difference 225: note = a, c, g, u, unknown, other, or absent
  misc_difference 226: note = a, c, g, u, unknown, other, or absent
  misc_difference 227: note = a, c, g, u, unknown, other, or absent
  misc_difference 228: note = a, c, g, u, unknown, other, or absent
  misc_difference 229: note = a, c, g, u, unknown, other, or absent
  misc_difference 230: note = a, c, g, u, unknown, other, or absent
  misc_difference 231: note = a, c, g, u, unknown, other, or absent
  misc_difference 232: note = a, c, g, u, unknown, other, or absent
  misc_difference 233: note = a, c, g, u, unknown, other, or absent
  misc_difference 234: note = a, c, g, u, unknown, other, or absent
  misc_difference 235: note = a, c, g, u, unknown, other, or absent
  misc_difference 236: note = a, c, g, u, unknown, other, or absent
  misc_difference 237: note = a, c, g, u, unknown, other, or absent
  misc_difference 238: note = a, c, g, u, unknown, other, or absent
  misc_difference 239: note = a, c, g, u, unknown, other, or absent
  misc_difference 240: note = a, c, g, u, unknown, other, or absent
  misc_difference 241: note = a, c, g, u, unknown, other, or absent
  misc_difference 242: note = a, c, g, u, unknown, other, or absent
  misc_difference 243: note = a, c, g, u, unknown, other, or absent
  misc_difference 244: note = a, c, g, u, unknown, other, or absent
  misc_difference 245: note = a, c, g, u, unknown, other, or absent
  misc_difference 246: note = a, c, g, u, unknown, other, or absent
  misc_difference 247: note = a, c, g, u, unknown, other, or absent
  misc_difference 248: note = a, c, g, u, unknown, other, or absent
  misc_difference 249: note = a, c, g, u, unknown, other, or absent
  misc_difference 250: note = a, c, g, u, unknown, other, or absent
  misc_difference 251: note = a, c, g, u, unknown, other, or absent
  misc_difference 252: note = a, c, g, u, unknown, other, or absent
  misc_difference 253: note = a, c, g, u, unknown, other, or absent
  misc_difference 254: note = a, c, g, u, unknown, other, or absent
  misc_difference 255: note = a, c, g, u, unknown, other, or absent
  misc_difference 256: note = a, c, g, u, unknown, other, or absent
  misc_difference 257: note = a, c, g, u, unknown, other, or absent
  misc_difference 258: note = a, c, g, u, unknown, other, or absent
  misc_difference 259: note = a, c, g, u, unknown, other, or absent
  misc_difference 260: note = a, c, g, u, unknown, other, or absent
  misc_difference 261: note = a, c, g, u, unknown, other, or absent
  misc_difference 262: note = a, c, g, u, unknown, other, or absent
  misc_difference 263: note = a, c, g, u, unknown, other, or absent
  misc_difference 264: note = a, c, g, u, unknown, other, or absent
  misc_difference 265: note = a, c, g, u, unknown, other, or absent
  misc_difference 266: note = a, c, g, u, unknown, other, or absent
  misc_difference 267: note = a, c, g, u, unknown, other, or absent
  misc_difference 268: note = a, c, g, u, unknown, other, or absent
  misc_difference 269: note = a, c, g, u, unknown, other, or absent
  misc_difference 270: note = a, c, g, u, unknown, other, or absent
  misc_difference 271: note = a, c, g, u, unknown, other, or absent
  misc_difference 272: note = a, c, g, u, unknown, other, or absent
  misc_difference 273: note = a, c, g, u, unknown, other, or absent
  misc_difference 274: note = a, c, g, u, unknown, other, or absent
  misc_difference 275: note = a, c, g, u, unknown, other, or absent
  misc_difference 276: note = a, c, g, u, unknown, other, or absent
  misc_difference 277: note = a, c, g, u, unknown, other, or absent
  misc_difference 278: note = a, c, g, u, unknown, other, or absent
  misc_difference 279: note = a, c, g, u, unknown, other, or absent
  misc_difference 280: note = a, c, g, u, unknown, other, or absent
  misc_difference 281: note = a, c, g, u, unknown, other, or absent
  misc_difference 282: note = a, c, g, u, unknown, other, or absent
  misc_difference 283: note = a, c, g, u, unknown, other, or absent
  misc_difference 284: note = a, c, g, u, unknown, other, or absent
  misc_difference 285: note = a, c, g, u, unknown, other, or absent
  misc_difference 286: note = a, c, g, u, unknown, other, or absent
  misc_difference 287: note = a, c, g, u, unknown, other, or absent
  misc_difference 288: note = a, c, g, u, unknown, other, or absent
  misc_difference 289: note = a, c, g, u, unknown, other, or absent
  misc_difference 290: note = a, c, g, u, unknown, other, or absent
  misc_difference 291: note = a, c, g, u, unknown, other, or absent
  misc_difference 292: note = a, c, g, u, unknown, other, or absent
  misc_difference 293: note = a, c, g, u, unknown, other, or absent
  misc_difference 294: note = a, c, g, u, unknown, other, or absent
  misc_difference 295: note = a, c, g, u, unknown, other, or absent
  misc_difference 296: note = a, c, g, u, unknown, other, or absent
  misc_difference 297: note = a, c, g, u, unknown, other, or absent
  misc_difference 298: note = a, c, g, u, unknown, other, or absent
  misc_difference 299: note = a, c, g, u, unknown, other, or absent
  misc_difference 300: note = a, c, g, u, unknown, other, or absent
  misc_difference 301: note = a, c, g, u, unknown, other, or absent
  misc_difference 302: note = a, c, g, u, unknown, other, or absent
  misc_difference 303: note = a, c, g, u, unknown, other, or absent
  misc_difference 304: note = a, c, g, u, unknown, other, or absent
  misc_difference 305: note = a, c, g, u, unknown, other, or absent
  misc_difference 306: note = a, c, g, u, unknown, other, or absent
  misc_difference 307: note = a, c, g, u, unknown, other, or absent
  misc_difference 308: note = a, c, g, u, unknown, other, or absent
  misc_difference 309: note = a, c, g, u, unknown, other, or absent
  misc_difference 310: note = a, c, g, u, unknown, other, or absent
  misc_difference 311: note = a, c, g, u, unknown, other, or absent
  misc_difference 312: note = a, c, g, u, unknown, other, or absent
  misc_difference 313: note = a, c, g, u, unknown, other, or absent
  misc_difference 314: note = a, c, g, u, unknown, other, or absent
  misc_difference 315: note = May be absent
  misc_difference 316: note = May be absent
  misc_difference 317: note = May be absent
  misc_difference 318: note = May be absent
  misc_difference 319: note = May be absent
  misc_difference 320: note = May be absent
  misc_difference 321: note = May be absent
  misc_difference 322: note = May be absent
  misc_difference 323: note = May be absent
  misc_difference 324: note = May be absent
  misc_difference 325: note = May be absent
  misc_difference 326: note = May be absent
  misc_difference 327: note = May be absent
  misc_difference 328: note = May be absent
  misc_difference 329: note = May be absent
  misc_difference 330: note = May be absent
  misc_difference 331: note = May be absent
  misc_difference 332: note = May be absent
  misc_difference 333: note = May be absent
  misc_difference 334: note = May be absent
  misc_difference 335: note = May be absent
  misc_difference 336: note = May be absent
  misc_difference 337: note = May be absent
  misc_difference 338: note = May be absent
  misc_difference 339: note = May be absent
  misc_difference 44..315: note = This region may encompass 1-271 nucleotides

SEQ ID NO: 616 - RNA, 342 nt, synthetic construct
  source 1..342: mol_type = other RNA
  misc_difference 1: note = May be absent
  misc_difference 2: note = May be absent
  misc_difference 3: note = a, c, g, u, unknown, other, or absent
  misc_difference 4: note = a, c, g, u, unknown, other, or absent
  misc_difference 5: note = a, c, g, u, unknown, other, or absent
  misc_difference 6: note = a, c, g, u, unknown, other, or absent
  misc_difference 7: note = May be absent
  misc_difference 8: note = May be absent
  misc_difference 9: note = a, c, g, u, unknown, other, or absent
  misc_difference 10: note = a, c, g, u, unknown, other, or absent
  misc_difference 11: note = May be absent
  misc_difference 12: note = a, c, g, u, unknown, other, or absent
  misc_difference 13: note = a, c, g, u, unknown, other, or absent
  misc_difference 14: note = May be absent
  misc_difference 15: note = May be absent
  misc_difference 16: note = a, c, g, u, unknown, other, or absent
  misc_difference 17: note = May be absent
  misc_difference 18: note = May be absent
  misc_difference 19: note = May be absent
  misc_difference 20: note = May be absent
  misc_difference 21: note = May be absent
  misc_difference 22: note = May be absent
  misc_difference 23: note = May be absent
  misc_difference 24: note = May be absent
  misc_difference 25: note = a, c, g, u, unknown, other, or absent
  misc_difference 26: note = a, c, g, u, unknown, other, or absent
  misc_difference 27: note = May be absent
  misc_difference 28: note = May be absent
  misc_difference 29: note = May be absent
  misc_difference 30: note = a, c, g, u, unknown, other, or absent
  misc_difference 31: note = a, c, g, u, unknown, other, or absent
  misc_difference 32: note = a, c, g, u, unknown, other, or absent
  misc_difference 33: note = May be absent
  misc_difference 34: note = May be absent
  misc_difference 35: note = May be absent
  misc_difference 36: note = May be absent
  misc_difference 37: note = May be absent
  misc_difference 38: note = May be absent
  misc_difference 39: note = May be absent
  misc_difference 40: note = May be absent
  misc_difference 41: note = May be absent
  misc_difference 42: note = a, c, g, u, unknown, other, or absent
  misc_difference 43: note = May be absent
  misc_difference 44: note = a, c, g, u, unknown, other, or absent
  misc_difference 45: note = a, c, g, u, unknown, other, or absent
  misc_difference 46: note = a, c, g, u, unknown, other, or absent
  misc_difference 47: note = a, c, g, u, unknown, other, or absent
  misc_difference 48: note = a, c, g, u, unknown, other, or absent
  misc_difference 49: note = a, c, g, u, unknown, other, or absent
  misc_difference 50: note = a, c, g, u, unknown, other, or absent
  misc_difference 51: note = a, c, g, u, unknown, other, or absent
  misc_difference 52: note = a, c, g, u, unknown, other, or absent
  misc_difference 53: note = a, c, g, u, unknown, other, or absent
  misc_difference 54: note = a, c, g, u, unknown, other, or absent
  misc_difference 55: note = a, c, g, u, unknown, other, or absent
  misc_difference 56: note = a, c, g, u, unknown, other, or absent
  misc_difference 57: note = a, c, g, u, unknown, other, or absent
  misc_difference 58: note = a, c, g, u, unknown, other, or absent
  misc_difference 59: note = a, c, g, u, unknown, other, or absent
  misc_difference 60: note = a, c, g, u, unknown, other, or absent
  misc_difference 61: note = a, c, g, u, unknown, other, or absent
  misc_difference 62: note = a, c, g, u, unknown, other, or absent
  misc_difference 63: note = a, c, g, u, unknown, other, or absent
  misc_difference 64: note = a, c, g, u, unknown, other, or absent
  misc_difference 65: note = a, c, g, u, unknown, other, or absent
  misc_difference 66: note = a, c, g, u, unknown, other, or absent
  misc_difference 67: note = a, c, g, u, unknown, other, or absent
  misc_difference 68: note = a, c, g, u, unknown, other, or absent
  misc_difference 69: note = a, c, g, u, unknown, other, or absent
  misc_difference 70: note = a, c, g, u, unknown, other, or absent
  misc_difference 71: note = a, c, g, u, unknown, other, or absent
  misc_difference 72: note = a, c, g, u, unknown, other, or absent
  misc_difference 73: note = a, c, g, u, unknown, other, or absent
  misc_difference 74: note = a, c, g, u, unknown, other, or absent
  misc_difference 75: note = a, c, g, u, unknown, other, or absent
  misc_difference 76: note = a, c, g, u, unknown, other, or absent
  misc_difference 77: note = a, c, g, u, unknown, other, or absent
  misc_difference 78: note = a, c, g, u, unknown, other, or absent
  misc_difference 79: note = a, c, g, u, unknown, other, or absent
  misc_difference 80: note = a, c, g, u, unknown, other, or absent
  misc_difference 81: note = a, c, g, u, unknown, other, or absent
  misc_difference 82: note = a, c, g, u, unknown, other, or absent
  misc_difference 83: note = a, c, g, u, unknown, other, or absent
  misc_difference 84: note = a, c, g, u, unknown, other, or absent
  misc_difference 85: note = a, c, g, u, unknown, other, or absent
  misc_difference 86: note = a, c, g, u, unknown, other, or absent
  misc_difference 87: note = a, c, g, u, unknown, other, or absent
  misc_difference 88: note = a, c, g, u, unknown, other, or absent
  misc_difference 89: note = a, c, g, u, unknown, other, or absent
  misc_difference 90: note = a, c, g, u, unknown, other, or absent
  misc_difference 91: note = a, c, g, u, unknown, other, or absent
  misc_difference 92: note = a, c, g, u, unknown, other, or absent
  misc_difference 93: note = a, c, g, u, unknown, other, or absent
  misc_difference 94: note = a, c, g, u, unknown, other, or absent
  misc_difference 95: note = a, c, g, u, unknown, other, or absent
  misc_difference 96: note = a, c, g, u, unknown, other, or absent
  misc_difference 97: note = a, c, g, u, unknown, other, or absent
  misc_difference 98: note = a, c, g, u, unknown, other, or absent
  misc_difference 99: note = a, c, g, u, unknown, other, or absent
  misc_difference 100: note = a, c, g, u, unknown, other, or absent
  misc_difference 101: note = a, c, g, u, unknown, other, or absent
  misc_difference 102: note = a, c, g, u, unknown, other, or absent
  misc_difference 103: note = a, c, g, u, unknown, other, or absent
  misc_difference 104: note = a, c, g, u, unknown, other, or absent
  misc_difference 105: note = a, c, g, u, unknown, other, or absent
  misc_difference 106: note = a, c, g, u, unknown, other, or absent
  misc_difference 107: note = a, c, g, u, unknown, other, or absent
  misc_difference 108: note = a, c, g, u, unknown, other, or absent
  misc_difference 109: note = a, c, g, u, unknown, other, or absent
  misc_difference 110: note = a, c, g, u, unknown, other, or absent
  misc_difference 111: note = a, c, g, u, unknown, other, or absent
  misc_difference 112: note = a, c, g, u, unknown, other, or absent
  misc_difference 113: note = a, c, g, u, unknown, other, or absent
  misc_difference 114: note = a, c, g, u, unknown, other, or absent
  misc_difference 115: note = a, c, g, u, unknown, other, or absent
  misc_difference 116: note = a, c, g, u, unknown, other, or absent
  misc_difference 117: note = a, c, g, u, unknown, other, or absent
  misc_difference 118: note = a, c, g, u, unknown, other, or absent
  misc_difference 119: note = a, c, g, u, unknown, other, or absent
  misc_difference 120: note = a, c, g, u, unknown, other, or absent
  misc_difference 121: note = a, c, g, u, unknown, other, or absent
  misc_difference 122: note = a, c, g, u, unknown, other, or absent
  misc_difference 123: note = a, c, g, u, unknown, other, or absent
  misc_difference 124: note = a, c, g, u, unknown, other, or absent
  misc_difference 125: note = a, c, g, u, unknown, other, or absent
  misc_difference 126: note = a, c, g, u, unknown, other, or absent
  misc_difference 127: note = a, c, g, u, unknown, other, or absent
  misc_difference 128: note = a, c, g, u, unknown, other, or absent
  misc_difference 129: note = a, c, g, u, unknown, other, or absent
  misc_difference 130: note = a, c, g, u, unknown, other, or absent
  misc_difference 131: note = a, c, g, u, unknown, other, or absent
  misc_difference 132: note = a, c, g, u, unknown, other, or absent
  misc_difference 133: note = a, c, g, u, unknown, other, or absent
  misc_difference 134: note = a, c, g, u, unknown, other, or absent
  misc_difference 135: note = a, c, g, u, unknown, other, or absent
  misc_difference 136: note = a, c, g, u, unknown, other, or absent
  misc_difference 137: note = a, c, g, u, unknown, other, or absent
  misc_difference 138: note = a, c, g, u, unknown, other, or absent
  misc_difference 139: note = a, c, g, u, unknown, other, or absent
  misc_difference 140: note = a, c, g, u, unknown, other, or absent
  misc_difference 141: note = a, c, g, u, unknown, other, or absent
  misc_difference 142: note = a, c, g, u, unknown, other, or absent
  misc_difference 143: note = a, c, g, u, unknown, other, or absent
  misc_difference 144: note = a, c, g, u, unknown, other, or absent
  misc_difference 145: note = a, c, g, u, unknown, other, or absent
  misc_difference 146: note = a, c, g, u, unknown, other, or absent
  misc_difference 147: note = a, c, g, u, unknown, other, or absent
  misc_difference 148: note = a, c, g, u, unknown, other, or absent
  misc_difference 149: note = a, c, g, u, unknown, other, or absent
  misc_difference 150: note = a, c, g, u, unknown, other, or absent
  misc_difference 151: note = a, c, g, u, unknown, other, or absent
  misc_difference 152: note = a, c, g, u, unknown, other, or absent
  misc_difference 153: note = a, c, g, u, unknown, other, or absent
  misc_difference 154: note = a, c, g, u, unknown, other, or absent
  misc_difference 155: note = a, c, g, u, unknown, other, or absent
  misc_difference 156: note = a, c, g, u, unknown, other, or absent
  misc_difference 157: note = a, c, g, u, unknown, other, or absent
  misc_difference 158: note = a, c, g, u, unknown, other, or absent
  misc_difference 159: note = a, c, g, u, unknown, other, or absent
  misc_difference 160: note = a, c, g, u, unknown, other, or absent
  misc_difference 161: note = a, c, g, u, unknown, other, or absent
  misc_difference 162: note = a, c, g, u, unknown, other, or absent
  misc_difference 163: note = a, c, g, u, unknown, other, or absent
  misc_difference 164: note = a, c, g, u, unknown, other, or absent
  misc_difference 165: note = a, c, g, u, unknown, other, or absent
  misc_difference 166: note = a, c, g, u, unknown, other, or absent
  misc_difference 167: note = a, c, g, u, unknown, other, or absent
  misc_difference 168: note = a, c, g, u, unknown, other, or absent
  misc_difference 169: note = a, c, g, u, unknown, other, or absent
  misc_difference 170: note = a, c, g, u, unknown, other, or absent
  misc_difference 171: note = a, c, g, u, unknown, other, or absent
  misc_difference 172: note = a, c, g, u, unknown, other, or absent
  misc_difference 173: note = a, c, g, u, unknown, other, or absent
  misc_difference 174: note = a, c, g, u, unknown, other, or absent
  misc_difference 175: note = a, c, g, u, unknown, other, or absent
  misc_difference 176: note = a, c, g, u, unknown, other, or absent
  misc_difference 177: note = a, c, g, u, unknown, other, or absent
  misc_difference 178: note = a, c, g, u, unknown, other, or absent
  misc_difference 179: note = a, c, g, u, unknown, other, or absent
  misc_difference 180: note = a, c, g, u, unknown, other, or absent
  misc_difference 181: note = a, c, g, u, unknown, other, or absent
  misc_difference 182: note = a, c, g, u, unknown, other, or absent
  misc_difference 183: note = a, c, g, u, unknown, other, or absent
  misc_difference 184: note = a, c, g, u, unknown, other, or absent
  misc_difference 185: note = a, c, g, u, unknown, other, or absent
  misc_difference 186: note = a, c, g, u, unknown, other, or absent
  misc_difference 187: note = a, c, g, u, unknown, other, or absent
  misc_difference 188: note = a, c, g, u, unknown, other, or absent
  misc_difference 189: note = a, c, g, u, unknown, other, or absent
  misc_difference 190: note = a, c, g, u, unknown, other, or absent
  misc_difference 191: note = a, c, g, u, unknown, other, or absent
  misc_difference 192: note = a, c, g, u, unknown, other, or absent
  misc_difference 193: note = a, c, g, u, unknown, other, or absent
  misc_difference 194: note = a, c, g, u, unknown, other, or absent
  misc_difference 195: note = a, c, g, u, unknown, other, or absent
  misc_difference 196: note = a, c, g, u, unknown, other, or absent
  misc_difference 197: note = a, c, g, u, unknown, other, or absent
  misc_difference 198: note = a, c, g, u, unknown, other, or absent
  misc_difference 199: note = a, c, g, u, unknown, other, or absent
  misc_difference 200: note = a, c, g, u, unknown, other, or absent
  misc_difference 201: note = a, c, g, u, unknown, other, or absent
  misc_difference 202: note = a, c, g, u, unknown, other, or absent
  misc_difference 203: note = a, c, g, u, unknown, other, or absent
  misc_difference 204: note = a, c, g, u, unknown, other, or absent
  misc_difference 205: note = a, c, g, u, unknown, other, or absent
  misc_difference 206: note = a, c, g, u, unknown, other, or absent
  misc_difference 207: note = a, c, g, u, unknown, other, or absent
  misc_difference 208: note = a, c, g, u, unknown, other, or absent
  misc_difference 209: note = a, c, g, u, unknown, other, or absent
  misc_difference 210: note = a, c, g, u, unknown, other, or absent
  misc_difference 211: note = a, c, g, u, unknown, other, or absent
  misc_difference 212: note = a, c, g, u, unknown, other, or absent
  misc_difference 213: note = a, c, g, u, unknown, other, or absent
  misc_difference 214: note = a, c, g, u, unknown, other, or absent
  misc_difference 215: note = a, c, g, u, unknown, other, or absent
  misc_difference 216: note = a, c, g, u, unknown, other, or absent
  misc_difference 217: note = a, c, g, u, unknown, other, or absent
  misc_difference 218: note = a, c, g, u, unknown, other, or absent
  misc_difference 219: note = a, c, g, u, unknown, other, or absent
  misc_difference 220: note = a, c, g, u, unknown, other, or absent
  misc_difference 221: note = a, c, g, u, unknown, other, or absent
  misc_difference 222: note = a, c, g, u, unknown, other, or absent
  misc_difference 223: note = a, c, g, u, unknown, other, or absent
  misc_difference 224: note = a, c, g, u, unknown, other, or absent
  misc_difference 225: note = a, c, g, u, unknown, other, or absent
  misc_difference 226: note = a, c, g, u, unknown, other, or absent
  misc_difference 227: note = a, c, g, u, unknown, other, or absent
  misc_difference 228: note = a, c, g, u, unknown, other, or absent
  misc_difference 229: note = a, c, g, u, unknown, other, or absent
  misc_difference 230: note = a, c, g, u, unknown, other, or absent
  misc_difference 231: note = a, c, g, u, unknown, other, or absent
  misc_difference 232: note = a, c, g, u, unknown, other, or absent
  misc_difference 233: note = a, c, g, u, unknown, other, or absent
  misc_difference 234: note = a, c, g, u, unknown, other, or absent
  misc_difference 235: note = a, c, g, u, unknown, other, or absent
  misc_difference 236: note = a, c, g, u, unknown, other, or absent
  misc_difference 237: note = a, c, g, u, unknown, other, or absent
  misc_difference 238: note = a, c, g, u, unknown, other, or absent
  misc_difference 239: note = a, c, g, u, unknown, other, or absent
  misc_difference 240: note = a, c, g, u, unknown, other, or absent
  misc_difference 241: note = a, c, g, u, unknown, other, or absent
  misc_difference 242: note = a, c, g, u, unknown, other, or absent
  misc_difference 243: note = a, c, g, u, unknown, other, or absent
  misc_difference 244: note = a, c, g, u, unknown, other, or absent
  misc_difference 245: note = a, c, g, u, unknown, other, or absent
  misc_difference 246: note = a, c, g, u, unknown, other, or absent
  misc_difference 247: note = a, c, g, u, unknown, other, or absent
  misc_difference 248: note = a, c, g, u, unknown, other, or absent
  misc_difference 249: note = a, c, g, u, unknown, other, or absent
  misc_difference 250: note = a, c, g, u, unknown, other, or absent
  misc_difference 251: note = a, c, g, u, unknown, other, or absent
  misc_difference 252: note = a, c, g, u, unknown, other, or absent
  misc_difference 253: note = a, c, g, u, unknown, other, or absent
  misc_difference 254: note = a, c, g, u, unknown, other, or absent
  misc_difference 255: note = a, c, g, u, unknown, other, or absent
  misc_difference 256: note = a, c, g, u, unknown, other, or absent
  misc_difference 257: note = a, c, g, u, unknown, other, or absent
  misc_difference 258: note = a, c, g, u, unknown, other, or absent
  misc_difference 259: note = a, c, g, u, unknown, other, or absent
  misc_difference 260: note = a, c, g, u, unknown, other, or absent
  misc_difference 261: note = a, c, g, u, unknown, other, or absent
  misc_difference 262: note = a, c, g, u, unknown, other, or absent
  misc_difference 263: note = a, c, g, u, unknown, other, or absent
  misc_difference 264: note = a, c, g, u, unknown, other, or absent
  misc_difference 265: note = a, c, g, u, unknown, other, or absent
  misc_difference 266: note = a, c, g, u, unknown, other, or absent
  misc_difference 267: note = a, c, g, u, unknown, other, or absent
  misc_difference 268: note = a, c, g, u, unknown, other, or absent
  misc_difference 269: note = a, c, g, u, unknown, other, or absent
  misc_difference 270: note = a, c, g, u, unknown, other, or absent
  misc_difference 271: note = a, c, g, u, unknown, other, or absent
  misc_difference 272: note = a, c, g, u, unknown, other, or absent
  misc_difference 273: note = a, c, g, u, unknown, other, or absent
  misc_difference 274: note = a, c, g, u, unknown, other, or absent
  misc_difference 275: note = a, c, g, u, unknown, other, or absent
  misc_difference 276: note = a, c, g, u, unknown, other, or absent
  misc_difference 277: note = a, c, g, u, unknown, other, or absent
  misc_difference 278: note = a, c, g, u, unknown, other, or absent
  misc_difference 279: note = a, c, g, u, unknown, other, or absent
  misc_difference 280: note = a, c, g, u, unknown, other, or absent
  misc_difference 281: note = a, c, g, u, unknown, other, or absent
  misc_difference 282: note = a, c, g, u, unknown, other, or absent
  misc_difference 283: note = a, c, g, u, unknown, other, or absent
  misc_difference 284: note = a, c, g, u, unknown, other, or absent
  misc_difference 285: note = a, c, g, u, unknown, other, or absent
  misc_difference 286: note = a, c, g, u, unknown, other, or absent
  misc_difference 287: note = a, c, g, u, unknown, other, or absent
  misc_difference 288: note = a, c, g, u, unknown, other, or absent
  misc_difference 289: note = a, c, g, u, unknown, other, or absent
  misc_difference 290: note = a, c, g, u, unknown, other, or absent
  misc_difference 291: note = a, c, g, u, unknown, other, or absent
  misc_difference 292: note = a, c, g, u, unknown, other, or absent
  misc_difference 293: note = a, c, g, u, unknown, other, or absent
  misc_difference 294: note = a, c, g, u, unknown, other, or absent
  misc_difference 295: note = a, c, g, u, unknown, other, or absent
  misc_difference 296: note = a, c, g, u, unknown, other, or absent
  misc_difference 297: note = a, c, g, u, unknown, other, or absent
  misc_difference 298: note = a, c, g, u, unknown, other, or absent
  misc_difference 299: note = a, c, g, u, unknown, other, or absent
  misc_difference 300: note = a, c, g, u, unknown, other, or absent
  misc_difference 301: note = a, c, g, u, unknown, other, or absent
  misc_difference 302: note = a, c, g, u, unknown, other, or absent
  misc_difference 303: note = a, c, g, u, unknown, other, or absent
  misc_difference 304: note = a, c, g, u, unknown, other, or absent
  misc_difference 305: note = a, c, g, u, unknown, other, or absent
  misc_difference 306: note = a, c, g, u, unknown, other, or absent
  misc_difference 307: note = a, c, g, u, unknown, other, or absent
  misc_difference 308: note = a, c, g, u, unknown, other, or absent
  misc_difference 309: note = a, c, g, u, unknown, other, or absent
  misc_difference 310: note = a, c, g, u, unknown, other, or absent
  misc_difference 311: note = a, c, g, u, unknown, other, or absent
  misc_difference 312: note = a, c, g, u, unknown, other, or absent
  misc_difference 313: note = a, c, g, u, unknown, other, or absent
  misc_difference 314: note = a, c, g, u, unknown, other, or absent
  misc_difference 315: note = a, c, g, u, unknown, other, or absent
  misc_difference 316: note = a, c, g, u, unknown, other, or absent
  misc_difference 317: note = a, c, g, u, unknown, other, or absent
  misc_difference 318: note = May be absent
  misc_difference 319: note = a, c, g, u, unknown, other, or absent
  misc_difference 320: note = a, c, g, u, unknown, other, or absent
  misc_difference 321: note = May be absent
  misc_difference 322: note = May be absent
  misc_difference 323: note = May be absent
  misc_difference 324: note = May be absent
  misc_difference 325: note = May be absent
  misc_difference 326: note = May be absent
  misc_difference 327: note = May be absent
  misc_difference 328: note = a, c, g, u, unknown, other, or absent
  misc_difference 329: note = May be absent
  misc_difference 330: note = May be absent
  misc_difference 331: note = May be absent
  misc_difference 332: note = a, c, g, u, unknown, other, or absent
  misc_difference 333: note = a, c, g, u, unknown, other, or absent
  misc_difference 334: note = May be absent
  misc_difference 335: note = May be absent
  misc_difference 336: note = a, c, g, u, unknown, other, or absent
  misc_difference 337: note = a, c, g, u, unknown, other, or absent
  misc_difference 338: note = a, c, g, u, unknown, other, or absent
  misc_difference 339: note = a, c, g, u, unknown, other, or absent
  misc_difference 340: note = a, c, g, u, unknown, other, or absent
  misc_difference 341: note = May be absent
  misc_difference 342: note = May be absent
  misc_difference 44..315: note = This region may encompass 1-271 nucleotides
bbnnnndtnnynnarnytgsyhwrnnrbdnnnrdctrtarvnynnnnnnnnnnnnnnnnnnnnnnnnnnnnnnnnnnnnnnnnnnnnnnnnnnnnnnnnnnnnnnnnnnnnnnnnnnnnnnnnnnnnnnnnnnnnnnnnnnnnnnnnnnnnnnnnnnnnnnnnnnnnnnnnnnnnnnnnnnnnnnnnnnnnnnnnnnnnnnnnnnnnnnnnnnnnnnnnnnnnnnnnnnnnnnnnnnnnnnnnnnnnnnnnnnnnnnnnnnnnnnnnnnnnnnnnnnnnnnnnnnnnnnnnnnnnnnnnnnnnnnnnnnnnnnnnnnvnnvgwtyrantcbnnbhnnnnnvd

SEQ ID NO: 617 - RNA, 340 nt, synthetic construct
  source 1..340: mol_type = other RNA
  misc_difference 1: note = May be absent
  misc_difference 2: note = May be absent
  misc_difference 3: note = May be absent
  misc_difference 4: note = May be absent
  misc_difference 5: note = May be absent
  misc_difference 6: note = May be absent
  misc_difference 7: note = May be absent
  misc_difference 8: note = May be absent
  misc_difference 9: note = May be absent
  misc_difference 10: note = May be absent
  misc_difference 11: note = May be absent
  misc_difference 12: note = May be absent
  misc_difference 13: note = May be absent
  misc_difference 14: note = May be absent
  misc_difference 15: note = May be absent
  misc_difference 16: note = May be absent
  misc_difference 17: note = May be absent
  misc_difference 18: note = May be absent
  misc_difference 19: note = May be absent
  misc_difference 20: note = May be absent
  misc_difference 21: note = May be absent
  misc_difference 22: note = May be absent
  misc_difference 23: note = May be absent
  misc_difference 24: note = May be absent
  misc_difference 25: note = May be absent
  misc_difference 26: note = May be absent
  misc_difference 27: note = May be absent
  misc_difference 28: note = May be absent
  misc_difference 29: note = May be absent
  misc_difference 30: note = May be absent
  misc_difference 31: note = May be absent
  misc_difference 32: note = May be absent
  misc_difference 33: note = May be absent
  misc_difference 34: note = May be absent
  misc_difference 35: note = May be absent
  misc_difference 36: note = May be absent
  misc_difference 37: note = May be absent
  misc_difference 38: note = May be absent
  misc_difference 39: note = May be absent
  misc_difference 40: note = May be absent
  misc_difference 41: note = May be absent
  misc_difference 42: note = May be absent
  misc_difference 43: note = May be absent
  misc_difference 44: note = May be absent
  misc_difference 45: note = a, c, g, u, unknown, other, or absent
  misc_difference 46: note = a, c, g, u, unknown, other, or absent
  misc_difference 47: note = a, c, g, u, unknown, other, or absent
  misc_difference 48: note = a, c, g, u, unknown, other, or absent
  misc_difference 49: note = a, c, g, u, unknown, other, or absent
  misc_difference 50: note = a, c, g, u, unknown, other, or absent
  misc_difference 51: note = a, c, g, u, unknown, other, or absent
  misc_difference 52: note = a, c, g, u, unknown, other, or absent
  misc_difference 53: note = a, c, g, u, unknown, other, or absent
  misc_difference 54: note = a, c, g, u, unknown, other, or absent
  misc_difference 55: note = a, c, g, u, unknown, other, or absent
  misc_difference 56: note = a, c, g, u, unknown, other, or absent
  misc_difference 57: note = a, c, g, u, unknown, other, or absent
  misc_difference 58: note = a, c, g, u, unknown, other, or absent
  misc_difference 59: note = a, c, g, u, unknown, other, or absent
  misc_difference 60: note = a, c, g, u, unknown, other, or absent
  misc_difference 61: note = a, c, g, u, unknown, other, or absent
  misc_difference 62: note = a, c, g, u, unknown, other, or absent
  misc_difference 63: note = a, c, g, u, unknown, other, or absent
  misc_difference 64: note = a, c, g, u, unknown, other, or absent
  misc_difference 65: note = a, c, g, u, unknown, other, or absent
  misc_difference 66: note = a, c, g, u, unknown, other, or absent
  misc_difference 67: note = a, c, g, u, unknown, other, or absent
  misc_difference 68: note = a, c, g, u, unknown, other, or absent
  misc_difference 69: note = a, c, g, u, unknown, other, or absent
  misc_difference 70: note = a, c, g, u, unknown, other, or absent
  misc_difference 71: note = a, c, g, u, unknown, other, or absent
  misc_difference 72: note = a, c, g, u, unknown, other, or absent
  misc_difference 73: note = a, c, g, u, unknown, other, or absent
  misc_difference 74: note = a, c, g, u, unknown, other, or absent
  misc_difference 75: note = a, c, g, u, unknown, other, or absent
  misc_difference 76: note = a, c, g, u, unknown, other, or absent
  misc_difference 77: note = a, c, g, u, unknown, other, or absent
  misc_difference 78: note = a, c, g, u, unknown, other, or absent
  misc_difference 79: note = a, c, g, u, unknown, other, or absent
  misc_difference 80: note = a, c, g, u, unknown, other, or absent
  misc_difference 81: note = a, c, g, u, unknown, other, or absent
  misc_difference 82: note = a, c, g, u, unknown, other, or absent
  misc_difference 83: note = a, c, g, u, unknown, other, or absent
  misc_difference 84: note = a, c, g, u, unknown, other, or absent
  misc_difference 85: note = a, c, g, u, unknown, other, or absent
  misc_difference 86: note = a, c, g, u, unknown, other, or absent
  misc_difference 87: note = a, c, g, u, unknown, other, or absent
  misc_difference 88: note = a, c, g, u, unknown, other, or absent
  misc_difference 89: note = a, c, g, u, unknown, other, or absent
  misc_difference 90: note = a, c, g, u, unknown, other, or absent
  misc_difference 91: note = a, c, g, u, unknown, other, or absent
  misc_difference 92: note = a, c, g, u, unknown, other, or absent
  misc_difference 93: note = a, c, g, u, unknown, other, or absent
  misc_difference 94: note = a, c, g, u, unknown, other, or absent
  misc_difference 95: note = a, c, g, u, unknown, other, or absent
  misc_difference 96: note = a, c, g, u, unknown, other, or absent
  misc_difference 97: note = a, c, g, u, unknown, other, or absent
  misc_difference 98: note = a, c, g, u, unknown, other, or absent
  misc_difference 99: note = a, c, g, u, unknown, other, or absent
  misc_difference 100: note = a, c, g, u, unknown, other, or absent
  misc_difference 101: note = a, c, g, u, unknown, other, or absent
  misc_difference 102: note = a, c, g, u, unknown, other, or absent
  misc_difference 103: note = a, c, g, u, unknown, other, or absent
  misc_difference 104: note = a, c, g, u, unknown, other, or absent
  misc_difference 105: note = a, c, g, u, unknown, other, or absent
  misc_difference 106: note = a, c, g, u, unknown, other, or absent
  misc_difference 107: note = a, c, g, u, unknown, other, or absent
  misc_difference 108: note = a, c, g, u, unknown, other, or absent
  misc_difference 109: note = a, c, g, u, unknown, other, or absent
  misc_difference 110: note = a, c, g, u, unknown, other, or absent
  misc_difference 111: note = a, c, g, u, unknown, other, or absent
  misc_difference 112: note = a, c, g, u, unknown, other, or absent
  misc_difference 113: note = a, c, g, u, unknown, other, or absent
  misc_difference 114: note = a, c, g, u, unknown, other, or absent
  misc_difference 115: note = a, c, g, u, unknown, other, or absent
  misc_difference 116: note = a, c, g, u, unknown, other, or absent
  misc_difference 117: note = a, c, g, u, unknown, other, or absent
  misc_difference 118: note = a, c, g, u, unknown, other, or absent
  misc_difference 119: note = a, c, g, u, unknown, other, or absent
  misc_difference 120: note = a, c, g, u, unknown, other, or absent
  misc_difference 121: note = a, c, g, u, unknown, other, or absent
  misc_difference 122: note = a, c, g, u, unknown, other, or absent
  misc_difference 123: note = a, c, g, u, unknown, other, or absent
  misc_difference 124: note = a, c, g, u, unknown, other, or absent
  misc_difference 125: note = a, c, g, u, unknown, other, or absent
  misc_difference 126: note = a, c, g, u, unknown, other, or absent
  misc_difference 127: note = a, c, g, u, unknown, other, or absent
  misc_difference 128: note = a, c, g, u, unknown, other, or absent
  misc_difference 129: note = a, c, g, u, unknown, other, or absent
  misc_difference 130: note = a, c, g, u, unknown, other, or absent
  misc_difference 131: note = a, c, g, u, unknown, other, or absent
  misc_difference 132: note = a, c, g, u, unknown, other, or absent
  misc_difference 133: note = a, c, g, u, unknown, other, or absent
  misc_difference 134: note = a, c, g, u, unknown, other, or absent
  misc_difference 135: note = a, c, g, u, unknown, other, or absent
  misc_difference 136: note = a, c, g, u, unknown, other, or absent
  misc_difference 137: note = a, c, g, u, unknown, other, or absent
  misc_difference 138: note = a, c, g, u, unknown, other, or absent
  misc_difference 139: note = a, c, g, u, unknown, other, or absent
  misc_difference 140: note = a, c, g, u, unknown, other, or absent
  misc_difference 141: note = a, c, g, u, unknown, other, or absent
  misc_difference 142: note = a, c, g, u, unknown, other, or absent
  misc_difference 143: note = a, c, g, u, unknown, other, or absent
  misc_difference 144: note = a, c, g, u, unknown, other, or absent
  misc_difference 145: note = a, c, g, u, unknown, other, or absent
  misc_difference 146: note = a, c, g, u, unknown, other, or absent
  misc_difference 147: note = a, c, g, u, unknown, other, or absent
  misc_difference 148: note = a, c, g, u, unknown, other, or absent
  misc_difference 149: note = a, c, g, u, unknown, other, or absent
  misc_difference 150: note = a, c, g, u, unknown, other, or absent
  misc_difference 151: note = a, c, g, u, unknown, other, or absent
  misc_difference 152: note = a, c, g, u, unknown, other, or absent
  misc_difference 153: note = a, c, g, u, unknown, other, or absent
  misc_difference 154: note = a, c, g, u, unknown, other, or absent
  misc_difference 155: note = a, c, g, u, unknown, other, or absent
  misc_difference 156: note = a, c, g, u, unknown, other, or absent
  misc_difference 157: note = a, c, g, u, unknown, other, or absent
  misc_difference 158: note = a, c, g, u, unknown, other, or absent
  misc_difference 159: note = a, c, g, u, unknown, other, or absent
  misc_difference 160: note = a, c, g, u, unknown, other, or absent
  misc_difference 161: note = a, c, g, u, unknown, other, or absent
  misc_difference 162: note = a, c, g, u, unknown, other, or absent
  misc_difference 163: note = a, c, g, u, unknown, other, or absent
  misc_difference 164: note = a, c, g, u, unknown, other, or absent
  misc_difference 165: note = a, c, g, u, unknown, other, or absent
  misc_difference 166: note = a, c, g, u, unknown, other, or absent
  misc_difference 167: note = a, c, g, u, unknown, other, or absent
  misc_difference 168: note = a, c, g, u, unknown, other, or absent
  misc_difference 169: note = a, c, g, u, unknown, other, or absent
  misc_difference 170: note = a, c, g, u, unknown, other, or absent
  misc_difference 171: note = a, c, g, u, unknown, other, or absent
  misc_difference 172: note = a, c, g, u, unknown, other, or absent
  misc_difference 173: note = a, c, g, u, unknown, other, or absent
  misc_difference 174: note = a, c, g, u, unknown, other, or absent
  misc_difference 175: note = a, c, g, u, unknown, other, or absent
  misc_difference 176: note = a, c, g, u, unknown, other, or absent
  misc_difference 177: note = a, c, g, u, unknown, other, or absent
  misc_difference 178: note = a, c, g, u, unknown, other, or absent
  misc_difference 179: note = a, c, g, u, unknown, other, or absent
  misc_difference 180: note = a, c, g, u, unknown, other, or absent
  misc_difference 181: note = a, c, g, u, unknown, other, or absent
  misc_difference 182: note = a, c, g, u, unknown, other, or absent
  misc_difference 183: note = a, c, g, u, unknown, other, or absent
  misc_difference 184: note = a, c, g, u, unknown, other, or absent
  misc_difference 185: note = a, c, g, u, unknown, other, or absent
  misc_difference 186: note = a, c, g, u, unknown, other, or absent
  misc_difference 187: note = a, c, g, u, unknown, other, or absent
  misc_difference 188: note = a, c, g, u, unknown, other, or absent
  misc_difference 189: note = a, c, g, u, unknown, other, or absent
  misc_difference 190: note = a, c, g, u, unknown, other, or absent
  misc_difference 191: note = a, c, g, u, unknown, other, or absent
  misc_difference 192: note = a, c, g, u, unknown, other, or absent
  misc_difference 193: note = a, c, g, u, unknown, other, or absent
  misc_difference 194: note = a, c, g, u, unknown, other, or absent
  misc_difference 195: note = a, c, g, u, unknown, other, or absent
  misc_difference 196: note = a, c, g, u, unknown, other, or absent
  misc_difference 197: note = a, c, g, u, unknown, other, or absent
  misc_difference 198: note = a, c, g, u, unknown, other, or absent
  misc_difference 199: note = a, c, g, u, unknown, other, or absent
  misc_difference 200: note = a, c, g, u, unknown, other, or absent
  misc_difference 201: note = a, c, g, u, unknown, other, or absent
  misc_difference 202: note = a, c, g, u, unknown, other, or absent
  misc_difference 203: note = a, c, g, u, unknown, other, or absent
  misc_difference 204: note = a, c, g, u, unknown, other, or absent
  misc_difference 205: note = a, c, g, u, unknown, other, or absent
  misc_difference 206: note = a, c, g, u, unknown, other, or absent
  misc_difference 207: note = a, c, g, u, unknown, other, or absent
  misc_difference 208: note = a, c, g, u, unknown, other, or absent
  misc_difference 209: note = a, c, g, u, unknown, other, or absent
  misc_difference 210: note = a, c, g, u, unknown, other, or absent
  misc_difference 211: note = a, c, g, u, unknown, other, or absent
  misc_difference 212: note = a, c, g, u, unknown, other, or absent
  misc_difference 213: note = a, c, g, u, unknown, other, or absent
  misc_difference 214: note = a, c, g, u, unknown, other, or absent
  misc_difference 215: note = a, c, g, u, unknown, other, or absent
  misc_difference 216: note = a, c, g, u, unknown, other, or absent
  misc_difference 217: note = a, c, g, u, unknown, other, or absent
  misc_difference 218: note = a, c, g, u, unknown, other, or absent
  misc_difference 219: note = a, c, g, u, unknown, other, or absent
  misc_difference 220: note = a, c, g, u, unknown, other, or absent
  misc_difference 221: note = a, c, g, u, unknown, other, or absent
  misc_difference 222: note = a, c, g, u, unknown, other, or absent
  misc_difference 223: note = a, c, g, u, unknown, other, or absent
  misc_difference 224: note = a, c, g, u, unknown, other, or absent
  misc_difference 225: note = a, c, g, u, unknown, other, or absent
  misc_difference 226: note = a, c, g, u, unknown, other, or absent
  misc_difference 227: note = a, c, g, u, unknown, other, or absent
  misc_difference 228: note = a, c, g, u, unknown, other, or absent
  misc_difference 229: note = a, c, g, u, unknown, other, or absent
  misc_difference 230: note = a, c, g, u, unknown, other, or absent
  misc_difference 231: note = a, c, g, u, unknown, other, or absent
  misc_difference 232: note = a, c, g, u, unknown, other, or absent
  misc_difference 233: note = a, c, g, u, unknown, other, or absent
  misc_difference 234: note = a, c, g, u, unknown, other, or absent
  misc_difference 235: note = a, c, g, u, unknown, other, or absent
  misc_difference 236: note = a, c, g, u, unknown, other, or absent
  misc_difference 237: note = a, c, g, u, unknown, other, or absent
  misc_difference 238: note = a, c, g, u, unknown, other, or absent
  misc_difference 239: note = a, c, g, u, unknown, other, or absent
  misc_difference 240: note = a, c, g, u, unknown, other, or absent
  misc_difference 241: note = a, c, g, u, unknown, other, or absent
  misc_difference 242: note = a, c, g, u, unknown, other, or absent
  misc_difference 243: note = a, c, g, u, unknown, other, or absent
  misc_difference 244: note = a, c, g, u, unknown, other, or absent
  misc_difference 245: note = a, c, g, u, unknown, other, or absent
  misc_difference 246: note = a, c, g, u, unknown, other, or absent
  misc_difference 247: note = a, c, g, u, unknown, other, or absent
  misc_difference 248: note = a, c, g, u, unknown, other, or absent
  misc_difference 249: note = a, c, g, u, unknown, other, or absent
  misc_difference 250: note = a, c, g, u, unknown, other, or absent
  misc_difference 251: note = a, c, g, u, unknown, other, or absent
  misc_difference 252: note = a, c, g, u, unknown, other, or absent
  misc_difference 253: note = a, c, g, u, unknown, other, or absent
  misc_difference 254: note = a, c, g, u, unknown, other, or absent
  misc_difference 255: note = a, c, g, u, unknown, other, or absent
  misc_difference 256: note = a, c, g, u, unknown, other, or absent
  misc_difference 257: note = a, c, g, u, unknown, other, or absent
  misc_difference 258: note = a, c, g, u, unknown, other, or absent
  misc_difference 259: note = a, c, g, u, unknown, other, or absent
  misc_difference 260: note = a, c, g, u, unknown, other, or absent
  misc_difference 261: note = a, c, g, u, unknown, other, or absent
  misc_difference 262: note = a, c, g, u, unknown, other, or absent
  misc_difference 263: note = a, c, g, u, unknown, other, or absent
  misc_difference 264: note = a, c, g, u, unknown, other, or absent
  misc_difference 265: note = a, c, g, u, unknown, other, or absent
  misc_difference 266: note = a, c, g, u, unknown, other, or absent
  misc_difference 267: note = a, c, g, u, unknown, other, or absent
  misc_difference 268: note = a, c, g, u, unknown, other, or absent
  misc_difference 269: note = a, c, g, u, unknown, other, or absent
  misc_difference 270: note = a, c, g, u, unknown, other, or absent
  misc_difference 271: note = a, c, g, u, unknown, other, or absent
  misc_difference 272: note = a, c, g, u, unknown, other, or absent
  misc_difference 273: note = a, c, g, u, unknown, other, or absent
  misc_difference 274: note = a, c, g, u, unknown, other, or absent
  misc_difference 275: note = a, c, g, u, unknown, other, or absent
  misc_difference 276: note = a, c, g, u, unknown, other, or absent
  misc_difference 277: note = a, c, g, u, unknown, other, or absent
  misc_difference 278: note = a, c, g, u, unknown, other, or absent
  misc_difference 279: note = a, c, g, u, unknown, other, or absent
  misc_difference 280: note = a, c, g, u, unknown, other, or absent
  misc_difference 281: note = a, c, g, u, unknown, other, or absent
  misc_difference 282: note = a, c, g, u, unknown, other, or absent
  misc_difference 283: note = a, c, g, u, unknown, other, or absent
  misc_difference 284: note = a, c, g, u, unknown, other, or absent
  misc_difference 285: note = a, c, g, u, unknown, other, or absent
  misc_difference 286: note = a, c, g, u, unknown, other, or absent
  misc_difference 287: note = a, c, g, u, unknown, other, or absent
  misc_difference 288: note = a, c, g, u, unknown, other, or absent
  misc_difference 289: note = a, c, g, u, unknown, other, or absent
  misc_difference 290: note = a, c, g, u, unknown, other, or absent
  misc_difference 291: note = a, c, g, u, unknown, other, or absent
  misc_difference 292: note = a, c, g, u, unknown, other, or absent
  misc_difference 293: note = a, c, g, u, unknown, other, or absent
  misc_difference 294: note = a, c, g, u, unknown, other, or absent
  misc_difference 295: note = a, c, g, u, unknown, other, or absent
  misc_difference 296: note = a, c, g, u, unknown, other, or absent
  misc_difference 297: note = a, c, g, u, unknown, other, or absent
  misc_difference 298: note = a, c, g, u, unknown, other, or absent
  misc_difference 299: note = a, c, g, u, unknown, other, or absent
  misc_difference 300: note = a, c, g, u, unknown, other, or absent
  misc_difference 301: note = a, c, g, u, unknown, other, or absent
  misc_difference 302: note = a, c, g, u, unknown, other, or absent
  misc_difference 303: note = a, c, g, u, unknown, other, or absent
  misc_difference 304: note = a, c, g, u, unknown, other, or absent
  misc_difference 305: note = a, c, g, u, unknown, other, or absent
  misc_difference 306: note = a, c, g, u, unknown, other, or absent
  misc_difference 307: note = a, c, g, u, unknown, other, or absent
  misc_difference 308: note = a, c, g, u, unknown, other, or absent
  misc_difference 309: note = a, c, g, u, unknown, other, or absent
  misc_difference 310: note = a, c, g, u, unknown, other, or absent
  misc_difference 311: note = a, c, g, u, unknown, other, or absent
  misc_difference 312: note = a, c, g, u, unknown, other, or absent
  misc_difference 313: note = a, c, g, u, unknown, other, or absent
  misc_difference 314: note = a, c, g, u, unknown, other, or absent
  misc_difference 315: note = a, c, g, u, unknown, other, or absent
  misc_difference 316: note = May be absent
  misc_difference 317: note = May be absent
  misc_difference 318: note = May be absent
  misc_difference 319: note = May be absent
  misc_difference 320: note = May be absent
  misc_difference 321: note = May be absent
  misc_difference 322: note = May be absent
  misc_difference 323: note = May be absent
  misc_difference 324: note = May be absent
  misc_difference 325: note = May be absent
  misc_difference 326: note = May be absent
  misc_difference 327: note = May be absent
  misc_difference 328: note = May be absent
  misc_difference 329: note = May be absent
  misc_difference 330: note = May be absent
  misc_difference 331: note = May be absent
  misc_difference 332: note = May be absent
  misc_difference 333: note = May be absent
  misc_difference 334: note = May be absent
  misc_difference 335: note = May be absent
  misc_difference 336: note = a, c, g, u, unknown, other, or absent
  misc_difference 337: note = May be absent
  misc_difference 338: note = May be absent
  misc_difference 339: note = May be absent
  misc_difference 340: note = May be absent
  misc_difference 45..316: note = This region may encompass 1-271 nucleotides
bbkkbdatagytcagbtgsytagagydkwkractrtagrkymwknnnnnnnnnnnnnnnnnnnnnnnnnnnnnnnnnnnnnnnnnnnnnnnnnnnnnnnnnnnnnnnnnnnnnnnnnnnnnnnnnnnnnnnnnnnnnnnnnnnnnnnnnnnnnnnnnnnnnnnnnnnnnnnnnnnnnnnnnnnnnnnnnnnnnnnnnnnnnnnnnnnnnnnnnnnnnnnnnnnnnnnnnnnnnnnnnnnnnnnnnnnnnnnnnnnnnnnnnnnnnnnnnnnnnnnnnnnnnnnnnnnnnnnnnnnnnnnnnnnnnnnnnnnnnnnsctggwtyrahtcyrrstbsnmsvd

SEQ ID NO: 618 - RNA, 340 nt, synthetic construct
  source 1..340: mol_type = other RNA
  misc_difference 1: note = May be absent
  misc_difference 2: note = May be absent
  misc_difference 3: note = May be absent
  misc_difference 4: note = May be absent
  misc_difference 5: note = May be absent
  misc_difference 6: note = May be absent
  misc_difference 7: note = May be absent
  misc_difference 8: note = May be absent
  misc_difference 9: note = May be absent
  misc_difference 10: note = May be absent
  misc_difference 11: note = May be absent
  misc_difference 12: note = May be absent
  misc_difference 13: note = May be absent
  misc_difference 14: note = May be absent
  misc_difference 15: note = May be absent
  misc_difference 16: note = May be absent
  misc_difference 17: note = May be absent
  misc_difference 18: note = May be absent
  misc_difference 19: note = May be absent
  misc_difference 20: note = May be absent
  misc_difference 21: note = May be absent
  misc_difference 22: note = May be absent
  misc_difference 23: note = May be absent
  misc_difference 24: note = May be absent
  misc_difference 25: note = May be absent
  misc_difference 26: note = May be absent
  misc_difference 27: note = May be absent
  misc_difference 28: note = May be absent
  misc_difference 29: note = May be absent
  misc_difference 30: note = May be absent
  misc_difference 31: note = May be absent
  misc_difference 32: note = May be absent
  misc_difference 33: note = May be absent
  misc_difference 34: note = May be absent
  misc_difference 35: note = May be absent
  misc_difference 36: note = May be absent
  misc_difference 37: note = May be absent
  misc_difference 38: note = May be absent
  misc_difference 39: note = May be absent
  misc_difference 40: note = May be absent
  misc_difference 41: note = May be absent
  misc_difference 42: note = May be absent
  misc_difference 43: note = May be absent
  misc_difference 44: note = May be absent
  misc_difference 45: note = a, c, g, u, unknown, other, or absent
  misc_difference 46: note = a, c, g, u, unknown, other, or absent
  misc_difference 47: note = a, c, g, u, unknown, other, or absent
  misc_difference 48: note = a, c, g, u, unknown, other, or absent
  misc_difference 49: note = a, c, g, u, unknown, other, or absent
  misc_difference 50: note = a, c, g, u, unknown, other, or absent
  misc_difference 51: note = a, c, g, u, unknown, other, or absent
  misc_difference 52: note = a, c, g, u, unknown, other, or absent
  misc_difference 53: note = a, c, g, u, unknown, other, or absent
  misc_difference 54: note = a, c, g, u, unknown, other, or absent
  misc_difference 55: note = a, c, g, u, unknown, other, or absent
  misc_difference 56: note = a, c, g, u, unknown, other, or absent
  misc_difference 57: note = a, c, g, u, unknown, other, or absent
  misc_difference 58: note = a, c, g, u, unknown, other, or absent
  misc_difference 59: note = a, c, g, u, unknown, other, or absent
  misc_difference 60: note = a, c, g, u, unknown, other, or absent
  misc_difference 61: note = a, c, g, u, unknown, other, or absent
  misc_difference 62: note = a, c, g, u, unknown, other, or absent
  misc_difference 63: note = a, c, g, u, unknown, other, or absent
  misc_difference 64: note = a, c, g, u, unknown, other, or absent
  misc_difference 65: note = a, c, g, u, unknown, other, or absent
  misc_difference 66: note = a, c, g, u, unknown, other, or absent
  misc_difference 67: note = a, c, g, u, unknown, other, or absent
  misc_difference 68: note = a, c, g, u, unknown, other, or absent
  misc_difference 69: note = a, c, g, u, unknown, other, or absent
  misc_difference 70: note = a, c, g, u, unknown, other, or absent
  misc_difference 71: note = a, c, g, u, unknown, other, or absent
  misc_difference 72: note = a, c, g, u, unknown, other, or absent
  misc_difference 73: note = a, c, g, u, unknown, other, or absent
  misc_difference 74: note = a, c, g, u, unknown, other, or absent
  misc_difference 75: note = a, c, g, u, unknown, other, or absent
  misc_difference 76: note = a, c, g, u, unknown, other, or absent
  misc_difference 77: note = a, c, g, u, unknown, other, or absent
  misc_difference 78: note = a, c, g, u, unknown, other, or absent
  misc_difference 79: note = a, c, g, u, unknown, other, or absent
  misc_difference 80: note = a, c, g, u, unknown, other, or absent
  misc_difference 81: note = a, c, g, u, unknown, other, or absent
  misc_difference 82: note = a, c, g, u, unknown, other, or absent
  misc_difference 83: note = a, c, g, u, unknown, other, or absent
  misc_difference 84: note = a, c, g, u, unknown, other, or absent
  misc_difference 85: note = a, c, g, u, unknown, other, or absent
  misc_difference 86: note = a, c, g, u, unknown, other, or absent
  misc_difference 87: note = a, c, g, u, unknown, other, or absent
  misc_difference 88: note = a, c, g, u, unknown, other, or absent
  misc_difference 89: note = a, c, g, u, unknown, other, or absent
  misc_difference 90: note = a, c, g, u, unknown, other, or absent
  misc_difference 91: note = a, c, g, u, unknown, other, or absent
  misc_difference 92: note = a, c, g, u, unknown, other, or absent
  misc_difference 93: note = a, c, g, u, unknown, other, or absent
  misc_difference 94: note = a, c, g, u, unknown, other, or absent
  misc_difference 95: note = a, c, g, u, unknown, other, or absent
  misc_difference 96: note = a, c, g, u, unknown, other, or absent
  misc_difference 97: note = a, c, g, u, unknown, other, or absent
  misc_difference 98: note = a, c, g, u, unknown, other, or absent
  misc_difference 99: note = a, c, g, u, unknown, other, or absent
  misc_difference 100: note = a, c, g, u, unknown, other, or absent
  misc_difference 101: note = a, c, g, u, unknown, other, or absent
  misc_difference 102: note = a, c, g, u, unknown, other, or absent
  misc_difference 103: note = a, c, g, u, unknown, other, or absent
  misc_difference 104: note = a, c, g, u, unknown, other, or absent
  misc_difference 105: note = a, c, g, u, unknown, other, or absent
  misc_difference 106: note = a, c, g, u, unknown, other, or absent
  misc_difference 107: note = a, c, g, u, unknown, other, or absent
  misc_difference 108: note = a, c, g, u, unknown, other, or absent
  misc_difference 109: note = a, c, g, u, unknown, other, or absent
  misc_difference 110: note = a, c, g, u, unknown, other, or absent
  misc_difference 111: note = a, c, g, u, unknown, other, or absent
  misc_difference 112: note = a, c, g, u, unknown, other, or absent
  misc_difference 113: note = a, c, g, u, unknown, other, or absent
  misc_difference 114: note = a, c, g, u, unknown, other, or absent
  misc_difference 115: note = a, c, g, u, unknown, other, or absent
  misc_difference 116: note = a, c, g, u, unknown, other, or absent
  misc_difference 117: note = a, c, g, u, unknown, other, or absent
  misc_difference 118: note = a, c, g, u, unknown, other, or absent
  misc_difference 119: note = a, c, g, u, unknown, other, or absent
  misc_difference 120: note = a, c, g, u, unknown, other, or absent
  misc_difference 121: note = a, c, g, u, unknown, other, or absent
  misc_difference 122: note = a, c, g, u, unknown, other, or absent
  misc_difference 123: note = a, c, g, u, unknown, other, or absent
  misc_difference 124: note = a, c, g, u, unknown, other, or absent
  misc_difference 125: note = a, c, g, u, unknown, other, or absent
  misc_difference 126: note = a, c, g, u, unknown, other, or absent
  misc_difference 127: note = a, c, g, u, unknown, other, or absent
  misc_difference 128: note = a, c, g, u, unknown, other, or absent
  misc_difference 129: note = a, c, g, u, unknown, other, or absent
  misc_difference 130: note = a, c, g, u, unknown, other, or absent
  misc_difference 131: note = a, c, g, u, unknown, other, or absent
  misc_difference 132: note = a, c, g, u, unknown, other, or absent
  misc_difference 133: note = a, c, g, u, unknown, other, or absent
  misc_difference 134: note = a, c, g, u, unknown, other, or absent
  misc_difference 135: note = a, c, g, u, unknown, other, or absent
  misc_difference 136: note = a, c, g, u, unknown, other, or absent
  misc_difference 137: note = a, c, g, u, unknown, other, or absent
  misc_difference 138: note = a, c, g, u, unknown, other, or absent
  misc_difference 139: note = a, c, g, u, unknown, other, or absent
  misc_difference 140: note = a, c, g, u, unknown, other, or absent
  misc_difference 141: note = a, c, g, u, unknown, other, or absent
  misc_difference 142: note = a, c, g, u, unknown, other, or absent
  misc_difference 143: note = a, c, g, u, unknown, other, or absent
  misc_difference 144: note = a, c, g, u, unknown, other, or absent
  misc_difference 145: note = a, c, g, u, unknown, other, or absent
  misc_difference 146: note = a, c, g, u, unknown, other, or absent
  misc_difference 147: note = a, c, g, u, unknown, other, or absent
  misc_difference 148: note = a, c, g, u, unknown, other, or absent
  misc_difference 149: note = a, c, g, u, unknown, other, or absent
  misc_difference 150: note = a, c, g, u, unknown, other, or absent
  misc_difference 151: note = a, c, g, u, unknown, other, or absent
  misc_difference 152: note = a, c, g, u, unknown, other, or absent
  misc_difference 153: note = a, c, g, u, unknown, other, or absent
  misc_difference 154: note = a, c, g, u, unknown, other, or absent
  misc_difference 155: note = a, c, g, u, unknown, other, or absent
  misc_difference 156: note = a, c, g, u, unknown, other, or absent
  misc_difference 157: note = a, c, g, u, unknown, other, or absent
  misc_difference 158: note = a, c, g, u, unknown, other, or absent
  misc_difference 159: note = a, c, g, u, unknown, other, or absent
  misc_difference 160: note = a, c, g, u, unknown, other, or absent
  misc_difference 161: note = a, c, g, u, unknown, other, or absent
  misc_difference 162: note = a, c, g, u, unknown, other, or absent
  misc_difference 163: note = a, c, g, u, unknown, other, or absent
  misc_difference 164: note = a, c, g, u, unknown, other, or absent
  misc_difference 165: note = a, c, g, u, unknown, other, or absent
  misc_difference 166: note = a, c, g, u, unknown, other, or absent
  misc_difference 167: note = a, c, g, u, unknown, other, or absent
  misc_difference 168: note = a, c, g, u, unknown, other, or absent
  misc_difference 169: note = a, c, g, u, unknown, other, or absent
  misc_difference 170: note = a, c, g, u, unknown, other, or absent
  misc_difference 171: note = a, c, g, u, unknown, other, or absent
  misc_difference 172: note = a, c, g, u, unknown, other, or absent
  misc_difference 173: note = a, c, g, u, unknown, other, or absent
  misc_difference 174: note = a, c, g, u, unknown, other, or absent
  misc_difference 175: note = a, c, g, u, unknown, other, or absent
  misc_difference 176: note = a, c, g, u, unknown, other, or absent
  misc_difference 177: note = a, c, g, u, unknown, other, or absent
  misc_difference 178: note = a, c, g, u, unknown, other, or absent
  misc_difference 179: note = a, c, g, u, unknown, other, or absent
  misc_difference 180: note = a, c, g, u, unknown, other, or absent
  misc_difference 181: note = a, c, g, u, unknown, other, or absent
  misc_difference 182: note = a, c, g, u, unknown, other, or absent
  misc_difference 183: note = a, c, g, u, unknown, other, or absent
  misc_difference 184: note = a, c, g, u, unknown, other, or absent
  misc_difference 185: note = a, c, g, u, unknown, other, or absent
  misc_difference 186: note = a, c, g, u, unknown, other, or absent
  misc_difference 187: note = a, c, g, u, unknown, other, or absent
  misc_difference 188: note = a, c, g, u, unknown, other, or absent
  misc_difference 189: note = a, c, g, u, unknown, other, or absent
  misc_difference 190: note = a, c, g, u, unknown, other, or absent
  misc_difference 191: note = a, c, g, u, unknown, other, or absent
  misc_difference 192: note = a, c, g, u, unknown, other, or absent
  misc_difference 193: note = a, c, g, u, unknown, other, or absent
  misc_difference 194: note = a, c, g, u, unknown, other, or absent
  misc_difference 195: note = a, c, g, u, unknown, other, or absent
  misc_difference 196: note = a, c, g, u, unknown, other, or absent
  misc_difference 197: note = a, c, g, u, unknown, other, or absent
  misc_difference 198: note = a, c, g, u, unknown, other, or absent
  misc_difference 199: note = a, c, g, u, unknown, other, or absent
  misc_difference 200: note = a, c, g, u, unknown, other, or absent
  misc_difference 201: note = a, c, g, u, unknown, other, or absent
  misc_difference 202: note = a, c, g, u, unknown, other, or absent
  misc_difference 203: note = a, c, g, u, unknown, other, or absent
  misc_difference 204: note = a, c, g, u, unknown, other, or absent
  misc_difference 205: note = a, c, g, u, unknown, other, or absent
  misc_difference 206: note = a, c, g, u, unknown, other, or absent
  misc_difference 207: note = a, c, g, u, unknown, other, or absent
  misc_difference 208: note = a, c, g, u, unknown, other, or absent
  misc_difference 209: note = a, c, g, u, unknown, other, or absent
  misc_difference 210: note = a, c, g, u, unknown, other, or absent
  misc_difference 211: note = a, c, g, u, unknown, other, or absent
  misc_difference 212: note = a, c, g, u, unknown, other, or absent
  misc_difference 213: note = a, c, g, u, unknown, other, or absent
  misc_difference 214: note = a, c, g, u, unknown, other, or absent
  misc_difference 215: note = a, c, g, u, unknown, other, or absent
  misc_difference 216: note = a, c, g, u, unknown, other, or absent
  misc_difference 217: note = a, c, g, u, unknown, other, or absent
  misc_difference 218: note = a, c, g, u, unknown, other, or absent
  misc_difference 219: note = a, c, g, u, unknown, other, or absent
  misc_difference 220: note = a, c, g, u, unknown, other, or absent
  misc_difference 221: note = a, c, g, u, unknown, other, or absent
  misc_difference 222: note = a, c, g, u, unknown, other, or absent
  misc_difference 223: note = a, c, g, u, unknown, other, or absent
  misc_difference 224: note = a, c, g, u, unknown, other, or absent
  misc_difference 225: note = a, c, g, u, unknown, other, or absent
  misc_difference 226: note = a, c, g, u, unknown, other, or absent
  misc_difference 227: note = a, c, g, u, unknown, other, or absent
  misc_difference 228: note = a, c, g, u, unknown, other, or absent
  misc_difference 229: note = a, c, g, u, unknown, other, or absent
  misc_difference 230: note = a, c, g, u, unknown, other, or absent
  misc_difference 231: note = a, c, g, u, unknown, other, or absent
  misc_difference 232: note = a, c, g, u, unknown, other, or absent
  misc_difference 233: note = a, c, g, u, unknown, other, or absent
  misc_difference 234: note = a, c, g, u, unknown, other, or absent
  misc_difference 235: note = a, c, g, u, unknown, other, or absent
  misc_difference 236: note = a, c, g, u, unknown, other, or absent
  misc_difference 237: note = a, c, g, u, unknown, other, or absent
  misc_difference 238: note = a, c, g, u, unknown, other, or absent
  misc_difference 239: note = a, c, g, u, unknown, other, or absent
  misc_difference 240: note = a, c, g, u, unknown, other, or absent
  misc_difference 241: note = a, c, g, u, unknown, other, or absent
  misc_difference 242: note = a, c, g, u, unknown, other, or absent
  misc_difference 243: note = a, c, g, u, unknown, other, or absent
  misc_difference 244: note = a, c, g, u, unknown, other, or absent
  misc_difference 245: note = a, c, g, u, unknown, other, or absent
  misc_difference 246: note = a, c, g, u, unknown, other, or absent
  misc_difference 247: note = a, c, g, u, unknown, other, or absent
  misc_difference 248: note = a, c, g, u, unknown, other, or absent
  misc_difference 249: note = a, c, g, u, unknown, other, or absent
  misc_difference 250: note = a, c, g, u, unknown, other, or absent
  misc_difference 251: note = a, c, g, u, unknown, other, or absent
  misc_difference 252: note = a, c, g, u, unknown, other, or absent
  misc_difference 253: note = a, c, g, u, unknown, other, or absent
  misc_difference 254: note = a, c, g, u, unknown, other, or absent
  misc_difference 255: note = a, c, g, u, unknown, other, or absent
  misc_difference 256: note = a, c, g, u, unknown, other, or absent
  misc_difference 257: note = a, c, g, u, unknown, other, or absent
  misc_difference 258: note = a, c, g, u, unknown, other, or absent
  misc_difference 259: note = a, c, g, u, unknown, other, or absent
  misc_difference 260: note = a, c, g, u, unknown, other, or absent
  misc_difference 261: note = a, c, g, u, unknown, other, or absent
  misc_difference 262: note = a, c, g, u, unknown, other, or absent
  misc_difference 263: note = a, c, g, u, unknown, other, or absent
  misc_difference 264: note = a, c, g, u, unknown, other, or absent
  misc_difference 265: note = a, c, g, u, unknown, other, or absent
  misc_difference 266: note = a, c, g, u, unknown, other, or absent
  misc_difference 267: note = a, c, g, u, unknown, other, or absent
  misc_difference 268: note = a, c, g, u, unknown, other, or absent
  misc_difference 269: note = a, c, g, u, unknown, other, or absent
  misc_difference 270: note = a, c, g, u, unknown, other, or absent
  misc_difference 271: note = a, c, g, u, unknown, other, or absent
  misc_difference 272: note = a, c, g, u, unknown, other, or absent
  misc_difference 273: note = a, c, g, u, unknown, other, or absent
  misc_difference 274: note = a, c, g, u, unknown, other, or absent
  misc_difference 275: note = a, c, g, u, unknown, other, or absent
  misc_difference 276: note = a, c, g, u, unknown, other, or absent
  misc_difference 277: note = a, c, g, u, unknown, other, or absent
  misc_difference 278: note = a, c, g, u, unknown, other, or absent
  misc_difference 279: note = a, c, g, u, unknown, other, or absent
  misc_difference 280: note = a, c, g, u, unknown, other, or absent
  misc_difference 281: note = a, c, g, u, unknown, other, or absent
  misc_difference 282: note = a, c, g, u, unknown, other, or absent
  misc_difference 283: note = a, c, g, u, unknown, other, or absent
  misc_difference 284: note = a, c, g, u, unknown, other, or absent
  misc_difference 285: note = a, c, g, u, unknown, other, or absent
  misc_difference 286: note = a, c, g, u, unknown, other, or absent
  misc_difference 287: note = a, c, g, u, unknown, other, or absent
  misc_difference 288: note = a, c, g, u, unknown, other, or absent
  misc_difference 289: note = a, c, g, u, unknown, other, or absent
  misc_difference 290: note = a, c, g, u, unknown, other, or absent
  misc_difference 291: note = a, c, g, u, unknown, other, or absent
  misc_difference 292: note = a, c, g, u, unknown, other, or absent
  misc_difference 293: note = a, c, g, u, unknown, other, or absent
  misc_difference 294: note = a, c, g, u, unknown, other, or absent
  misc_difference 295: note = a, c, g, u, unknown, other, or absent
  misc_difference 296: note = a, c, g, u, unknown, other, or absent
  misc_difference 297: note = a, c, g, u, unknown, other, or absent
  misc_difference 298: note = a, c, g, u, unknown, other, or absent
  misc_difference 299: note = a, c, g, u, unknown, other, or absent
  misc_difference 300: note = a, c, g, u, unknown, other, or absent
  misc_difference 301: note = a, c, g, u, unknown, other, or absent
  misc_difference 302: note = a, c, g, u, unknown, other, or absent
  misc_difference 303: note = a, c, g, u, unknown, other, or absent
  misc_difference 304: note = a, c, g, u, unknown, other, or absent
  misc_difference 305: note = a, c, g, u, unknown, other, or absent
  misc_difference 306: note = a, c, g, u, unknown, other, or absent
  misc_difference 307: note = a, c, g, u, unknown, other, or absent
  misc_difference 308: note = a, c, g, u, unknown, other, or absent
  misc_difference 309: note = a, c, g, u, unknown, other, or absent
  misc_difference 310: note = a, c, g, u, unknown, other, or absent
  misc_difference 311: note = a, c, g, u, unknown, other, or absent
  misc_difference 312: note = a, c, g, u, unknown, other, or absent
  misc_difference 313: note = a, c, g, u, unknown, other, or absent
  misc_difference 314: note = a, c, g, u, unknown, other, or absent
  misc_difference 315: note = a, c, g, u, unknown, other, or absent
  misc_difference 316: note = May be absent
  misc_difference 317: note = May be absent
  misc_difference 318: note = May be absent
  misc_difference 319: note = May be absent
  misc_difference 320: note = May be absent
  misc_difference 321: note = May be absent
  misc_difference 322: note = May be absent
  misc_difference 323: note = May be absent
  misc_difference 324: note = May be absent
  misc_difference 325: note = May be absent
  misc_difference 326: note = May be absent
  misc_difference 327: note = May be absent
  misc_difference 328: note = May be absent
  misc_difference 329: note = May be absent
  misc_difference 330: note = May be absent
  misc_difference 331: note = May be absent
  misc_difference 332: note = May be absent
  misc_difference 333: note = May be absent
  misc_difference 334: note = May be absent
  misc_difference 335: note = May be absent
  misc_difference 336: note = May be absent
  misc_difference 337: note = May be absent
  misc_difference 338: note = May be absent
  misc_difference 339: note = May be absent
  misc_difference 340: note = May be absent
  misc_difference 45..316: note = This region may encompass 1-271 nucleotides
bbkksdatagytcagytggytagagcdkwkgactrtagrkymwknnnnnnnnnnnnnnnnnnnnnnnnnnnnnnnnnnnnnnnnnnnnnnnnnnnnnnnnnnnnnnnnnnnnnnnnnnnnnnnnnnnnnnnnnnnnnnnnnnnnnnnnnnnnnnnnnnnnnnnnnnnnnnnnnnnnnnnnnnnnnnnnnnnnnnnnnnnnnnnnnnnnnnnnnnnnnnnnnnnnnnnnnnnnnnnnnnnnnnnnnnnnnnnnnnnnnnnnnnnnnnnnnnnnnnnnnnnnnnnnnnnnnnnnnnnnnnnnnnnnnnnnnnnnnnnsctggttyrawtccrrstysdmsva

SEQ ID NO: 619 - RNA, 341 nt, synthetic construct
  source 1..341: mol_type = other RNA
  misc_difference 1: note = May be absent
  misc_difference 2: note = a, c, g, u, unknown, other, or absent
  misc_difference 3: note = May be absent
  misc_difference 4: note = a, c, g, u, unknown, other, or absent
  misc_difference 5: note = a, c, g, u, unknown, other, or absent
  misc_difference 6: note = a, c, g, u, unknown, other, or absent
  misc_difference 7: note = a, c, g, u, unknown, other, or absent
  misc_difference 8: note = May be absent
  misc_difference 9: note = May be absent
  misc_difference 10: note = May be absent
  misc_difference 11: note = May be absent
  misc_difference 12: note = a, c, g, u, unknown, other, or absent
  misc_difference 13: note = May be absent
  misc_difference 14: note = May be absent
  misc_difference 15: note = a, c, g, u, unknown, other, or absent
  misc_difference 16: note = a, c, g, u, unknown, other, or absent
  misc_difference 17: note = May be absent
  misc_difference 18: note = May be absent
  misc_difference 19: note = May be absent
  misc_difference 20: note = May be absent
  misc_difference 21: note = a, c, g, u, unknown, other, or absent
  misc_difference 22: note = May be absent
  misc_difference 23: note = May be absent
  misc_difference 24: note = a, c, g, u, unknown, other, or absent
  misc_difference 25: note = a, c, g, u, unknown, other, or absent
  misc_difference 26: note = May be absent
  misc_difference 27: note = May be absent
  misc_difference 28: note = a, c, g, u, unknown, other, or absent
  misc_difference 29: note = May be absent
  misc_difference 30: note = a, c, g, u, unknown, other, or absent
  misc_difference 31: note = a, c, g, u, unknown, other, or absent
  misc_difference 32: note = a, c, g, u, unknown, other, or absent
  misc_difference 33: note = a, c, g, u, unknown, other, or absent
  misc_difference 34: note = May be absent
  misc_difference 35: note = May be absent
  misc_difference 36: note = a, c, g, u, unknown, other, or absent
  misc_difference 37: note = May be absent
  misc_difference 38: note = May be absent
  misc_difference 39: note = May be absent
  misc_difference 40: note = a, c, g, u, unknown, other, or absent
  misc_difference 41: note = a, c, g, u, unknown, other, or absent
  misc_difference 42: note = a, c, g, u, unknown, other, or absent
  misc_difference 43: note = a, c, g, u, unknown, other, or absent
  misc_difference 44: note = a, c, g, u, unknown, other, or absent
  misc_difference 45: note = a, c, g, u, unknown, other, or absent
  misc_difference 46: note = a, c, g, u, unknown, other, or absent
  misc_difference 47: note = a, c, g, u, unknown, other, or absent
  misc_difference 48: note = a, c, g, u, unknown, other, or absent
  misc_difference 49: note = a, c, g, u, unknown, other, or absent
  misc_difference 50: note = a, c, g, u, unknown, other, or absent
  misc_difference 51: note = a, c, g, u, unknown, other, or absent
  misc_difference 52: note = a, c, g, u, unknown, other, or absent
  misc_difference 53: note = a, c, g, u, unknown, other, or absent
  misc_difference 54: note = a, c, g, u, unknown, other, or absent
  misc_difference 55: note = a, c, g, u, unknown, other, or absent
  misc_difference 56: note = a, c, g, u, unknown, other, or absent
  misc_difference 57: note = a, c, g, u, unknown, other, or absent
  misc_difference 58: note = a, c, g, u, unknown, other, or absent
  misc_difference 59: note = a, c, g, u, unknown, other, or absent
  misc_difference 60: note = a, c, g, u, unknown, other, or absent
  misc_difference 61: note = a, c, g, u, unknown, other, or absent
  misc_difference 62: note = a, c, g, u, unknown, other, or absent
  misc_difference 63: note = a, c, g, u, unknown, other, or absent
  misc_difference 64: note = a, c, g, u, unknown, other, or absent
  misc_difference 65: note = a, c, g, u, unknown, other, or absent
  misc_difference 66: note = a, c, g, u, unknown, other, or absent
  misc_difference 67: note = a, c, g, u, unknown, other, or absent
  misc_difference 68: note = a, c, g, u, unknown, other, or absent
  misc_difference 69: note = a, c, g, u, unknown, other, or absent
  misc_difference 70: note = a, c, g, u, unknown, other, or absent
  misc_difference 71: note = a, c, g, u, unknown, other, or absent
  misc_difference 72: note = a, c, g, u, unknown, other, or absent
  misc_difference 73: note = a, c, g, u, unknown, other, or absent
  misc_difference 74: note = a, c, g, u, unknown, other, or absent
  misc_difference 75: note = a, c, g, u, unknown, other, or absent
  misc_difference 76: note = a, c, g, u, unknown, other, or absent
  misc_difference 77: note = a, c, g, u, unknown, other, or absent
  misc_difference 78: note = a, c, g, u, unknown, other, or absent
  misc_difference 79: note = a, c, g, u, unknown, other, or absent
  misc_difference 80: note = a, c, g, u, unknown, other, or absent
  misc_difference 81: note = a, c, g, u, unknown, other, or absent
  misc_difference 82: note = a, c, g, u, unknown, other, or absent
  misc_difference 83: note = a, c, g, u, unknown, other, or absent
  misc_difference 84: note = a, c, g, u, unknown, other, or absent
  misc_difference 85: note = a, c, g, u, unknown, other, or absent
  misc_difference 86: note = a, c, g, u, unknown, other, or absent
  misc_difference 87: note = a, c, g, u, unknown, other, or absent
  misc_difference 88: note = a, c, g, u, unknown, other, or absent
  misc_difference 89: note = a, c, g, u, unknown, other, or absent
  misc_difference 90: note = a, c, g, u, unknown, other, or absent
  misc_difference 91: note = a, c, g, u, unknown, other, or absent
  misc_difference 92: note = a, c, g, u, unknown, other, or absent
  misc_difference 93: note = a, c, g, u, unknown, other, or absent
  misc_difference 94: note = a, c, g, u, unknown, other, or absent
  misc_difference 95: note = a, c, g, u, unknown, other, or absent
  misc_difference 96: note = a, c, g, u, unknown, other, or absent
  misc_difference 97: note = a, c, g, u, unknown, other, or absent
  misc_difference 98: note = a, c, g, u, unknown, other, or absent
  misc_difference 99: note = a, c, g, u, unknown, other, or absent
  misc_difference 100: note = a, c, g, u, unknown, other, or absent
  misc_difference 101: note = a, c, g, u, unknown, other, or absent
  misc_difference 102: note = a, c, g, u, unknown, other, or absent
  misc_difference 103: note = a, c, g, u, unknown, other, or absent
  misc_difference 104: note = a, c, g, u, unknown, other, or absent
  misc_difference 105: note = a, c, g, u, unknown, other, or absent
  misc_difference 106: note = a, c, g, u, unknown, other, or absent
  misc_difference 107: note = a, c, g, u, unknown, other, or absent
  misc_difference 108: note = a, c, g, u, unknown, other, or absent
  misc_difference 109: note = a, c, g, u, unknown, other, or absent
  misc_difference 110: note = a, c, g, u, unknown, other, or absent
  misc_difference 111: note = a, c, g, u, unknown, other, or absent
  misc_difference 112: note = a, c, g, u, unknown, other, or absent
  misc_difference 113: note = a, c, g, u, unknown, other, or absent
  misc_difference 114: note = a, c, g, u, unknown, other, or absent
  misc_difference 115: note = a, c, g, u, unknown, other, or absent
  misc_difference 116: note = a, c, g, u, unknown, other, or absent
  misc_difference 117: note = a, c, g, u, unknown, other, or absent
  misc_difference 118: note = a, c, g, u, unknown, other, or absent
  misc_difference 119: note = a, c, g, u, unknown, other, or absent
  misc_difference 120: note = a, c, g, u, unknown, other, or absent
  misc_difference 121: note = a, c, g, u, unknown, other, or absent
  misc_difference 122: note = a, c, g, u, unknown, other, or absent
  misc_difference 123: note = a, c, g, u, unknown, other, or absent
  misc_difference 124: note = a, c, g, u, unknown, other, or absent
  misc_difference 125: note = a, c, g, u, unknown, other, or absent
  misc_difference 126: note = a, c, g, u, unknown, other, or absent
  misc_difference 127: note = a, c, g, u, unknown, other, or absent
  misc_difference 128: note = a, c, g, u, unknown, other, or absent
  misc_difference 129: note = a, c, g, u, unknown, other, or absent
  misc_difference 130: note = a, c, g, u, unknown, other, or absent
  misc_difference 131: note = a, c, g, u, unknown, other, or absent
  misc_difference 132: note = a, c, g, u, unknown, other, or absent
  misc_difference 133: note = a, c, g, u, unknown, other, or absent
  misc_difference 134: note = a, c, g, u, unknown, other, or absent
  misc_difference 135: note = a, c, g, u, unknown, other, or absent
  misc_difference 136: note = a, c, g, u, unknown, other, or absent
  misc_difference 137: note = a, c, g, u, unknown, other, or absent
  misc_difference 138: note = a, c, g, u, unknown, other, or absent
  misc_difference 139: note = a, c, g, u, unknown, other, or absent
  misc_difference 140: note = a, c, g, u, unknown, other, or absent
  misc_difference 141: note = a, c, g, u, unknown, other, or absent
  misc_difference 142: note = a, c, g, u, unknown, other, or absent
  misc_difference 143: note = a, c, g, u, unknown, other, or absent
  misc_difference 144: note = a, c, g, u, unknown, other, or absent
  misc_difference 145: note = a, c, g, u, unknown, other, or absent
  misc_difference 146: note = a, c, g, u, unknown, other, or absent
  misc_difference 147: note = a, c, g, u, unknown, other, or absent
  misc_difference 148: note = a, c, g, u, unknown, other, or absent
  misc_difference 149: note = a, c, g, u, unknown, other, or absent
  misc_difference 150: note = a, c, g, u, unknown, other, or absent
  misc_difference 151: note = a, c, g, u, unknown, other, or absent
  misc_difference 152: note = a, c, g, u, unknown, other, or absent
  misc_difference 153: note = a, c, g, u, unknown, other, or absent
  misc_difference 154: note = a, c, g, u, unknown, other, or absent
  misc_difference 155: note = a, c, g, u, unknown, other, or absent
  misc_difference 156: note = a, c, g, u, unknown, other, or absent
  misc_difference 157: note = a, c, g, u, unknown, other, or absent
  misc_difference 158: note = a, c, g, u, unknown, other, or absent
  misc_difference 159: note = a, c, g, u, unknown, other, or absent
  misc_difference 160: note = a, c, g, u, unknown, other, or absent
  misc_difference 161: note = a, c, g, u, unknown, other, or absent
  misc_difference 162: note = a, c, g, u, unknown, other, or absent
  misc_difference 163: note = a, c, g, u, unknown, other, or absent
  misc_difference 164: note = a, c, g, u, unknown, other, or absent
  misc_difference 165: note = a, c, g, u, unknown, other, or absent
  misc_difference 166: note = a, c, g, u, unknown, other, or absent
  misc_difference 167: note = a, c, g, u, unknown, other, or absent
  misc_difference 168: note = a, c, g, u, unknown, other, or absent
  misc_difference 169: note = a, c, g, u, unknown, other, or absent
  misc_difference 170: note = a, c, g, u, unknown, other, or absent
  misc_difference 171: note = a, c, g, u, unknown, other, or absent
  misc_difference 172: note = a, c, g, u, unknown, other, or absent
  misc_difference 173: note = a, c, g, u, unknown, other, or absent
  misc_difference 174: note = a, c, g, u, unknown, other, or absent
  misc_difference 175: note = a, c, g, u, unknown, other, or absent
  misc_difference 176: note = a, c, g, u, unknown, other, or absent
  misc_difference 177: note = a, c, g, u, unknown, other, or absent
  misc_difference 178: note = a, c, g, u, unknown, other, or absent
  misc_difference 179: note = a, c, g, u, unknown, other, or absent
  misc_difference 180: note = a, c, g, u, unknown, other, or absent
  misc_difference 181: note = a, c, g, u, unknown, other, or absent
  misc_difference 182: note = a, c, g, u, unknown, other, or absent
  misc_difference 183: note = a, c, g, u, unknown, other, or absent
  misc_difference 184: note = a, c, g, u, unknown, other, or absent
  misc_difference 185: note = a, c, g, u, unknown, other, or absent
  misc_difference 186: note = a, c, g, u, unknown, other, or absent
  misc_difference 187: note = a, c, g, u, unknown, other, or absent
  misc_difference 188: note = a, c, g, u, unknown, other, or absent
  misc_difference 189: note = a, c, g, u, unknown, other, or absent
  misc_difference 190: note = a, c, g, u, unknown, other, or absent
  misc_difference 191: note = a, c, g, u, unknown, other, or absent
  misc_difference 192: note = a, c, g, u, unknown, other, or absent
  misc_difference 193: note = a, c, g, u, unknown, other, or absent
  misc_difference 194: note = a, c, g, u, unknown, other, or absent
  misc_difference 195: note = a, c, g, u, unknown, other, or absent
  misc_difference 196: note = a, c, g, u, unknown, other, or absent
  misc_difference 197: note = a, c, g, u, unknown, other, or absent
  misc_difference 198: note = a, c, g, u, unknown, other, or absent
  misc_difference 199: note = a, c, g, u, unknown, other, or absent
  misc_difference 200: note = a, c, g, u, unknown, other, or absent
  misc_difference 201: note = a, c, g, u, unknown, other, or absent
  misc_difference 202: note = a, c, g, u, unknown, other, or absent
  misc_difference 203: note = a, c, g, u, unknown, other, or absent
  misc_difference 204: note = a, c, g, u, unknown, other, or absent
  misc_difference 205: note = a, c, g, u, unknown, other, or absent
  misc_difference 206: note = a, c, g, u, unknown, other, or absent
  misc_difference 207: note = a, c, g, u, unknown, other, or absent
  misc_difference 208: note = a, c, g, u, unknown, other, or absent
  misc_difference 209: note = a, c, g, u, unknown, other, or absent
  misc_difference 210: note = a, c, g, u, unknown, other, or absent
  misc_difference 211: note = a, c, g, u, unknown, other, or absent
  misc_difference 212: note = a, c, g, u, unknown, other, or absent
  misc_difference 213: note = a, c, g, u, unknown, other, or absent
  misc_difference 214: note = a, c, g, u, unknown, other, or absent
  misc_difference 215: note = a, c, g, u, unknown, other, or absent
  misc_difference 216: note = a, c, g, u, unknown, other, or absent
  misc_difference 217: note = a, c, g, u, unknown, other, or absent
  misc_difference 218: note = a, c, g, u, unknown, other, or absent
  misc_difference 219: note = a, c, g, u, unknown, other, or absent
  misc_difference 220: note = a, c, g, u, unknown, other, or absent
  misc_difference 221: note = a, c, g, u, unknown, other, or absent
  misc_difference 222: note = a, c, g, u, unknown, other, or absent
  misc_difference 223: note = a, c, g, u, unknown, other, or absent
  misc_difference 224: note = a, c, g, u, unknown, other, or absent
  misc_difference 225: note = a, c, g, u, unknown, other, or absent
  misc_difference 226: note = a, c, g, u, unknown, other, or absent
  misc_difference 227: note = a, c, g, u, unknown, other, or absent
  misc_difference 228: note = a, c, g, u, unknown, other, or absent
  misc_difference 229: note = a, c, g, u, unknown, other, or absent
  misc_difference 230: note = a, c, g, u, unknown, other, or absent
  misc_difference 231: note = a, c, g, u, unknown, other, or absent
  misc_difference 232: note = a, c, g, u, unknown, other, or absent
  misc_difference 233: note = a, c, g, u, unknown, other, or absent
  misc_difference 234: note = a, c, g, u, unknown, other, or absent
  misc_difference 235: note = a, c, g, u, unknown, other, or absent
  misc_difference 236: note = a, c, g, u, unknown, other, or absent
  misc_difference 237: note = a, c, g, u, unknown, other, or absent
  misc_difference 238: note = a, c, g, u, unknown, other, or absent
  misc_difference 239: note = a, c, g, u, unknown, other, or absent
  misc_difference 240: note = a, c, g, u, unknown, other, or absent
  misc_difference 241: note = a, c, g, u, unknown, other, or absent
  misc_difference 242: note = a, c, g, u, unknown, other, or absent
  misc_difference 243: note = a, c, g, u, unknown, other, or absent
  misc_difference 244: note = a, c, g, u, unknown, other, or absent
  misc_difference 245: note = a, c, g, u, unknown, other, or absent
  misc_difference 246: note = a, c, g, u, unknown, other, or absent
  misc_difference 247: note = a, c, g, u, unknown, other, or absent
  misc_difference 248: note = a, c, g, u, unknown, other, or absent
  misc_difference 249: note = a, c, g, u, unknown, other, or absent
  misc_difference 250: note = a, c, g, u, unknown, other, or absent
  misc_difference 251: note = a, c, g, u, unknown, other, or absent
  misc_difference 252: note = a, c, g, u, unknown, other, or absent
  misc_difference 253: note = a, c, g, u, unknown, other, or absent
  misc_difference 254: note = a, c, g, u, unknown, other, or absent
  misc_difference 255: note = a, c, g, u, unknown, other, or absent
  misc_difference 256: note = a, c, g, u, unknown, other, or absent
  misc_difference 257: note = a, c, g, u, unknown, other, or absent
  misc_difference 258: note = a, c, g, u, unknown, other, or absent
  misc_difference 259: note = a, c, g, u, unknown, other, or absent
  misc_difference 260: note = a, c, g, u, unknown, other, or absent
  misc_difference 261: note = a, c, g, u, unknown, other, or absent
  misc_difference 262: note = a, c, g, u, unknown, other, or absent
  misc_difference 263: note = a, c, g, u, unknown, other, or absent
  misc_difference 264: note = a, c, g, u, unknown, other, or absent
  misc_difference 265: note = a, c, g, u, unknown, other, or absent
  misc_difference 266: note = a, c, g, u, unknown, other, or absent
  misc_difference 267: note = a, c, g, u, unknown, other, or absent
  misc_difference 268: note = a, c, g, u, unknown, other, or absent
  misc_difference 269: note = a, c, g, u, unknown, other, or absent
  misc_difference 270: note = a, c, g, u, unknown, other, or absent
  misc_difference 271: note = a, c, g, u, unknown, other, or absent
  misc_difference 272: note = a, c, g, u, unknown, other, or absent
  misc_difference 273: note = a, c, g, u, unknown, other, or absent
  misc_difference 274: note = a, c, g, u, unknown, other, or absent
  misc_difference 275: note = a, c, g, u, unknown, other, or absent
  misc_difference 276: note = a, c, g, u, unknown, other, or absent
  misc_difference 277: note = a, c, g, u, unknown, other, or absent
  misc_difference 278: note = a, c, g, u, unknown, other, or absent
  misc_difference 279: note = a, c, g, u, unknown, other, or absent
  misc_difference 280: note = a, c, g, u, unknown, other, or absent
  misc_difference 281: note = a, c, g, u, unknown, other, or absent
  misc_difference 282: note = a, c, g, u, unknown, other, or absent
  misc_difference 283: note = a, c, g, u, unknown, other, or absent
  misc_difference 284: note = a, c, g, u, unknown, other, or absent
  misc_difference 285: note = a, c, g, u, unknown, other, or absent
  misc_difference 286: note = a, c, g, u, unknown, other, or absent
  misc_difference 287: note = a, c, g, u, unknown, other, or absent
  misc_difference 288: note = a, c, g, u, unknown, other, or absent
  misc_difference 289: note = a, c, g, u, unknown, other, or absent
  misc_difference 290: note = a, c, g, u, unknown, other, or absent
  misc_difference 291: note = a, c, g, u, unknown, other, or absent
  misc_difference 292: note = a, c, g, u, unknown, other, or absent
  misc_difference 293: note = a, c, g, u, unknown, other, or absent
  misc_difference 294: note = a, c, g, u, unknown, other, or absent
  misc_difference 295: note = a, c, g, u, unknown, other, or absent
  misc_difference 296: note = a, c, g, u, unknown, other, or absent
  misc_difference 297: note = a, c, g, u, unknown, other, or absent
  misc_difference 298: note = a, c, g, u, unknown, other, or absent
  misc_difference 299: note = a, c, g, u, unknown, other, or absent
  misc_difference 300: note = a, c, g, u, unknown, other, or absent
  misc_difference 301: note = a, c, g, u, unknown, other, or absent
  misc_difference 302: note = a, c, g, u, unknown, other, or absent
  misc_difference 303: note = a, c, g, u, unknown, other, or absent
  misc_difference 304: note = a, c, g, u, unknown, other, or absent
  misc_difference 305: note = a, c, g, u, unknown, other, or absent
  misc_difference 306: note = a, c, g, u, unknown, other, or absent
  misc_difference 307: note = a, c, g, u, unknown, other, or absent
  misc_difference 308: note = a, c, g, u, unknown, other, or absent
  misc_difference 309: note = a, c, g, u, unknown, other, or absent
  misc_difference 310: note = a, c, g, u, unknown, other, or absent
  misc_difference 311: note = a, c, g, u, unknown, other, or absent
  misc_difference 312: note = a, c, g, u, unknown, other, or absent
  misc_difference 313: note = a, c, g, u, unknown, other, or absent
  misc_difference 314: note = a, c, g, u, unknown, other, or absent
  misc_difference 315: note = a, c, g, u, unknown, other, or absent
  misc_difference 316: note = a, c, g, u, unknown, other, or absent
  misc_difference 317: note = a, c, g, u, unknown, other, or absent
  misc_difference 318: note = a, c, g, u, unknown, other, or absent
  misc_difference 319: note = a, c, g, u, unknown, other, or absent
  misc_difference 320: note = May be absent
  misc_difference 321: note = May be absent
  misc_difference 322: note = May be absent
  misc_difference 323: note = May be absent
  misc_difference 324: note = May be absent
  misc_difference 325: note = May be absent
  misc_difference 326: note = May be absent
  misc_difference 327: note = a, c, g, u, unknown, other, or absent
  misc_difference 328: note = May be absent
  misc_difference 329: note = May be absent
  misc_difference 330: note = a, c, g, u, unknown, other, or absent
  misc_difference 331: note = a, c, g, u, unknown, other, or absent
  misc_difference 332: note = a, c, g, u, unknown, other, or absent
  misc_difference 333: note = a, c, g, u, unknown, other, or absent
  misc_difference 334: note = a, c, g, u, unknown, other, or absent
  misc_difference 335: note = a, c, g, u, unknown, other, or absent
  misc_difference 336: note = a, c, g, u, unknown, other, or absent
  misc_difference 337: note = a, c, g, u, unknown, other, or absent
  misc_difference 338: note = a, c, g, u, unknown, other, or absent
  misc_difference 339: note = a, c, g, u, unknown, other, or absent
  misc_difference 340: note = May be absent
  misc_difference 341: note = May be absent
  misc_difference 40..311: note = This region may encompass 1-271 nucleotides
dndnnnntvrynbrnnhtgknyannrynbnnnnhtnacrnnnnnnnnnnnnnnnnnnnnnnnnnnnnnnnnnnnnnnnnnnnnnnnnnnnnnnnnnnnnnnnnnnnnnnnnnnnnnnnnnnnnnnnnnnnnnnnnnnnnnnnnnnnnnnnnnnnnnnnnnnnnnnnnnnnnnnnnnnnnnnnnnnnnnnnnnnnnnnnnnnnnnnnnnnnnnnnnnnnnnnnnnnnnnnnnnnnnnnnnnnnnnnnnnnnnnnnnnnnnnnnnnnnnnnnnnnnnnnnnnnnnnnnnnnnnnnnnnnnnnnnnnnnnnnnnnnnnnnnndrdtbranhynnnnnnnnnnyv

SEQ ID NO: 620 - RNA, 340 nt, synthetic construct
  source 1..340: mol_type = other RNA
  misc_difference 1: note = May be absent
  misc_difference 2: note = May be absent
  misc_difference 3: note = May be absent
  misc_difference 4: note = May be absent
  misc_difference 5: note = May be absent
  misc_difference 6: note = May be absent
  misc_difference 7: note = May be absent
  misc_difference 8: note = May be absent
  misc_difference 9: note = May be absent
  misc_difference 10: note = May be absent
  misc_difference 11: note = May be absent
  misc_difference 12: note = May be absent
  misc_difference 13: note = May be absent
  misc_difference 14: note = May be absent
  misc_difference 15: note = a, c, g, u, unknown, other, or absent
  misc_difference 16: note = a, c, g, u, unknown, other, or absent
  misc_difference 17: note = May be absent
  misc_difference 18: note = May be absent
  misc_difference 19: note = May be absent
  misc_difference 20: note = May be absent
  misc_difference 21: note = May be absent
  misc_difference 22: note = May be absent
  misc_difference 23: note = May be absent
  misc_difference 24: note = a, c, g, u, unknown, other, or absent
  misc_difference 25: note = May be absent
  misc_difference 26: note = May be absent
  misc_difference 27: note = a, c, g, u, unknown, other, or absent
  misc_difference 28: note = May be absent
  misc_difference 29: note = a, c, g, u, unknown, other, or absent
  misc_difference 30: note = a, c, g, u, unknown, other, or absent
  misc_difference 31: note = May be absent
  misc_difference 32: note = May be absent
  misc_difference 33: note = May be absent
  misc_difference 34: note = May be absent
  misc_difference 35: note = May be absent
  misc_difference 36: note = May be absent
  misc_difference 37: note = May be absent
  misc_difference 38: note = May be absent
  misc_difference 39: note = May be absent
  misc_difference 40: note = May be absent
  misc_difference 41: note = a, c, g, u, unknown, other, or absent
  misc_difference 42: note = a, c, g, u, unknown, other, or absent
  misc_difference 43: note = a, c, g, u, unknown, other, or absent
  misc_difference 44: note = May be absent
  misc_difference 45: note = a, c, g, u, unknown, other, or absent
  misc_difference 46: note = a, c, g, u, unknown, other, or absent
  misc_difference 47: note = a, c, g, u, unknown, other, or absent
  misc_difference 48: note = a, c, g, u, unknown, other, or absent
  misc_difference 49: note = a, c, g, u, unknown, other, or absent
  misc_difference 50: note = a, c, g, u, unknown, other, or absent
  misc_difference 51: note = a, c, g, u, unknown, other, or absent
  misc_difference 52: note = a, c, g, u, unknown, other, or absent
  misc_difference 53: note = a, c, g, u, unknown, other, or absent
  misc_difference 54: note = a, c, g, u, unknown, other, or absent
  misc_difference 55: note = a, c, g, u, unknown, other, or absent
  misc_difference 56: note = a, c, g, u, unknown, other, or absent
  misc_difference 57: note = a, c, g, u, unknown, other, or absent
  misc_difference 58: note = a, c, g, u, unknown, other, or absent
  misc_difference 59: note = a, c, g, u, unknown, other, or absent
  misc_difference 60: note = a, c, g, u, unknown, other, or absent
  misc_difference 61: note = a, c, g, u, unknown, other, or absent
  misc_difference 62: note = a, c, g, u, unknown, other, or absent
  misc_difference 63: note = a, c, g, u, unknown, other, or absent
  misc_difference 64: note = a, c, g, u, unknown, other, or absent
  misc_difference 65: note = a, c, g, u, unknown, other, or absent
  misc_difference 66: note = a, c, g, u, unknown, other, or absent
  misc_difference 67: note = a, c, g, u, unknown, other, or absent
  misc_difference 68: note = a, c, g, u, unknown, other, or absent
  misc_difference 69: note = a, c, g, u, unknown, other, or absent
  misc_difference 70: note = a, c, g, u, unknown, other, or absent
  misc_difference 71: note = a, c, g, u, unknown, other, or absent
  misc_difference 72: note = a, c, g, u, unknown, other, or absent
  misc_difference 73: note = a, c, g, u, unknown, other, or absent
  misc_difference 74: note = a, c, g, u, unknown, other, or absent
  misc_difference 75: note = a, c, g, u, unknown, other, or absent
  misc_difference 76: note = a, c, g, u, unknown, other, or absent
  misc_difference 77: note = a, c, g, u, unknown, other, or absent
  misc_difference 78: note = a, c, g, u, unknown, other, or absent
  misc_difference 79: note = a, c, g, u, unknown, other, or absent
  misc_difference 80: note = a, c, g, u, unknown, other, or absent
  misc_difference 81: note = a, c, g, u, unknown, other, or absent
  misc_difference 82: note = a, c, g, u, unknown, other, or absent
  misc_difference 83: note = a, c, g, u, unknown, other, or absent
  misc_difference 84: note = a, c, g, u, unknown, other, or absent
  misc_difference 85: note = a, c, g, u, unknown, other, or absent
  misc_difference 86: note = a, c, g, u, unknown, other, or absent
  misc_difference 87: note = a, c, g, u, unknown, other, or absent
  misc_difference 88: note = a, c, g, u, unknown, other, or absent
  misc_difference 89: note = a, c, g, u, unknown, other, or absent
  misc_difference 90: note = a, c, g, u, unknown, other, or absent
  misc_difference 91: note = a, c, g, u, unknown, other, or absent
  misc_difference 92: note = a, c, g, u, unknown, other, or absent
  misc_difference 93: note = a, c, g, u, unknown, other, or absent
  misc_difference 94: note = a, c, g, u, unknown, other, or absent
  misc_difference 95: note = a, c, g, u, unknown, other, or absent
  misc_difference 96: note = a, c, g, u, unknown, other, or absent
  misc_difference 97: note = a, c, g, u, unknown, other, or absent
  misc_difference 98: note = a, c, g, u, unknown, other, or absent
  misc_difference 99: note = a, c, g, u, unknown, other, or absent
  misc_difference 100: note = a, c, g, u, unknown, other, or absent
  misc_difference 101: note = a, c, g, u, unknown, other, or absent
  misc_difference 102: note = a, c, g, u, unknown, other, or absent
  misc_difference 103: note = a, c, g, u, unknown, other, or absent
  misc_difference 104: note = a, c, g, u, unknown, other, or absent
  misc_difference 105: note = a, c, g, u, unknown, other, or absent
  misc_difference 106: note = a, c, g, u, unknown, other, or absent
  misc_difference 107: note = a, c, g, u, unknown, other, or absent
  misc_difference 108: note = a, c, g, u, unknown, other, or absent
  misc_difference 109: note = a, c, g, u, unknown, other, or absent
  misc_difference 110: note = a, c, g, u, unknown, other, or absent
  misc_difference 111: note = a, c, g, u, unknown, other, or absent
  misc_difference 112: note = a, c, g, u, unknown, other, or absent
  misc_difference 113: note = a, c, g, u, unknown, other, or absent
  misc_difference 114: note = a, c, g, u, unknown, other, or absent
  misc_difference 115: note = a, c, g, u, unknown, other, or absent
  misc_difference 116: note = a, c, g, u, unknown, other, or absent
  misc_difference 117: note = a, c, g, u, unknown, other, or absent
  misc_difference 118: note = a, c, g, u, unknown, other, or absent
  misc_difference 119: note = a, c, g, u, unknown, other, or absent
  misc_difference 120: note = a, c, g, u, unknown, other, or absent
  misc_difference 121: note = a, c, g, u, unknown, other, or absent
  misc_difference 122: note = a, c, g, u, unknown, other, or absent
  misc_difference 123: note = a, c, g, u, unknown, other, or absent
  misc_difference 124: note = a, c, g, u, unknown, other, or absent
  misc_difference 125: note = a, c, g, u, unknown, other, or absent
  misc_difference 126: note = a, c, g, u, unknown, other, or absent
  misc_difference 127: note = a, c, g, u, unknown, other, or absent
  misc_difference 128: note = a, c, g, u, unknown, other, or absent
  misc_difference 129: note = a, c, g, u, unknown, other, or absent
  misc_difference 130: note = a, c, g, u, unknown, other, or absent
  misc_difference 131: note = a, c, g, u, unknown, other, or absent
  misc_difference 132: note = a, c, g, u, unknown, other, or absent
  misc_difference 133: note = a, c, g, u, unknown, other, or absent
  misc_difference 134: note = a, c, g, u, unknown, other, or absent
  misc_difference 135: note = a, c, g, u, unknown, other, or absent
  misc_difference 136: note = a, c, g, u, unknown, other, or absent
  misc_difference 137: note = a, c, g, u, unknown, other, or absent
  misc_difference 138: note = a, c, g, u, unknown, other, or absent
  misc_difference 139: note = a, c, g, u, unknown, other, or absent
  misc_difference 140: note = a, c, g, u, unknown, other, or absent
  misc_difference 141: note = a, c, g, u, unknown, other, or absent
  misc_difference 142: note = a, c, g, u, unknown, other, or absent
  misc_difference 143: note = a, c, g, u, unknown, other, or absent
  misc_difference 144: note = a, c, g, u, unknown, other, or absent
  misc_difference 145: note = a, c, g, u, unknown, other, or absent
  misc_difference 146: note = a, c, g, u, unknown, other, or absent
  misc_difference 147: note = a, c, g, u, unknown, other, or absent
  misc_difference 148: note = a, c, g, u, unknown, other, or absent
  misc_difference 149: note = a, c, g, u, unknown, other, or absent
  misc_difference 150: note = a, c, g, u, unknown, other, or absent
  misc_difference 151: note = a, c, g, u, unknown, other, or absent
  misc_difference 152: note = a, c, g, u, unknown, other, or absent
  misc_difference 153: note = a, c, g, u, unknown, other, or absent
  misc_difference 154: note = a, c, g, u, unknown, other, or absent
  misc_difference 155: note = a, c, g, u, unknown, other, or absent
  misc_difference 156: note = a, c, g, u, unknown, other, or absent
  misc_difference 157: note = a, c, g, u, unknown, other, or absent
  misc_difference 158: note = a, c, g, u, unknown, other, or absent
  misc_difference 159: note = a, c, g, u, unknown, other, or absent
  misc_difference 160: note = a, c, g, u, unknown, other, or absent
  misc_difference 161: note = a, c, g, u, unknown, other, or absent
  misc_difference 162: note = a, c, g, u, unknown, other, or absent
  misc_difference 163: note = a, c, g, u, unknown, other, or absent
  misc_difference 164: note = a, c, g, u, unknown, other, or absent
  misc_difference 165: note = a, c, g, u, unknown, other, or absent
  misc_difference 166: note = a, c, g, u, unknown, other, or absent
  misc_difference 167: note = a, c, g, u, unknown, other, or absent
  misc_difference 168: note = a, c, g, u, unknown, other, or absent
  misc_difference 169: note = a, c, g, u, unknown, other, or absent
  misc_difference 170: note = a, c, g, u, unknown, other, or absent
  misc_difference 171: note = a, c, g, u, unknown, other, or absent
  misc_difference 172: note = a, c, g, u, unknown, other, or absent
  misc_difference 173: note = a, c, g, u, unknown, other, or absent
  misc_difference 174: note = a, c, g, u, unknown, other, or absent
  misc_difference 175: note = a, c, g, u, unknown, other, or absent
  misc_difference 176: note = a, c, g, u, unknown, other, or absent
  misc_difference 177: note = a, c, g, u, unknown, other, or absent
  misc_difference 178: note = a, c, g, u, unknown, other, or absent
  misc_difference 179: note = a, c, g, u, unknown, other, or absent
  misc_difference 180: note = a, c, g, u, unknown, other, or absent
  misc_difference 181: note = a, c, g, u, unknown, other, or absent
  misc_difference 182: note = a, c, g, u, unknown, other, or absent
  misc_difference 183: note = a, c, g, u, unknown, other, or absent
  misc_difference 184: note = a, c, g, u, unknown, other, or absent
  misc_difference 185: note = a, c, g, u, unknown, other, or absent
  misc_difference 186: note = a, c, g, u, unknown, other, or absent
  misc_difference 187: note = a, c, g, u, unknown, other, or absent
  misc_difference 188: note = a, c, g, u, unknown, other, or absent
  misc_difference 189: note = a, c, g, u, unknown, other, or absent
  misc_difference 190: note = a, c, g, u, unknown, other, or absent
  misc_difference 191: note = a, c, g, u, unknown, other, or absent
  misc_difference 192: note = a, c, g, u, unknown, other, or absent
  misc_difference 193: note = a, c, g, u, unknown, other, or absent
  misc_difference 194: note = a, c, g, u, unknown, other, or absent
  misc_difference 195: note = a, c, g, u, unknown, other, or absent
  misc_difference 196: note = a, c, g, u, unknown, other, or absent
  misc_difference 197: note = a, c, g, u, unknown, other, or absent
  misc_difference 198: note = a, c, g, u, unknown, other, or absent
  misc_difference 199: note = a, c, g, u, unknown, other, or absent
  misc_difference 200: note = a, c, g, u, unknown, other, or absent
  misc_difference 201: note = a, c, g, u, unknown, other, or absent
  misc_difference 202: note = a, c, g, u, unknown, other, or absent
  misc_difference 203: note = a, c, g, u, unknown, other, or absent
  misc_difference 204: note = a, c, g, u, unknown, other, or absent
  misc_difference 205: note = a, c, g, u, unknown, other, or absent
  misc_difference 206: note = a, c, g, u, unknown, other, or absent
  misc_difference 207: note = a, c, g, u, unknown, other, or absent
  misc_difference 208: note = a, c, g, u, unknown, other, or absent
  misc_difference 209: note = a, c, g, u, unknown, other, or absent
  misc_difference 210: note = a, c, g, u, unknown, other, or absent
  misc_difference 211: note = a, c, g, u, unknown, other, or absent
  misc_difference 212: note = a, c, g, u, unknown, other, or absent
  misc_difference 213: note = a, c, g, u, unknown, other, or absent
  misc_difference 214: note = a, c, g, u, unknown, other, or absent
  misc_difference 215: note = a, c, g, u, unknown, other, or absent
  misc_difference 216: note = a, c, g, u, unknown, other, or absent
  misc_difference 217: note = a, c, g, u, unknown, other, or absent
  misc_difference 218: note = a, c, g, u, unknown, other, or absent
  misc_difference 219: note = a, c, g, u, unknown, other, or absent
  misc_difference 220: note = a, c, g, u, unknown, other, or absent
  misc_difference 221: note = a, c, g, u, unknown, other, or absent
  misc_difference 222: note = a, c, g, u, unknown, other, or absent
  misc_difference 223: note = a, c, g, u, unknown, other, or absent
  misc_difference 224: note = a, c, g, u, unknown, other, or absent
  misc_difference 225: note = a, c, g, u, unknown, other, or absent
  misc_difference 226: note = a, c, g, u, unknown, other, or absent
  misc_difference 227: note = a, c, g, u, unknown, other, or absent
  misc_difference 228: note = a, c, g, u, unknown, other, or absent
  misc_difference 229: note = a, c, g, u, unknown, other, or absent
  misc_difference 230: note = a, c, g, u, unknown, other, or absent
  misc_difference 231: note = a, c, g, u, unknown, other, or absent
  misc_difference 232: note = a, c, g, u, unknown, other, or absent
  misc_difference 233: note = a, c, g, u, unknown, other, or absent
  misc_difference 234: note = a, c, g, u, unknown, other, or absent
  misc_difference 235: note = a, c, g, u, unknown, other, or absent
  misc_difference 236: note = a, c, g, u, unknown, other, or absent
  misc_difference 237: note = a, c, g, u, unknown, other, or absent
  misc_difference 238: note = a, c, g, u, unknown, other, or absent
  misc_difference 239: note = a, c, g, u, unknown, other, or absent
  misc_difference 240: note = a, c, g, u, unknown, other, or absent
  misc_difference 241: note = a, c, g, u, unknown, other, or absent
  misc_difference 242: note = a, c, g, u, unknown, other, or absent
  misc_difference 243: note = a, c, g, u, unknown, other, or absent
  misc_difference 244: note = a, c, g, u, unknown, other, or absent
  misc_difference 245: note = a, c, g, u, unknown, other, or absent
  misc_difference 246: note = a, c, g, u, unknown, other, or absent
  misc_difference 247: note = a, c, g, u, unknown, other, or absent
  misc_difference 248: note = a, c, g, u, unknown, other, or absent
  misc_difference 249: note = a, c, g, u, unknown, other, or absent
  misc_difference 250: note = a, c, g, u, unknown, other, or absent
  misc_difference 251: note = a, c, g, u, unknown, other, or absent
  misc_difference 252: note = a, c, g, u, unknown, other, or absent
  misc_difference 253: note = a, c, g, u, unknown, other, or absent
  misc_difference 254: note = a, c, g, u, unknown, other, or absent
  misc_difference 255: note = a, c, g, u, unknown, other, or absent
  misc_difference 256: note = a, c, g, u, unknown, other, or absent
  misc_difference 257: note = a, c, g, u, unknown, other, or absent
  misc_difference 258: note = a, c, g, u, unknown, other, or absent
  misc_difference 259: note = a, c, g, u, unknown, other, or absent
  misc_difference 260: note = a, c, g, u, unknown, other, or absent
  misc_difference 261: note = a, c, g, u, unknown, other, or absent
  misc_difference 262: note = a, c, g, u, unknown, other, or absent
  misc_difference 263: note = a, c, g, u, unknown, other, or absent
  misc_difference 264: note = a, c, g, u, unknown, other, or absent
  misc_difference 265: note = a, c, g, u, unknown, other, or absent
  misc_difference 266: note = a, c, g, u, unknown, other, or absent
  misc_difference 267: note = a, c, g, u, unknown, other, or absent
  misc_difference 268: note = a, c, g, u, unknown, other, or absent
  misc_difference 269: note = a, c, g, u, unknown, other, or absent
  misc_difference 270: note = a, c, g, u, unknown, other, or absent
  misc_difference 271: note = a, c, g, u, unknown, other, or absent
  misc_difference 272: note = a, c, g, u, unknown, other, or absent
  misc_difference 273: note = a, c, g, u, unknown, other, or absent
  misc_difference 274: note = a, c, g, u, unknown, other, or absent
  misc_difference 275: note = a, c, g, u, unknown, other, or absent
  misc_difference 276: note = a, c, g, u, unknown, other, or absent
  misc_difference 277: note = a, c, g, u, unknown, other, or absent
  misc_difference 278: note = a, c, g, u, unknown, other, or absent
  misc_difference 279: note = a, c, g, u, unknown, other, or absent
  misc_difference 280: note = a, c, g, u, unknown, other, or absent
  misc_difference 281: note = a, c, g, u, unknown, other, or absent
  misc_difference 282: note = a, c, g, u, unknown, other, or absent
  misc_difference 283: note = a, c, g, u, unknown, other, or absent
  misc_difference 284: note = a, c, g, u, unknown, other, or absent
  misc_difference 285: note = a, c, g, u, unknown, other, or absent
  misc_difference 286: note = a, c, g, u, unknown, other, or absent
  misc_difference 287: note = a, c, g, u, unknown, other, or absent
  misc_difference 288: note = a, c, g, u, unknown, other, or absent
  misc_difference 289: note = a, c, g, u, unknown, other, or absent
  misc_difference 290: note = a, c, g, u, unknown, other, or absent
  misc_difference 291: note = a, c, g, u, unknown, other, or absent
  misc_difference 292: note = a, c, g, u, unknown, other, or absent
  misc_difference 293: note = a, c, g, u, unknown, other, or absent
  misc_difference 294: note = a, c, g, u, unknown, other, or absent
  misc_difference 295: note = a, c, g, u, unknown, other, or absent
  misc_difference 296: note = a, c, g, u, unknown, other, or absent
  misc_difference 297: note = a, c, g, u, unknown, other, or absent
  misc_difference 298: note = a, c, g, u, unknown, other, or absent
  misc_difference 299: note = a, c, g, u, unknown, other, or absent
  misc_difference 300: note = a, c, g, u, unknown, other, or absent
  misc_difference 301: note = a, c, g, u, unknown, other, or absent
  misc_difference 302: note = a, c, g, u, unknown, other, or absent
  misc_difference 303: note = a, c, g, u, unknown, other, or absent
  misc_difference 304: note = a, c, g, u, unknown, other, or absent
  misc_difference 305: note = a, c, g, u, unknown, other, or absent
  misc_difference 306: note = a, c, g, u, unknown, other, or absent
  misc_difference 307: note = a, c, g, u, unknown, other, or absent
  misc_difference 308: note = a, c, g, u, unknown, other, or absent
  misc_difference 309: note = a, c, g, u, unknown, other, or absent
  misc_difference 310: note = a, c, g, u, unknown, other, or absent
  misc_difference 311: note = a, c, g, u, unknown, other, or absent
  misc_difference 312: note = a, c, g, u, unknown, other, or absent
  misc_difference 313: note = a, c, g, u, unknown, other, or absent
  misc_difference 314: note = a, c, g, u, unknown, other, or absent
  misc_difference 315: note = a, c, g, u, unknown, other, or absent
  misc_difference 316: note = May be absent
  misc_difference 317: note = a, c, g, u, unknown, other, or absent
  misc_difference 318: note = a, c, g, u, unknown, other, or absent
  misc_difference 319: note = May be absent
  misc_difference 320: note = May be absent
  misc_difference 321: note = May be absent
  misc_difference 322: note = May be absent
  misc_difference 323: note = May be absent
  misc_difference 324: note = May be absent
  misc_difference 325: note = May be absent
  misc_difference 326: note = a, c, g, u, unknown, other, or absent
  misc_difference 327: note = May be absent
  misc_difference 328: note = May be absent
  misc_difference 329: note = May be absent
  misc_difference 330: note = a, c, g, u, unknown, other, or absent
  misc_difference 331: note = May be absent
  misc_difference 332: note = May be absent
  misc_difference 333: note = a, c, g, u, unknown, other, or absent
  misc_difference 334: note = May be absent
  misc_difference 335: note = May be absent
  misc_difference 336: note = May be absent
  misc_difference 337: note = May be absent
  misc_difference 338: note = May be absent
  misc_difference 339: note = May be absent
  misc_difference 340: note = May be absent
  misc_difference 45..316: note = This region may encompass 1-271 nucleotides
kbkbshdtrrydbrnnhgktyadnrynynndhythacrhknnnrnnnnnnnnnnnnnnnnnnnnnnnnnnnnnnnnnnnnnnnnnnnnnnnnnnnnnnnnnnnnnnnnnnnnnnnnnnnnnnnnnnnnnnnnnnnnnnnnnnnnnnnnnnnnnnnnnnnnnnnnnnnnnnnnnnnnnnnnnnnnnnnnnnnnnnnnnnnnnnnnnnnnnnnnnnnnnnnnnnnnnnnnnnnnnnnnnnnnnnnnnnnnnnnnnnnnnnnnnnnnnnnnnnnnnnnnnnnnnnnnnnnnnnnnnnnnnnnnnnnnnnnnnnnnnnnbnnrrdtbranhybndvndsdwvyv

SEQ ID NO: 621 - RNA, 340 nt, synthetic construct
  source 1..340: mol_type = other RNA
  misc_difference 1: note = May be absent
  misc_difference 2: note = May be absent
  misc_difference 3: note = May be absent
  misc_difference 4: note = May be absent
  misc_difference 5: note = May be absent
  misc_difference 6: note = May be absent
  misc_difference 7: note = May be absent
  misc_difference 8: note = May be absent
  misc_difference 9: note = May be absent
  misc_difference 10: note = May be absent
  misc_difference 11: note = May be absent
  misc_difference 12: note = May be absent
  misc_difference 13: note = May be absent
  misc_difference 14: note = May be absent
  misc_difference 15: note = May be absent
  misc_difference 16: note = May be absent
  misc_difference 17: note = May be absent
  misc_difference 18: note = May be absent
  misc_difference 19: note = May be absent
  misc_difference 20: note = May be absent
  misc_difference 21: note = May be absent
  misc_difference 22: note = May be absent
  misc_difference 23: note = May be absent
  misc_difference 24: note = May be absent
  misc_difference 25: note = May be absent
  misc_difference 26: note = May be absent
  misc_difference 27: note = May be absent
  misc_difference 28: note = May be absent
  misc_difference 29: note = May be absent
  misc_difference 30: note = May be absent
  misc_difference 31: note = May be absent
  misc_difference 32: note = May be absent
  misc_difference 33: note = May be absent
  misc_difference 34: note = May be absent
  misc_difference 35: note = May be absent
  misc_difference 36: note = May be absent
  misc_difference 37: note = May be absent
  misc_difference 38: note = May be absent
  misc_difference 39: note = May be absent
  misc_difference 40: note = May be absent
  misc_difference 41: note = May be absent
  misc_difference 42: note = May be absent
  misc_difference 43: note = May be absent
  misc_difference 44: note = May be absent
  misc_difference 45: note = a, c, g, u, unknown, other, or absent
  misc_difference 46: note = a, c, g, u, unknown, other, or absent
  misc_difference 47: note = a, c, g, u, unknown, other, or absent
  misc_difference 48: note = a, c, g, u, unknown, other, or absent
  misc_difference 49: note = a, c, g, u, unknown, other, or absent
  misc_difference 50: note = a, c, g, u, unknown, other, or absent
  misc_difference 51: note = a, c, g, u, unknown, other, or absent
  misc_difference 52: note = a, c, g, u, unknown, other, or absent
  misc_difference 53: note = a, c, g, u, unknown, other, or absent
  misc_difference 54: note = a, c, g, u, unknown, other, or absent
  misc_difference 55: note = a, c, g, u, unknown, other, or absent
  misc_difference 56: note = a, c, g, u, unknown, other, or absent
  misc_difference 57: note = a, c, g, u, unknown, other, or absent
  misc_difference 58: note = a, c, g, u, unknown, other, or absent
  misc_difference 59: note = a, c, g, u, unknown, other, or absent
  misc_difference 60: note = a, c, g, u, unknown, other, or absent
  misc_difference 61: note = a, c, g, u, unknown, other, or absent
  misc_difference 62: note = a, c, g, u, unknown, other, or absent
  misc_difference 63: note = a, c, g, u, unknown, other, or absent
  misc_difference 64: note = a, c, g, u, unknown, other, or absent
  misc_difference 65: note = a, c, g, u, unknown, other, or absent
  misc_difference 66: note = a, c, g, u, unknown, other, or absent
  misc_difference 67: note = a, c, g, u, unknown, other, or absent
  misc_difference 68: note = a, c, g, u, unknown, other, or absent
  misc_difference 69: note = a, c, g, u, unknown, other, or absent
  misc_difference 70: note = a, c, g, u, unknown, other, or absent
  misc_difference 71: note = a, c, g, u, unknown, other, or absent
  misc_difference 72: note = a, c, g, u, unknown, other, or absent
  misc_difference 73: note = a, c, g, u, unknown, other, or absent
  misc_difference 74: note = a, c, g, u, unknown, other, or absent
  misc_difference 75: note = a, c, g, u, unknown, other, or absent
  misc_difference 76: note = a, c, g, u, unknown, other, or absent
  misc_difference 77: note = a, c, g, u, unknown, other, or absent
  misc_difference 78: note = a, c, g, u, unknown, other, or absent
  misc_difference 79: note = a, c, g, u, unknown, other, or absent
  misc_difference 80: note = a, c, g, u, unknown, other, or absent
  misc_difference 81: note = a, c, g, u, unknown, other, or absent
  misc_difference 82: note = a, c, g, u, unknown, other, or absent
  misc_difference 83: note = a, c, g, u, unknown, other, or absent
  misc_difference 84: note = a, c, g, u, unknown, other, or absent
  misc_difference 85: note = a, c, g, u, unknown, other, or absent
  misc_difference 86: note = a, c, g, u, unknown, other, or absent
  misc_difference 87: note = a, c, g, u, unknown, other, or absent
  misc_difference 88: note = a, c, g, u, unknown, other, or absent
  misc_difference 89: note = a, c, g, u, unknown, other, or absent
  misc_difference 90: note = a, c, g, u, unknown, other, or absent
  misc_difference 91: note = a, c, g, u, unknown, other, or absent
  misc_difference 92: note = a, c, g, u, unknown, other, or absent
  misc_difference 93: note = a, c, g, u, unknown, other, or absent
  misc_difference 94: note = a, c, g, u, unknown, other, or absent
  misc_difference 95: note = a, c, g, u, unknown, other, or absent
  misc_difference 96: note = a, c, g, u, unknown, other, or absent
  misc_difference 97: note = a, c, g, u, unknown, other, or absent
  misc_difference 98: note = a, c, g, u, unknown, other, or absent
  misc_difference 99: note = a, c, g, u, unknown, other, or absent
  misc_difference 100: note = a, c, g, u, unknown, other, or absent
  misc_difference 101: note = a, c, g, u, unknown, other, or absent
  misc_difference 102: note = a, c, g, u, unknown, other, or absent
  misc_difference 103: note = a, c, g, u, unknown, other, or absent
  misc_difference 104: note = a, c, g, u, unknown, other, or absent
  misc_difference 105: note = a, c, g, u, unknown, other, or absent
  misc_difference 106: note = a, c, g, u, unknown, other, or absent
  misc_difference 107: note = a, c, g, u, unknown, other, or absent
  misc_difference 108: note = a, c, g, u, unknown, other, or absent
  misc_difference 109: note = a, c, g, u, unknown, other, or absent
  misc_difference 110: note = a, c, g, u, unknown, other, or absent
  misc_difference 111: note = a, c, g, u, unknown, other, or absent
  misc_difference 112: note = a, c, g, u, unknown, other, or absent
  misc_difference 113: note = a, c, g, u, unknown, other, or absent
  misc_difference 114: note = a, c, g, u, unknown, other, or absent
  misc_difference 115: note = a, c, g, u, unknown, other, or absent
  misc_difference 116: note = a, c, g, u, unknown, other, or absent
  misc_difference 117: note = a, c, g, u, unknown, other, or absent
  misc_difference 118: note = a, c, g, u, unknown, other, or absent
  misc_difference 119: note = a, c, g, u, unknown, other, or absent
  misc_difference 120: note = a, c, g, u, unknown, other, or absent
  misc_difference 121: note = a, c, g, u, unknown, other, or absent
  misc_difference 122: note = a, c, g, u, unknown, other, or absent
  misc_difference 123: note = a, c, g, u, unknown, other, or absent
  misc_difference 124: note = a, c, g, u, unknown, other, or absent
  misc_difference 125: note = a, c, g, u, unknown, other, or absent
  misc_difference 126: note = a, c, g, u, unknown, other, or absent
  misc_difference 127: note = a, c, g, u, unknown, other, or absent
  misc_difference 128: note = a, c, g, u, unknown, other, or absent
  misc_difference 129: note = a, c, g, u, unknown, other, or absent
  misc_difference 130: note = a, c, g, u, unknown, other, or absent
  misc_difference 131: note = a, c, g, u, unknown, other, or absent
  misc_difference 132: note = a, c, g, u, unknown, other, or absent
  misc_difference 133: note = a, c, g, u, unknown, other, or absent
  misc_difference 134: note = a, c, g, u, unknown, other, or absent
  misc_difference 135: note = a, c, g, u, unknown, other, or absent
  misc_difference 136: note = a, c, g, u, unknown, other, or absent
  misc_difference 137: note = a, c, g, u, unknown, other, or absent
  misc_difference 138: note = a, c, g, u, unknown, other, or absent
  misc_difference 139: note = a, c, g, u, unknown, other, or absent
  misc_difference 140: note = a, c, g, u, unknown, other, or absent
  misc_difference 141: note = a, c, g, u, unknown, other, or absent
  misc_difference 142: note = a, c, g, u, unknown, other, or absent
  misc_difference 143: note = a, c, g, u, unknown, other, or absent
  misc_difference 144: note = a, c, g, u, unknown, other, or absent
  misc_difference 145: note = a, c, g, u, unknown, other, or absent
  misc_difference 146: note = a, c, g, u, unknown, other, or absent
  misc_difference 147: note = a, c, g, u, unknown, other, or absent
  misc_difference 148: note = a, c, g, u, unknown, other, or absent
  misc_difference 149: note = a, c, g, u, unknown, other, or absent
  misc_difference 150: note = a, c, g, u, unknown, other, or absent
  misc_difference 151: note = a, c, g, u, unknown, other, or absent
  misc_difference 152: note = a, c, g, u, unknown, other, or absent
  misc_difference 153: note = a, c, g, u, unknown, other, or absent
  misc_difference 154: note = a, c, g, u, unknown, other, or absent
  misc_difference 155: note = a, c, g, u, unknown, other, or absent
  misc_difference 156: note = a, c, g, u, unknown, other, or absent
  misc_difference 157: note = a, c, g, u, unknown, other, or absent
  misc_difference 158: note = a, c, g, u, unknown, other, or absent
  misc_difference 159: note = a, c, g, u, unknown, other, or absent
  misc_difference 160: note = a, c, g, u, unknown, other, or absent
  misc_difference 161: note = a, c, g, u, unknown, other, or absent
  misc_difference 162: note = a, c, g, u, unknown, other, or absent
  misc_difference 163: note = a, c, g, u, unknown, other, or absent
  misc_difference 164: note = a, c, g, u, unknown, other, or absent
  misc_difference 165: note = a, c, g, u, unknown, other, or absent
  misc_difference 166: note = a, c, g, u, unknown, other, or absent
  misc_difference 167: note = a, c, g, u, unknown, other, or absent
  misc_difference 168: note = a, c, g, u, unknown, other, or absent
  misc_difference 169: note = a, c, g, u, unknown, other, or absent
  misc_difference 170: note = a, c, g, u, unknown, other, or absent
  misc_difference 171: note = a, c, g, u, unknown, other, or absent
  misc_difference 172: note = a, c, g, u, unknown, other, or absent
  misc_difference 173: note = a, c, g, u, unknown, other, or absent
  misc_difference 174: note = a, c, g, u, unknown, other, or absent
  misc_difference 175: note = a, c, g, u, unknown, other, or absent
  misc_difference 176: note = a, c, g, u, unknown, other, or absent
  misc_difference 177: note = a, c, g, u, unknown, other, or absent
  misc_difference 178: note = a, c, g, u, unknown, other, or absent
  misc_difference 179: note = a, c, g, u, unknown, other, or absent
  misc_difference 180: note = a, c, g, u, unknown, other, or absent
  misc_difference 181: note = a, c, g, u, unknown, other, or absent
  misc_difference 182: note = a, c, g, u, unknown, other, or absent
  misc_difference 183: note = a, c, g, u, unknown, other, or absent
  misc_difference 184: note = a, c, g, u, unknown, other, or absent
  misc_difference 185: note = a, c, g, u, unknown, other, or absent
  misc_difference 186: note = a, c, g, u, unknown, other, or absent
  misc_difference 187: note = a, c, g, u, unknown, other, or absent
  misc_difference 188: note = a, c, g, u, unknown, other, or absent
  misc_difference 189: note = a, c, g, u, unknown, other, or absent
  misc_difference 190: note = a, c, g, u, unknown, other, or absent
  misc_difference 191: note = a, c, g, u, unknown, other, or absent
  misc_difference 192: note = a, c, g, u, unknown, other, or absent
  misc_difference 193: note = a, c, g, u, unknown, other, or absent
  misc_difference 194: note = a, c, g, u, unknown, other, or absent
  misc_difference 195: note = a, c, g, u, unknown, other, or absent
  misc_difference 196: note = a, c, g, u, unknown, other, or absent
  misc_difference 197: note = a, c, g, u, unknown, other, or absent
  misc_difference 198: note = a, c, g, u, unknown, other, or absent
  misc_difference 199: note = a, c, g, u, unknown, other, or absent
  misc_difference 200: note = a, c, g, u, unknown, other, or absent
  misc_difference 201: note = a, c, g, u, unknown, other, or absent
  misc_difference 202: note = a, c, g, u, unknown, other, or absent
  misc_difference 203: note = a, c, g, u, unknown, other, or absent
  misc_difference 204: note = a, c, g, u, unknown, other, or absent
  misc_difference 205: note = a, c, g, u, unknown, other, or absent
  misc_difference 206: note = a, c, g, u, unknown, other, or absent
  misc_difference 207: note = a, c, g, u, unknown, other, or absent
  misc_difference 208: note = a, c, g, u, unknown, other, or absent
  misc_difference 209: note = a, c, g, u, unknown, other, or absent
  misc_difference 210: note = a, c, g, u, unknown, other, or absent
  misc_difference 211: note = a, c, g, u, unknown, other, or absent
  misc_difference 212: note = a, c, g, u, unknown, other, or absent
  misc_difference 213: note = a, c, g, u, unknown, other, or absent
  misc_difference 214: note = a, c, g, u, unknown, other, or absent
  misc_difference 215: note = a, c, g, u, unknown, other, or absent
  misc_difference 216: note = a, c, g, u, unknown, other, or absent
  misc_difference 217: note = a, c, g, u, unknown, other, or absent
  misc_difference 218: note = a, c, g, u, unknown, other, or absent
  misc_difference 219: note = a, c, g, u, unknown, other, or absent
  misc_difference 220: note = a, c, g, u, unknown, other, or absent
  misc_difference 221: note = a, c, g, u, unknown, other, or absent
  misc_difference 222: note = a, c, g, u, unknown, other, or absent
  misc_difference 223: note = a, c, g, u, unknown, other, or absent
  misc_difference 224: note = a, c, g, u, unknown, other, or absent
  misc_difference 225: note = a, c, g, u, unknown, other, or absent
  misc_difference 226: note = a, c, g, u, unknown, other, or absent
  misc_difference 227: note = a, c, g, u, unknown, other, or absent
  misc_difference 228: note = a, c, g, u, unknown, other, or absent
  misc_difference 229: note = a, c, g, u, unknown, other, or absent
  misc_difference 230: note = a, c, g, u, unknown, other, or absent
  misc_difference 231: note = a, c, g, u, unknown, other, or absent
  misc_difference 232: note = a, c, g, u, unknown, other, or absent
  misc_difference 233: note = a, c, g, u, unknown, other, or absent
  misc_difference 234: note = a, c, g, u, unknown, other, or absent
  misc_difference 235: note = a, c, g, u, unknown, other, or absent
  misc_difference 236: note = a, c, g, u, unknown, other, or absent
  misc_difference 237: note = a, c, g, u, unknown, other, or absent
  misc_difference 238: note = a, c, g, u, unknown, other, or absent
  misc_difference 239: note = a, c, g, u, unknown, other, or absent
  misc_difference 240: note = a, c, g, u, unknown, other, or absent
  misc_difference 241: note = a, c, g, u, unknown, other, or absent
  misc_difference 242: note = a, c, g, u, unknown, other, or absent
  misc_difference 243: note = a, c, g, u, unknown, other, or absent
  misc_difference 244: note = a, c, g, u, unknown, other, or absent
  misc_difference 245: note = a, c, g, u, unknown, other, or absent
  misc_difference 246: note = a, c, g, u, unknown, other, or absent
  misc_difference 247: note = a, c, g, u, unknown, other, or absent
  misc_difference 248: note = a, c, g, u, unknown, other, or absent
  misc_difference 249: note = a, c, g, u, unknown, other, or absent
  misc_difference 250: note = a, c, g, u, unknown, other, or absent
  misc_difference 251: note = a, c, g, u, unknown, other, or absent
  misc_difference 252: note = a, c, g, u, unknown, other, or absent
  misc_difference 253: note = a, c, g, u, unknown, other, or absent
  misc_difference 254: note = a, c, g, u, unknown, other, or absent
  misc_difference 255: note = a, c, g, u, unknown, other, or absent
  misc_difference 256: note = a, c, g, u, unknown, other, or absent
  misc_difference 257: note = a, c, g, u, unknown, other, or absent
  misc_difference 258: note = a, c, g, u, unknown, other, or absent
  misc_difference 259: note = a, c, g, u, unknown, other, or absent
  misc_difference 260: note = a, c, g, u, unknown, other, or absent
  misc_difference 261: note = a, c, g, u, unknown, other, or absent
  misc_difference 262: note = a, c, g, u, unknown, other, or absent
  misc_difference 263: note = a, c, g, u, unknown, other, or absent
  misc_difference 264: note = a, c, g, u, unknown, other, or absent
  misc_difference 265: note = a, c, g, u, unknown, other, or absent
  misc_difference 266: note = a, c, g, u, unknown, other, or absent
  misc_difference 267: note = a, c, g, u, unknown, other, or absent
  misc_difference 268: note = a, c, g, u, unknown, other, or absent
  misc_difference 269: note = a, c, g, u, unknown, other, or absent
  misc_difference 270: note = a, c, g, u, unknown, other, or absent
  misc_difference 271: note = a, c, g, u, unknown, other, or absent
  misc_difference 272: note = a, c, g, u, unknown, other, or absent
  misc_difference 273: note = a, c, g, u, unknown, other, or absent
  misc_difference 274: note = a, c, g, u, unknown, other, or absent
  misc_difference 275: note = a, c, g, u, unknown, other, or absent
  misc_difference 276: note = a, c, g, u, unknown, other, or absent
  misc_difference 277: note = a, c, g, u, unknown, other, or absent
  misc_difference 278: note = a, c, g, u, unknown, other, or absent
  misc_difference 279: note = a, c, g, u, unknown, other, or absent
  misc_difference 280: note = a, c, g, u, unknown, other, or absent
  misc_difference 281: note = a, c, g, u, unknown, other, or absent
  misc_difference 282: note = a, c, g, u, unknown, other, or absent
  misc_difference 283: note = a, c, g, u, unknown, other, or absent
  misc_difference 284: note = a, c, g, u, unknown, other, or absent
  misc_difference 285: note = a, c, g, u, unknown, other, or absent
  misc_difference 286: note = a, c, g, u, unknown, other, or absent
  misc_difference 287: note = a, c, g, u, unknown, other, or absent
  misc_difference 288: note = a, c, g, u, unknown, other, or absent
  misc_difference 289: note = a, c, g, u, unknown, other, or absent
  misc_difference 290: note = a, c, g, u, unknown, other, or absent
  misc_difference 291: note = a, c, g, u, unknown, other, or absent
  misc_difference 292: note = a, c, g, u, unknown, other, or absent
  misc_difference 293: note = a, c, g, u, unknown, other, or absent
  misc_difference 294: note = a, c, g, u, unknown, other, or absent
  misc_difference 295: note = a, c, g, u, unknown, other, or absent
  misc_difference 296: note = a, c, g, u, unknown, other, or absent
  misc_difference 297: note = a, c, g, u, unknown, other, or absent
  misc_difference 298: note = a, c, g, u, unknown, other, or absent
  misc_difference 299: note = a, c, g, u, unknown, other, or absent
  misc_difference 300: note = a, c, g, u, unknown, other, or absent
  misc_difference 301: note = a, c, g, u, unknown, other, or absent
  misc_difference 302: note = a, c, g, u, unknown, other, or absent
  misc_difference 303: note = a, c, g, u, unknown, other, or absent
  misc_difference 304: note = a, c, g, u, unknown, other, or absent
  misc_difference 305: note = a, c, g, u, unknown, other, or absent
  misc_difference 306: note = a, c, g, u, unknown, other, or absent
  misc_difference 307: note = a, c, g, u, unknown, other, or absent
  misc_difference 308: note = a, c, g, u, unknown, other, or absent
  misc_difference 309: note = a, c, g, u, unknown, other, or absent
  misc_difference 310: note = a, c, g, u, unknown, other, or absent
  misc_difference 311: note = a, c, g, u, unknown, other, or absent
  misc_difference 312: note = a, c, g, u, unknown, other, or absent
  misc_difference 313: note = a, c, g, u, unknown, other, or absent
  misc_difference 314: note = a, c, g, u, unknown, other, or absent
  misc_difference 315: note = a, c, g, u, unknown, other, or absent
  misc_difference 316: note = May be absent
  misc_difference 317: note = a, c, g, u, unknown, other, or absent
  misc_difference 318: note = a, c, g, u, unknown, other, or absent
  misc_difference 319: note = May be absent
  misc_difference 320: note = May be absent
  misc_difference 321: note = May be absent
  misc_difference 322: note = May be absent
  misc_difference 323: note = May be absent
  misc_difference 324: note = May be absent
  misc_difference 325: note = May be absent
  misc_difference 326: note = May be absent
  misc_difference 327: note = May be absent
  misc_difference 328: note = May be absent
  misc_difference 329: note = May be absent
  misc_difference 330: note = a, c, g, u, unknown, other, or absent
  misc_difference 331: note = May be absent
  misc_difference 332: note = May be absent
  misc_difference 333: note = May be absent
  misc_difference 334: note = May be absent
  misc_difference 335: note = May be absent
  misc_difference 336: note = May be absent
  misc_difference 337: note = May be absent
  misc_difference 338: note = May be absent
  misc_difference 339: note = May be absent
  misc_difference 340: note = May be absent
  misc_difference 45..316: note = This region may encompass 1-271 nucleotides
kbkbsydtrgydbrbhtgktyadhryvyhhdyythacahkhddrnnnnnnnnnnnnnnnnnnnnnnnnnnnnnnnnnnnnnnnnnnnnnnnnnnnnnnnnnnnnnnnnnnnnnnnnnnnnnnnnnnnnnnnnnnnnnnnnnnnnnnnnnnnnnnnnnnnnnnnnnnnnnnnnnnnnnnnnnnnnnnnnnnnnnnnnnnnnnnnnnnnnnnnnnnnnnnnnnnnnnnnnnnnnnnnnnnnnnnnnnnnnnnnnnnnnnnnnnnnnnnnnnnnnnnnnnnnnnnnnnnnnnnnnnnnnnnnnnnnnnnnnnnnnnnnbnngrdtbradhyyndvhrsdwvya

SEQ ID NO: 622-624 - skipped (3 entries)

SEQ ID NO: 625 - RNA, 76 nt, synthetic construct
  source 1..76: mol_type = other RNA
  modified_base 70: mod_base = OTHER; note = 2'-fluoroguanosine
ggctccgtggcgcaatggatagcgcattggacttcaaattcaaaggttccgggttcgagtcccggcggagtcgcca

SEQ ID NO: 626 - RNA, 76 nt, synthetic construct; identical to SEQ ID NO: 625
  source 1..76: mol_type = other RNA
  modified_base 71: mod_base = OTHER; note = 2'-fluorouridine

SEQ ID NO: 627 - RNA, 76 nt, synthetic construct; identical to SEQ ID NO: 625
  source 1..76: mol_type = other RNA
  modified_base 72: mod_base = OTHER; note = 2'-fluorocytosine

SEQ ID NO: 628 - skipped

SEQ ID NO: 629 - RNA, 76 nt, synthetic construct; identical to SEQ ID NO: 625
  source 1..76: mol_type = other RNA
  modified_base 73: mod_base = OTHER; note = 2'-fluoroguanosine

SEQ ID NO: 630 - RNA, 76 nt, synthetic construct; identical to SEQ ID NO: 625
  source 1..76: mol_type = other RNA
  modified_base 74: mod_base = OTHER; note = 2'-fluorocytosine

SEQ ID NO: 631 - RNA, 76 nt, synthetic construct; identical to SEQ ID NO: 625
  source 1..76: mol_type = other RNA
  modified_base 75: mod_base = OTHER; note = 2'-fluorocytosine

SEQ ID NO: 632 - RNA, 76 nt, synthetic construct; identical to SEQ ID NO: 625
  source 1..76: mol_type = other RNA
  modified_base 76: mod_base = OTHER; note = 2'-fluoroadenosine

SEQ ID NO: 633 - RNA, 76 nt, synthetic construct; identical to SEQ ID NO: 625
  source 1..76: mol_type = other RNA
  modified_base 19: mod_base = OTHER; note = 2'-fluoroadenosine phosphorothiorate

SEQ ID NO: 634 - RNA, 76 nt, synthetic construct; identical to SEQ ID NO: 625
  source 1..76: mol_type = other RNA
  modified_base 42: mod_base = OTHER; note = 2'-fluoroadenosine phosphorothiorate

SEQ ID NO: 635 - RNA, 76 nt, synthetic construct; identical to SEQ ID NO: 625
  source 1..76: mol_type = other RNA
  modified_base 58: mod_base = OTHER; note = 2'-fluoroadenosine phosphorothiorate

SEQ ID NO: 636 - RNA, 76 nt, synthetic construct; identical to SEQ ID NO: 625
  source 1..76: mol_type = other RNA
  modified_base 1: mod_base = OTHER; note = 2'-Omethylguanosine
  modified_base 13: mod_base = OTHER; note = 2'-Omethylcytosine

SEQ ID NO: 637 - RNA, 76 nt, synthetic construct; identical to SEQ ID NO: 625
  source 1..76: mol_type = other RNA
  modified_base 1: mod_base = OTHER; note = 2'-Omethylguanosine
  modified_base 16: mod_base = OTHER; note = 2'-Omethyluridine

SEQ ID NO: 638 - RNA, 76 nt, synthetic construct; identical to SEQ ID NO: 625
  source 1..76: mol_type = other RNA
  modified_base 1: mod_base = OTHER; note = 2'-Omethylguanosine
  modified_base 17: mod_base = OTHER; note = 2'-Omethylguanosine

SEQ ID NO: 639 - RNA, 76 nt, synthetic construct; identical to SEQ ID NO: 625
  source 1..76: mol_type = other RNA
  modified_base 1: mod_base = OTHER; note = 2'-Omethylguanosine
  modified_base 18: mod_base = OTHER; note = 2'-Omethylguanosine

SEQ ID NO: 640 - RNA, 76 nt, synthetic construct; identical to SEQ ID NO: 625
  source 1..76: mol_type = other RNA
  modified_base 1: mod_base = OTHER; note = 2'-Omethylguanosine
  modified_base 43: mod_base = OTHER; note = 2'-Omethyladenosine

SEQ ID NO: 641 - RNA, 76 nt, synthetic construct; identical to SEQ ID NO: 625
  source 1..76: mol_type = other RNA
  modified_base 1: mod_base = OTHER; note = 2'-Omethylguanosine
  modified_base 49: mod_base = OTHER; note = 2'-Omethylcytosine

SEQ ID NO: 642 - RNA, 76 nt, synthetic construct; identical to SEQ ID NO: 625
  source 1..76: mol_type = other RNA
  modified_base 1: mod_base = OTHER; note = 2'-Omethylguanosine
  modified_base 50: mod_base = OTHER; note = 2'-Omethylcytosine

SEQ ID NO: 643 - RNA, 76 nt, synthetic construct; identical to SEQ ID NO: 625
  source 1..76: mol_type = other RNA
  modified_base 1: mod_base = OTHER; note = 2'-Omethylguanosine
  modified_base 52: mod_base = OTHER; note = 2'-Omethylguanosine

SEQ ID NO: 644 - RNA, 76 nt, synthetic construct; identical to SEQ ID NO: 625
  source 1..76: mol_type = other RNA
  modified_base 1: mod_base = OTHER; note = 2'-Omethylguanosine
  modified_base 65: mod_base = OTHER; note = 2'-Omethylguanosine

SEQ ID NO: 645 - RNA, 76 nt, synthetic construct; identical to SEQ ID NO: 625
  source 1..76: mol_type = other RNA
  modified_base 1: mod_base = OTHER; note = 2'-Omethylguanosine
  modified_base 73: mod_base = OTHER; note = 2'-Omethylguanosine

SEQ ID NO: 646 - RNA, 76 nt, synthetic construct; identical to SEQ ID NO: 625
  source 1..76: mol_type = other RNA
  modified_base 13: mod_base = OTHER; note = 2'-Omethylcytosine
  modified_base 16: mod_base = OTHER; note = 2'-Omethyluridine

SEQ ID NO: 647 - RNA, 76 nt, synthetic construct; identical to SEQ ID NO: 625
  source 1..76: mol_type = other RNA
  modified_base 13: mod_base = OTHER; note = 2'-Omethylcytosine
  modified_base 17: mod_base = OTHER; note = 2'-Omethylguanosine

SEQ ID NO: 648 - RNA, 76 nt, synthetic construct; identical to SEQ ID NO: 625
  source 1..76: mol_type = other RNA
  modified_base 13: mod_base = OTHER; note = 2'-Omethylcytosine
  modified_base 18: mod_base = OTHER; note = 2'-Omethylguanosine

SEQ ID NO: 649 - RNA, 76 nt, synthetic construct; identical to SEQ ID NO: 625
  source 1..76: mol_type = other RNA
  modified_base 13: mod_base = OTHER; note = 2'-Omethylcytosine
  modified_base 43: mod_base = OTHER; note = 2'-Omethyladenosine

SEQ ID NO: 650 - RNA, 76 nt, synthetic construct; identical to SEQ ID NO: 625
  source 1..76: mol_type = other RNA
  modified_base 1: mod_base = OTHER; note = 2'-Omethylguanosine
  modified_base 52: mod_base = OTHER; note = 2'-Omethylguanosine
  modified_base 73: mod_base = OTHER; note = 2'-Omethylguanosine

SEQ ID NO: 651 - RNA, 76 nt, synthetic construct; identical to SEQ ID NO: 625
  source 1..76: mol_type = other RNA
  modified_base 13: mod_base = OTHER; note = 2'-Omethylcytosine
  modified_base 49: mod_base = OTHER; note = 2'-Omethylcytosine

SEQ ID NO: 652 - RNA, 76 nt, synthetic construct; identical to SEQ ID NO: 625
  source 1..76: mol_type = other RNA
  modified_base 13: mod_base = OTHER; note = 2'-Omethylcytosine
  modified_base 50: mod_base = OTHER; note = 2'-Omethylcytosine

SEQ ID NO: 653 - RNA, 76 nt, synthetic construct; identical to SEQ ID NO: 625
  source 1..76: mol_type = other RNA
  modified_base 13: mod_base = OTHER; note = 2'-Omethylcytosine
  modified_base 52: mod_base = OTHER; note = 2'-Omethylguanosine

SEQ ID NO: 654 - RNA, 76 nt, synthetic construct; identical to SEQ ID NO: 625
  source 1..76: mol_type = other RNA
  modified_base 13: mod_base = OTHER; note = 2'-Omethylcytosine
  modified_base 65: mod_base = OTHER; note = 2'-Omethylguanosine

SEQ ID NO: 655 - RNA, 76 nt, synthetic construct; identical to SEQ ID NO: 625
  source 1..76: mol_type = other RNA
  modified_base 13: mod_base = OTHER; note = 2'-Omethylcytosine
  modified_base 73: mod_base = OTHER; note = 2'-Omethylguanosine

SEQ ID NO: 656 - RNA, 76 nt, synthetic construct; identical to SEQ ID NO: 625
  source 1..76: mol_type = other RNA
  modified_base 16: mod_base = OTHER; note = 2'-Omethyluridine
  modified_base 17: mod_base = OTHER; note = 2'-Omethylguanosine

SEQ ID NO: 657 - RNA, 76 nt, synthetic construct; identical to SEQ ID NO: 625
  source 1..76: mol_type = other RNA
  modified_base 16: mod_base = OTHER; note = 2'-Omethyluridine
  modified_base 18: mod_base = OTHER; note = 2'-Omethylguanosine

SEQ ID NO: 658 - RNA, 76 nt, synthetic construct; identical to SEQ ID NO: 625
  source 1..76: mol_type = other RNA
  modified_base 16: mod_base = OTHER; note = 2'-Omethyluridine
  modified_base 43: mod_base = OTHER; note = 2'-Omethyladenosine

SEQ ID NO: 659 - RNA, 76 nt, synthetic construct; identical to SEQ ID NO: 625
  source 1..76: mol_type = other RNA
  modified_base 16: mod_base = OTHER; note = 2'-Omethyluridine
  modified_base 49: mod_base = OTHER; note = 2'-Omethylcytosine

SEQ ID NO: 660 - RNA, 76 nt, synthetic construct; identical to SEQ ID NO: 625
  source 1..76: mol_type = other RNA
  modified_base 16: mod_base = OTHER; note = 2'-Omethyluridine
  modified_base 50: mod_base = OTHER; note = 2'-Omethylcytosine

SEQ ID NO: 661 - RNA, 76 nt, synthetic construct; identical to SEQ ID NO: 625
  source 1..76: mol_type = other RNA
  modified_base 16: mod_base = OTHER; note = 2'-Omethyluridine
  modified_base 52: mod_base = OTHER; note = 2'-Omethylguanosine

SEQ ID NO: 662 - RNA, 76 nt, synthetic construct; identical to SEQ ID NO: 625
  source 1..76: mol_type = other RNA
  modified_base 16: mod_base = OTHER; note = 2'-Omethyluridine
  modified_base 65: mod_base = OTHER; note = 2'-Omethylguanosine

SEQ ID NO: 663 - RNA, 76 nt, synthetic construct; identical to SEQ ID NO: 625
  source 1..76: mol_type = other RNA
  modified_base 16: mod_base = OTHER; note = 2'-Omethyluridine
  modified_base 73: mod_base = OTHER; note = 2'-Omethylguanosine

SEQ ID NO: 664 - RNA, 76 nt, synthetic construct; identical to SEQ ID NO: 625
  source 1..76: mol_type = other RNA
  modified_base 17: mod_base = OTHER; note = 2'-Omethylguanosine
  modified_base 18: mod_base = OTHER; note = 2'-Omethylguanosine

SEQ ID NO: 665 - RNA, 76 nt, synthetic construct; identical to SEQ ID NO: 625
  source 1..76: mol_type = other RNA
  modified_base 17: mod_base = OTHER; note = 2'-Omethylguanosine
  modified_base 43: mod_base = OTHER; note = 2'-Omethyladenosine

SEQ ID NO: 666 - RNA, 76 nt, synthetic construct; identical to SEQ ID NO: 625
  source 1..76: mol_type = other RNA
  modified_base 17: mod_base = OTHER; note = 2'-Omethylguanosine
  modified_base 49: mod_base = OTHER; note = 2'-Omethylcytosine

SEQ ID NO: 667 - RNA, 76 nt, synthetic construct; identical to SEQ ID NO: 625
  source 1..76: mol_type = other RNA
  modified_base 17: mod_base = OTHER; note = 2'-Omethylguanosine
  modified_base 50: mod_base = OTHER; note = 2'-Omethylcytosine

SEQ ID NO: 668 - RNA, 76 nt, synthetic construct; identical to SEQ ID NO: 625
  source 1..76: mol_type = other RNA
  modified_base 1: mod_base = OTHER; note = 2'-Omethylguanosine
  modified_base 50: mod_base = OTHER; note = 2'-Omethylcytosine
  modified_base 52: mod_base = OTHER; note = 2'-Omethylguanosine
  modified_base 73: mod_base = OTHER; note = 2'-Omethylguanosine

SEQ ID NO: 669 - RNA, 76 nt, synthetic construct; identical to SEQ ID NO: 625
  source 1..76: mol_type = other RNA
  modified_base 17: mod_base = OTHER; note = 2'-Omethylguanosine
  modified_base 52: mod_base = OTHER; note = 2'-Omethylguanosine

SEQ ID NO: 670 - RNA, 76 nt, synthetic construct; identical to SEQ ID NO: 625
  source 1..76: mol_type = other RNA
  modified_base 17: mod_base = OTHER; note = 2'-Omethylguanosine
  modified_base 65: mod_base = OTHER; note = 2'-Omethylguanosine

SEQ ID NO: 671 - RNA, 76 nt, synthetic construct; identical to SEQ ID NO: 625
  source 1..76: mol_type = other RNA
  modified_base 17: mod_base = OTHER; note = 2'-Omethylguanosine
  modified_base 73: mod_base = OTHER; note = 2'-Omethylguanosine

SEQ ID NO: 672 - RNA, 76 nt, synthetic construct; identical to SEQ ID NO: 625
  source 1..76: mol_type = other RNA
  modified_base 18: mod_base = OTHER; note = 2'-Omethylguanosine
  modified_base 43: mod_base = OTHER; note = 2'-Omethyladenosine

SEQ ID NO: 673 - RNA, 76 nt, synthetic construct; identical to SEQ ID NO: 625
  source 1..76: mol_type = other RNA
  modified_base 18: mod_base = OTHER; note = 2'-Omethylguanosine
  modified_base 49: mod_base = OTHER; note = 2'-Omethylcytosine

SEQ ID NO: 674 - RNA, 76 nt, synthetic construct; identical to SEQ ID NO: 625
  source 1..76: mol_type = other RNA
  modified_base 18: mod_base = OTHER; note = 2'-Omethylguanosine
  modified_base 50: mod_base = OTHER; note = 2'-Omethylcytosine

SEQ ID NO: 675 - RNA, 76 nt, synthetic construct; identical to SEQ ID NO: 625
  source 1..76: mol_type = other RNA
  modified_base 18: mod_base = OTHER; note = 2'-Omethylguanosine
  modified_base 52: mod_base = OTHER; note = 2'-Omethylguanosine

SEQ ID NO: 676 - RNA, 76 nt, synthetic construct; identical to SEQ ID NO: 625
  source 1..76: mol_type = other RNA
  modified_base 18: mod_base = OTHER; note = 2'-Omethylguanosine
  modified_base 65: mod_base = OTHER; note = 2'-Omethylguanosine

SEQ ID NO: 677 - RNA, 76 nt, synthetic construct; identical to SEQ ID NO: 625
  source 1..76: mol_type = other RNA
  modified_base 18: mod_base = OTHER; note = 2'-Omethylguanosine
  modified_base 73: mod_base = OTHER; note = 2'-Omethylguanosine

SEQ ID NO: 678 - RNA, 76 nt, synthetic construct; identical to SEQ ID NO: 625
  source 1..76: mol_type = other RNA
  modified_base 43: mod_base = OTHER; note = 2'-Omethyladenosine
  modified_base 49: mod_base = OTHER; note = 2'-Omethylcytosine

SEQ ID NO: 679 - RNA, 76 nt, synthetic construct; identical to SEQ ID NO: 625
  source 1..76: mol_type = other RNA
  modified_base 43: mod_base = OTHER; note = 2'-Omethyladenosine
  modified_base 50: mod_base = OTHER; note = 2'-Omethylcytosine

SEQ ID NO: 680 - RNA, 76 nt, synthetic construct; identical to SEQ ID NO: 625
  source 1..76: mol_type = other RNA
  modified_base 43: mod_base = OTHER; note = 2'-Omethyladenosine
  modified_base 52: mod_base = OTHER; note = 2'-Omethylguanosine

SEQ ID NO: 681 - RNA, 76 nt, synthetic construct; identical to SEQ ID NO: 625
  source 1..76: mol_type = other RNA
  modified_base 43: mod_base = OTHER; note = 2'-Omethyladenosine
  modified_base 65: mod_base = OTHER; note = 2'-Omethylguanosine

SEQ ID NO: 682 - skipped

SEQ ID NO: 683 - RNA, 76 nt, synthetic construct; identical to SEQ ID NO: 625
  source 1..76: mol_type = other RNA
  modified_base 1: mod_base = OTHER; note = 2'-Omethylguanosine
  modified_base 18: mod_base = OTHER; note = 2'-Omethylguanosine
  modified_base 50: mod_base = OTHER; note = 2'-Omethylcytosine
  modified_base 52: mod_base = OTHER; note = 2'-Omethylguanosine
  modified_base 73: mod_base = OTHER; note = 2'-Omethylguanosine

SEQ ID NO: 684 - RNA, 76 nt, synthetic construct; identical to SEQ ID NO: 625
  source 1..76: mol_type = other RNA
  modified_base 43: mod_base = OTHER; note = 2'-Omethyladenosine
  modified_base 73: mod_base = OTHER; note = 2'-Omethylguanosine

SEQ ID NO: 685 - RNA, 76 nt, synthetic construct; identical to SEQ ID NO: 625
  source 1..76: mol_type = other RNA
  modified_base 49: mod_base = OTHER; note = 2'-Omethylcytosine
  modified_base 50: mod_base = OTHER; note = 2'-Omethylcytosine

SEQ ID NO: 686 - RNA, 76 nt, synthetic construct; identical to SEQ ID NO: 625
  source 1..76: mol_type = other RNA
  modified_base 49: mod_base = OTHER; note = 2'-Omethylcytosine
  modified_base 52: mod_base = OTHER; note = 2'-Omethylguanosine

SEQ ID NO: 687 - RNA, 76 nt, synthetic construct; identical to SEQ ID NO: 625
  source 1..76: mol_type = other RNA
  modified_base 49: mod_base = OTHER; note = 2'-Omethylcytosine
  modified_base 65: mod_base = OTHER; note = 2'-Omethylguanosine

SEQ ID NO: 688 - RNA, 76 nt, synthetic construct; identical to SEQ ID NO: 625
  source 1..76: mol_type = other RNA
  modified_base 49: mod_base = OTHER; note = 2'-Omethylcytosine
  modified_base 73: mod_base = OTHER; note = 2'-Omethylguanosine

SEQ ID NO: 689 - RNA, 76 nt, synthetic construct; identical to SEQ ID NO: 625
  source 1..76: mol_type = other RNA
  modified_base 50: mod_base = OTHER; note = 2'-Omethylcytosine
  modified_base 52: mod_base = OTHER; note = 2'-Omethylguanosine

SEQ ID NO: 690 - RNA, 76 nt, synthetic construct; identical to SEQ ID NO: 625
  source 1..76: mol_type = other RNA
  modified_base 50: mod_base = OTHER; note = 2'-Omethylcytosine
  modified_base 65: mod_base = OTHER; note = 2'-Omethylguanosine

SEQ ID NO: 691 - RNA, 76 nt, synthetic construct; identical to SEQ ID NO: 625
  source 1..76: mol_type = other RNA
  modified_base 50: mod_base = OTHER; note = 2'-Omethylcytosine
  modified_base 73: mod_base = OTHER; note = 2'-Omethylguanosine

SEQ ID NO: 692 - RNA, 76 nt, synthetic construct; identical to SEQ ID NO: 625
  source 1..76: mol_type = other RNA
  modified_base 52: mod_base = OTHER; note = 2'-Omethylguanosine
  modified_base 65: mod_base = OTHER; note = 2'-Omethylguanosine

SEQ ID NO: 693 - RNA, 76 nt, synthetic construct; identical to SEQ ID NO: 625
  source 1..76: mol_type = other RNA
  modified_base 52: mod_base = OTHER; note = 2'-Omethylguanosine
  modified_base 73: mod_base = OTHER; note = 2'-Omethylguanosine

SEQ ID NO: 694 - RNA, 76 nt, synthetic construct; identical to SEQ ID NO: 625
  source 1..76: mol_type = other RNA
  modified_base 65: mod_base = OTHER; note = 2'-Omethylguanosine
  modified_base 73: mod_base = OTHER; note = 2'-Omethylguanosine

SEQ ID NO: 695 - RNA, 76 nt, synthetic construct; identical to SEQ ID NO: 625
  source 1..76: mol_type = other RNA
  modified_base 8: mod_base = OTHER; note = 2'-Omethyluridine
  modified_base 18: mod_base = OTHER; note = 2'-Omethylguanosine

SEQ ID NO: 696 - RNA, 76 nt, synthetic construct; identical to SEQ ID NO: 625
  source 1..76: mol_type = other RNA
  modified_base 8: mod_base = OTHER; note = 2'-Omethyluridine
  modified_base 21: mod_base = OTHER; note = 2'-Omethyladenosine

SEQ ID NO: 697 - RNA, 76 nt, synthetic construct; identical to SEQ ID NO: 625
  source 1..76: mol_type = other RNA
  modified_base 8: mod_base = OTHER; note = 2'-Omethyluridine
  modified_base 25: mod_base = OTHER; note = 2'-Omethylcytosine

SEQ ID NO: 698 - RNA, 76 nt, synthetic construct; identical to SEQ ID NO: 625
  source 1..76: mol_type = other RNA
  modified_base 8: mod_base = OTHER; note = 2'-Omethyluridine
  modified_base 52: mod_base = OTHER; note = 2'-Omethylguanosine

SEQ ID NO: 699-700 - skipped (2 entries)

SEQ ID NO: 701 - RNA, 76 nt, synthetic construct; identical to SEQ ID NO: 625
  source 1..76: mol_type = other RNA
  modified_base 1: mod_base = OTHER; note = 2'-Omethylguanosine
  modified_base 17: mod_base = OTHER; note = 2'-Omethylguanosine
  modified_base 18: mod_base = OTHER; note = 2'-Omethylguanosine
  modified_base 50: mod_base = OTHER; note = 2'-Omethylcytosine
  modified_base 52: mod_base = OTHER; note = 2'-Omethylguanosine
  modified_base 73: mod_base = OTHER; note = 2'-Omethylguanosine

SEQ ID NO: 702 - RNA, 76 nt, synthetic construct; identical to SEQ ID NO: 625
  source 1..76: mol_type = other RNA
  modified_base 18: mod_base = OTHER; note = 2'-Omethylguanosine
  modified_base 39: mod_base = OTHER; note = 2'-Omethyluridine

SEQ ID NO: 703 - RNA, 76 nt, synthetic construct; identical to SEQ ID NO: 625
  source 1..76: mol_type = other RNA
  modified_base 21: mod_base = OTHER; note = 2'-Omethyladenosine
  modified_base 39: mod_base = OTHER; note = 2'-Omethyluridine

SEQ ID NO: 704 - RNA, 76 nt, synthetic construct; identical to SEQ ID NO: 625
  source 1..76: mol_type = other RNA
  modified_base 25: mod_base = OTHER; note = 2'-Omethylcytosine
  modified_base 39: mod_base = OTHER; note = 2'-Omethyluridine

SEQ ID NO: 705 - RNA, 76 nt, synthetic construct; identical to SEQ ID NO: 625
  source 1..76: mol_type = other RNA
  modified_base 39: mod_base = OTHER; note = 2'-Omethyluridine
  modified_base 52: mod_base = OTHER; note = 2'-Omethylguanosine

SEQ ID NO: 706 - RNA, 76 nt, synthetic construct; identical to SEQ ID NO: 625
  source 1..76: mol_type = other RNA
  modified_base 18: mod_base = OTHER; note = 2'-Omethylguanosine
  modified_base 55: mod_base = OTHER; note = 2'-Omethyluridine

SEQ ID NO: 707 - RNA, 76 nt, synthetic construct; identical to SEQ ID NO: 625
  source 1..76: mol_type = other RNA
  modified_base 21: mod_base = OTHER; note = 2'-Omethyladenosine
  modified_base 55: mod_base = OTHER; note = 2'-Omethyluridine

SEQ ID NO: 708 - RNA, 76 nt, synthetic construct; identical to SEQ ID NO: 625
  source 1..76: mol_type = other RNA
  modified_base 25: mod_base = OTHER; note = 2'-Omethylcytosine
  modified_base 55: mod_base = OTHER; note = 2'-Omethyluridine

SEQ ID NO: 709 - RNA, 76 nt, synthetic construct; identical to SEQ ID NO: 625
  source 1..76: mol_type = other RNA
  modified_base 52: mod_base = OTHER; note = 2'-Omethylguanosine
  modified_base 55: mod_base = OTHER; note = 2'-Omethyluridine

SEQ ID NO: 710 - RNA, 76 nt, synthetic construct; identical to SEQ ID NO: 625
  source 1..76: mol_type = other RNA
  modified_base 4: mod_base = OTHER; note = 2'-Omethyluridine
  modified_base 5: mod_base = OTHER; note = 2'-Omethylcytosine

SEQ ID NO: 711 - RNA, 76 nt, synthetic construct; identical to SEQ ID NO: 625
  source 1..76: mol_type = other RNA
  modified_base 4: mod_base = OTHER; note = 2'-Omethyluridine
  modified_base 69: mod_base = OTHER; note = 2'-Omethyladenosine

SEQ ID NO: 712 - RNA, 76 nt, synthetic construct; identical to SEQ ID NO: 625
  source 1..76: mol_type = other RNA
  modified_base 5: mod_base = OTHER; note = 2'-Omethylcytosine
  modified_base 68: mod_base = OTHER; note = 2'-Omethylguanosine

SEQ ID NO: 713 - RNA, 76 nt, synthetic construct; identical to SEQ ID NO: 625
  source 1..76: mol_type = other RNA
  modified_base 68: mod_base = OTHER; note = 2'-Omethylguanosine
  modified_base 69: mod_base = OTHER; note = 2'-Omethyladenosine

SEQ ID NO: 714 - RNA, 76 nt, synthetic construct; identical to SEQ ID NO: 625
  source 1..76: mol_type = other RNA
  modified_base 62: mod_base = OTHER; note = 2'-Omethylcytosine
  modified_base 63: mod_base = OTHER; note = 2'-Omethylcytosine

SEQ ID NO: 715 - RNA, 76 nt, synthetic construct; identical to SEQ ID NO: 625
  source 1..76: mol_type = other RNA
  modified_base 51: mod_base = OTHER; note = 2'-Omethylguanosine
  modified_base 52: mod_base = OTHER; note = 2'-Omethylguanosine

SEQ ID NO: 716 - skipped

SEQ ID NO: 717 - RNA, 76 nt, synthetic construct; identical to SEQ ID NO: 625
  source 1..76: mol_type = other RNA
  modified_base 52: mod_base = OTHER; note = 2'-Omethylguanosine
  modified_base 62: mod_base = OTHER; note = 2'-Omethylcytosine

SEQ ID NO: 718-723 - skipped (6 entries)

SEQ ID NO: 724 - RNA, 76 nt, synthetic construct; identical to SEQ ID NO: 625
  source 1..76: mol_type = other RNA
  modified_base 1: mod_base = OTHER; note = 2'-O-(2-Methoxyethyl) guanosine

SEQ ID NO: 725 - RNA, 76 nt, synthetic construct; identical to SEQ ID NO: 625
  source 1..76: mol_type = other RNA
  modified_base 2: mod_base = OTHER; note = 2'-O-(2-Methoxyethyl) guanosine

SEQ ID NO: 726 - skipped

SEQ ID NO: 727 - RNA, 76 nt, synthetic construct; identical to SEQ ID NO: 625
  source 1..76: mol_type = other RNA
  modified_base 4: mod_base = OTHER; note = 2'-O-(2-Methoxyethyl) thymine

SEQ ID NO: 728-729 - skipped (2 entries)

SEQ ID NO: 730 - RNA, 76 nt, synthetic construct; identical to SEQ ID NO: 625
  source 1..76: mol_type = other RNA
  modified_base 10: mod_base = OTHER; note = 2'-O-(2-Methoxyethyl) guanosine

SEQ ID NO: 731 - skipped

SEQ ID NO: 732 - RNA, 76 nt, synthetic construct; identical to SEQ ID NO: 625
  source 1..76: mol_type = other RNA
  modified_base 12: mod_base = OTHER; note = 2'-O-(2-Methoxyethyl) guanosine

SEQ ID NO: 733 - skipped

SEQ ID NO: 734 - RNA, 76 nt, synthetic construct; identical to SEQ ID NO: 625
  source 1..76: mol_type = other RNA
  modified_base 22: mod_base = OTHER; note = 2'-O-(2-Methoxyethyl) guanosine

SEQ ID NO: 735 - skipped

SEQ ID NO: 736 - RNA, 76 nt, synthetic construct; identical to SEQ ID NO: 625
  source 1..76: mol_type = other RNA
  modified_base 24: mod_base = OTHER; note = 2'-O-(2-Methoxyethyl) guanosine

SEQ ID NO: 737 - skipped

SEQ ID NO: 738 - RNA, 76 nt, synthetic construct; identical to SEQ ID NO: 625
  source 1..76: mol_type = other RNA
  modified_base 27: mod_base = OTHER; note = 2'-O-(2-Methoxyethyl) thymine

SEQ ID NO: 739 - RNA, 76 nt, synthetic construct; identical to SEQ ID NO: 625
  source 1..76: mol_type = other RNA
  modified_base 28: mod_base = OTHER; note = 2'-O-(2-Methoxyethyl) thymine

SEQ ID NO: 740 - RNA, 76 nt, synthetic construct; identical to SEQ ID NO: 625
  source 1..76: mol_type = other RNA
  modified_base 29: mod_base = OTHER; note = 2'-O-(2-Methoxyethyl) guanosine

SEQ ID NO: 741 - RNA, 76 nt, synthetic construct; identical to SEQ ID NO: 625
  source 1..76: mol_type = other RNA
  modified_base 30: mod_base = OTHER; note = 2'-O-(2-Methoxyethyl) guanosine

SEQ ID NO: 742 - skipped

SEQ ID NO: 743 - RNA, 76 nt, synthetic construct; identical to SEQ ID NO: 625
  source 1..76: mol_type = other RNA
  modified_base 42: mod_base = OTHER; note = 2'-O-(2-Methoxyethyl) adenosine

SEQ ID NO: 744 - RNA, 76 nt, synthetic construct; identical to SEQ ID NO: 625
  source 1..76: mol_type = other RNA
  modified_base 43: mod_base = OTHER; note = 2'-O-(2-Methoxyethyl) adenosine

SEQ ID NO: 745-746 - skipped (2 entries)

SEQ ID NO: 747 - RNA, 76 nt, synthetic construct; identical to SEQ ID NO: 625
  source 1..76: mol_type = other RNA
  modified_base 51: mod_base = OTHER; note = 2'-O-(2-Methoxyethyl) guanosine

SEQ ID NO: 748 - RNA, 76 nt, synthetic construct; identical to SEQ ID NO: 625
  source 1..76: mol_type = other RNA
  modified_base 52: mod_base = OTHER; note = 2'-O-(2-Methoxyethyl) guanosine

SEQ ID NO: 749 - RNA, 76 nt, synthetic construct; identical to SEQ ID NO: 625
  source 1..76: mol_type = other RNA
  modified_base 53: mod_base = OTHER; note = 2'-O-(2-Methoxyethyl) guanosine

SEQ ID NO: 750-751 - skipped (2 entries)

SEQ ID NO: 752 - RNA, 76 nt, synthetic construct; identical to SEQ ID NO: 625
  source 1..76: mol_type = other RNA
  modified_base 64: mod_base = OTHER; note = 2'-O-(2-Methoxyethyl) guanosine

SEQ ID NO: 753 - RNA, 76 nt, synthetic construct; identical to SEQ ID NO: 625
  source 1..76: mol_type = other RNA
  modified_base 65: mod_base = OTHER; note = 2'-O-(2-Methoxyethyl) guanosine

SEQ ID NO: 754 - skipped

SEQ ID NO: 755 - RNA, 76 nt, synthetic construct; identical to SEQ ID NO: 625
  source 1..76: mol_type = other RNA
  modified_base 67: mod_base = OTHER; note = 2'-O-(2-Methoxyethyl) guanosine

SEQ ID NO: 756 - RNA, 76 nt, synthetic construct; identical to SEQ ID NO: 625
  source 1..76: mol_type = other RNA
  modified_base 68: mod_base = OTHER; note = 2'-O-(2-Methoxyethyl) guanosine

SEQ ID NO: 757 - RNA, 76 nt, synthetic construct; identical to SEQ ID NO: 625
  source 1..76: mol_type = other RNA
  modified_base 69: mod_base = OTHER; note = 2'-O-(2-Methoxyethyl) adenosine

SEQ ID NO: 758 - RNA, 76 nt, synthetic construct; identical to SEQ ID NO: 625
  source 1..76: mol_type = other RNA
  modified_base 71: mod_base = OTHER; note = 2'-O-(2-Methoxyethyl) thymine

SEQ ID NO: 759 - skipped

SEQ ID NO: 760 - RNA, 76 nt, synthetic construct; identical to SEQ ID NO: 625
  source 1..76: mol_type = other RNA
  modified_base 73: mod_base = OTHER; note = 2'-O-(2-Methoxyethyl) guanosine

SEQ ID NO: 761-762 - skipped (2 entries)

SEQ ID NO: 763 - RNA, 76 nt, synthetic construct; identical to SEQ ID NO: 625
  source 1..76: mol_type = other RNA
  modified_base 76: mod_base = OTHER; note = 2'-O-(2-Methoxyethyl) adenosine

SEQ ID NO: 764 - RNA, 76 nt, synthetic construct; identical to SEQ ID NO: 625
  source 1..76: mol_type = other RNA
  modified_base 1: mod_base = OTHER; note = 2'-O-(2-Methoxyethyl) guanosine phosphorothiorate

SEQ ID NO: 765 - RNA, 75 nt, synthetic construct
  source 1..75: mol_type = other RNA
ggctccgtggcgcaatggatagcgcattggacttcaaattcaaaggttccgggttcgagtcccggcggagtcgcc

SEQ ID NO: 766 - RNA, 74 nt, synthetic construct
  source 1..74: mol_type = other RNA
ggctccgtggcgcaatggatagcgcattggacttcaaattcaaaggttccgggttcgagtcccggcggagtcgc

SEQ ID NO: 767 - RNA, 76 nt, synthetic construct; identical to SEQ ID NO: 625
  source 1..76: mol_type = other RNA
  modified_base 1: mod_base = OTHER; note = 2'-Omethylguanosine phosphorothiorate

SEQ ID NO: 768 - RNA, 76 nt, synthetic construct; identical to SEQ ID NO: 625
  source 1..76: mol_type = other RNA
  modified_base 1: mod_base = OTHER; note = 2'-Omethylguanosine
  modified_base 2: mod_base = OTHER; note = 2'-Omethylguanosine

SEQ ID NO: 769 - RNA, 76 nt, synthetic construct; identical to SEQ ID NO: 625
  source 1..76: mol_type = other RNA
  modified_base 1: mod_base = OTHER; note = 2'-Omethylguanosine phosphorothiorate
  modified_base 2: mod_base = OTHER; note = Guanosine phosphorothiorate
  modified_base 74: mod_base = OTHER; note = Cytosine phosphorothiorate
  modified_base 75: mod_base = OTHER; note = Cytosine phosphorothiorate

SEQ ID NO: 770 - RNA, 76 nt, synthetic construct; identical to SEQ ID NO: 625
  source 1..76: mol_type = other RNA
  modified_base 1: mod_base = OTHER; note = 2'-Omethylguanosine phosphorothiorate
  modified_base 2: mod_base = OTHER; note = 2'-Omethylguanosine phosphorothiorate
  modified_base 74: mod_base = OTHER; note = Cytosine phosphorothiorate
  modified_base 75: mod_base = OTHER; note = Cytosine phosphorothiorate

SEQ ID NO: 771 - RNA, 76 nt, synthetic construct; identical to SEQ ID NO: 625
  source 1..76: mol_type = other RNA
  modified_base 1: mod_base = OTHER; note = Guanosine phosphorothiorate
  modified_base 2: mod_base = OTHER; note = Guanosine phosphorothiorate
  modified_base 74: mod_base = OTHER; note = Cytosine phosphorothiorate
  modified_base 75: mod_base = OTHER; note = Cytosine phosphorothiorate
  modified_base 76: mod_base = OTHER; note = 2'-Omethyladenosine

SEQ ID NO: 772 - RNA, 76 nt, synthetic construct; identical to SEQ ID NO: 625
  source 1..76: mol_type = other RNA
  modified_base 1: mod_base = OTHER; note = Guanosine phosphorothiorate
  modified_base 2: mod_base = OTHER; note = Guanosine phosphorothiorate
  modified_base 74: mod_base = OTHER; note = Cytosine phosphorothiorate
  modified_base 75: mod_base = OTHER; note = 2'-Omethylcytosine phosphorothiorate

SEQ ID NO: 773 - RNA, 76 nt, synthetic construct; identical to SEQ ID NO: 625
  source 1..76: mol_type = other RNA
  modified_base 1: mod_base = OTHER; note = Guanosine phosphorothiorate
  modified_base 2: mod_base = OTHER; note = Guanosine phosphorothiorate
  modified_base 74: mod_base = OTHER; note = 2'-Omethylcytosine phosphorothiorate
  modified_base 75: mod_base = OTHER; note = Cytosine phosphorothiorate

SEQ ID NO: 774 - RNA, 76 nt, synthetic construct; identical to SEQ ID NO: 625
  source 1..76: mol_type = other RNA
  modified_base 75: mod_base = OTHER; note = 2'-Omethylcytosine
  modified_base 76: mod_base = OTHER; note = 2'-Omethyladenosine

SEQ ID NO: 775 - RNA, 76 nt, synthetic construct; identical to SEQ ID NO: 625
  source 1..76: mol_type = other RNA
  modified_base 74: mod_base = OTHER; note = 2'-Omethylcytosine
  modified_base 75: mod_base = OTHER; note = 2'-Omethylcytosine

SEQ ID NO: 776 - skipped

SEQ ID NO: 777 - RNA, 76 nt, synthetic construct; identical to SEQ ID NO: 625
  source 1..76: mol_type = other RNA
  modified_base 74: mod_base = OTHER; note = 2'-Omethylcytosine
  modified_base 75: mod_base = OTHER; note = 2'-Omethylcytosine
  modified_base 76: mod_base = OTHER; note = 2'-Omethyladenosine

SEQ ID NO: 778 - RNA, 76 nt, synthetic construct; identical to SEQ ID NO: 625
  source 1..76: mol_type = other RNA
  modified_base 1: mod_base = OTHER; note = Guanosine phosphorothiorate
  modified_base 2: mod_base = OTHER; note = Guanosine phosphorothiorate
  modified_base 74: mod_base = OTHER; note = Cytosine phosphorothiorate
  modified_base 75: mod_base = OTHER; note = 2'-Omethylcytosine phosphorothiorate
  modified_base 76: mod_base = OTHER; note = 2'-Omethyladenosine

SEQ ID NO: 779 - RNA, 76 nt, synthetic construct; identical to SEQ ID NO: 625
  source 1..76: mol_type = other RNA
  modified_base 1: mod_base = OTHER; note = Guanosine phosphorothiorate
  modified_base 2: mod_base = OTHER; note = Guanosine phosphorothiorate
  modified_base 74: mod_base = OTHER; note = 2'-Omethylcytosine phosphorothiorate
  modified_base 75: mod_base = OTHER; note = 2'-Omethylcytosine phosphorothiorate

SEQ ID NO: 780 - RNA, 76 nt, synthetic construct; identical to SEQ ID NO: 625
  source 1..76: mol_type = other RNA
  modified_base 1: mod_base = OTHER; note = Guanosine phosphorothiorate
  modified_base 2: mod_base = OTHER; note = Guanosine phosphorothiorate
  modified_base 74: mod_base = OTHER; note = 2'-Omethylcytosine phosphorothiorate
  modified_base 75: mod_base = OTHER; note = 2'-Omethylcytosine phosphorothiorate
  modified_base 76: mod_base = OTHER; note = 2'-Omethyladenosine

SEQ ID NO: 781 - RNA, 76 nt, synthetic construct; identical to SEQ ID NO: 625
  source 1..76: mol_type = other RNA
  modified_base 1: mod_base = OTHER; note = 2'-Omethylguanosine phosphorothiorate
  modified_base 75: mod_base = OTHER; note = 2'-Omethylcytosine phosphorothiorate

SEQ ID NO: 782 - RNA, 76 nt, synthetic construct; identical to SEQ ID NO: 625
  source 1..76: mol_type = other RNA
  modified_base 1: mod_base = OTHER; note = 2'-Omethylguanosine phosphorothiorate
  modified_base 75: mod_base = OTHER; note = 2'-Omethylcytosine phosphorothiorate
  modified_base 76: mod_base = OTHER; note = 2'-Omethyladenosine

SEQ ID NO: 783 - RNA, 76 nt, synthetic construct; identical to SEQ ID NO: 625
  source 1..76: mol_type = other RNA
  modified_base 1: mod_base = OTHER; note = 2'-Omethylguanosine phosphorothiorate
  modified_base 2: mod_base = OTHER; note = Guanosine phosphorothiorate
  modified_base 75: mod_base = OTHER; note = 2'-Omethylcytosine phosphorothiorate

SEQ ID NO: 784 - RNA, 76 nt, synthetic construct; identical to SEQ ID NO: 625
  source 1..76: mol_type = other RNA
  modified_base 1: mod_base = OTHER; note = 2'-Omethylguanosine phosphorothiorate
  modified_base 2: mod_base = OTHER; note = Guanosine phosphorothiorate
  modified_base 75: mod_base = OTHER; note = 2'-Omethylcytosine phosphorothiorate
  modified_base 76: mod_base = OTHER; note = 2'-Omethyladenosine

SEQ ID NO: 785 - RNA, 76 nt, synthetic construct; identical to SEQ ID NO: 625
  source 1..76: mol_type = other RNA
  modified_base 1: mod_base = OTHER; note = 2'-Omethylguanosine phosphorothiorate
  modified_base 2: mod_base = OTHER; note = 2'-Omethylguanosine phosphorothiorate
  modified_base 75: mod_base = OTHER; note = 2'-Omethylcytosine phosphorothiorate

SEQ ID NO: 786 - RNA, 76 nt, synthetic construct; identical to SEQ ID NO: 625
  source 1..76: mol_type = other RNA
  modified_base 1: mod_base = OTHER; note = 2'-Omethylguanosine phosphorothiorate
  modified_base 2: mod_base = OTHER; note = 2'-Omethylguanosine phosphorothiorate
  modified_base 75: mod_base = OTHER; note = 2'-Omethylcytosine phosphorothiorate
  modified_base 76: mod_base = OTHER; note = 2'-Omethyladenosine

SEQ ID NO: 787 - RNA, 76 nt, synthetic construct; identical to SEQ ID NO: 625
  source 1..76: mol_type = other RNA
  modified_base 1: mod_base = OTHER; note = 2'-Omethylguanosine phosphorothiorate
  modified_base 2: mod_base = OTHER; note = 2'-Omethylguanosine phosphorothiorate
  modified_base 74: mod_base = OTHER; note = Cytosine phosphorothiorate
  modified_base 75: mod_base = OTHER; note = 2'-Omethylcytosine phosphorothiorate

SEQ ID NO: 788 - RNA, 76 nt, synthetic construct; identical to SEQ ID NO: 625
  source 1..76: mol_type = other RNA
  modified_base 1: mod_base = OTHER; note = 2'-Omethylguanosine phosphorothiorate
  modified_base 2: mod_base = OTHER; note = 2'-Omethylguanosine phosphorothiorate
  modified_base 74: mod_base = OTHER; note = Cytosine phosphorothiorate
  modified_base 75: mod_base = OTHER; note = 2'-Omethylcytosine phosphorothiorate
  modified_base 76: mod_base = OTHER; note = 2'-Omethyladenosine

SEQ ID NO: 789 - RNA, 76 nt, synthetic construct; identical to SEQ ID NO: 625
  source 1..76: mol_type = other RNA
  modified_base 1: mod_base = OTHER; note = 2'-Omethylguanosine phosphorothiorate
  modified_base 2: mod_base = OTHER; note = 2'-Omethylguanosine phosphorothiorate
  modified_base 74: mod_base = OTHER; note = 2'-Omethylcytosine phosphorothiorate
  modified_base 75: mod_base = OTHER; note = 2'-Omethylcytosine phosphorothiorate

SEQ ID NO: 790 - RNA, 76 nt, synthetic construct; identical to SEQ ID NO: 625
  source 1..76: mol_type = other RNA
  modified_base 1: mod_base = OTHER; note = 2'-Omethylguanosine phosphorothiorate
  modified_base 2: mod_base = OTHER; note = 2'-Omethylguanosine phosphorothiorate
  modified_base 74: mod_base = OTHER; note = 2'-Omethylcytosine phosphorothiorate
  modified_base 75: mod_base = OTHER; note = 2'-Omethylcytosine phosphorothiorate
  modified_base 76: mod_base = OTHER; note = 2'-Omethyladenosine

SEQ ID NO: 791 - RNA, 76 nt, synthetic construct; identical to SEQ ID NO: 625
  source 1..76: mol_type = other RNA
  modified_base 1: mod_base = OTHER; note = 2'-Omethylguanosine phosphorothiorate
  modified_base 50: mod_base = OTHER; note = 2'-Omethylcytosine
  modified_base 52: mod_base = OTHER; note = 2'-Omethylguanosine
  modified_base 73: mod_base = OTHER; note = 2'-Omethylguanosine
  modified_base 75: mod_base = OTHER; note = Cytosine phosphorothiorate

SEQ ID NO: 792 - skipped

SEQ ID NO: 793 - RNA, 76 nt, synthetic construct; identical to SEQ ID NO: 625
  source 1..76: mol_type = other RNA
  modified_base 1: mod_base = OTHER; note = 2'-Omethylguanosine phosphorothiorate
  modified_base 2: mod_base = OTHER; note = Guanosine phosphorothiorate
  modified_base 50: mod_base = OTHER; note = 2'-Omethylcytosine
  modified_base 52: mod_base = OTHER; note = 2'-Omethylguanosine
  modified_base 73: mod_base = OTHER; note = 2'-Omethylguanosine
  modified_base 74: mod_base = OTHER; note = Cytosine phosphorothiorate
  modified_base 75: mod_base = OTHER; note = Cytosine phosphorothiorate

SEQ ID NO: 794 - RNA, 76 nt, synthetic construct; identical to SEQ ID NO: 625
  source 1..76: mol_type = other RNA
  modified_base 1: mod_base = OTHER; note = 2'-Omethylguanosine
  modified_base 29: mod_base = OTHER; note = 2'-Omethylguanosine
  modified_base 30: mod_base = OTHER; note = 2'-Omethylguanosine
  modified_base 50: mod_base = OTHER; note = 2'-Omethylcytosine
  modified_base 52: mod_base = OTHER; note = 2'-Omethylguanosine
  modified_base 56: mod_base = OTHER; note = 2'-Omethylcytosine
  modified_base 65: mod_base = OTHER; note = 2'-Omethylguanosine
  modified_base 71: mod_base = OTHER; note = 2'-Omethyluridine
  modified_base 73: mod_base = OTHER; note = 2'-Omethylguanosine

SEQ ID NO: 795 - RNA, 76 nt, synthetic construct; identical to SEQ ID NO: 625
  source 1..76: mol_type = other RNA
  modified_base 1: mod_base = OTHER; note = 2'-Omethylguanosine
  modified_base 4: mod_base = OTHER; note = 2'-Omethyluridine
  modified_base 20: mod_base = OTHER; note = 2'-Omethyluridine
  modified_base 29: mod_base = OTHER; note = 2'-Omethylguanosine
  modified_base 30: mod_base = OTHER; note = 2'-Omethylguanosine
  modified_base 50: mod_base = OTHER; note = 2'-Omethylcytosine
  modified_base 52: mod_base = OTHER; note = 2'-Omethylguanosine
  modified_base 56: mod_base = OTHER; note = 2'-Omethylcytosine
  modified_base 65: mod_base = OTHER; note = 2'-Omethylguanosine
  modified_base 71: mod_base = OTHER; note = 2'-Omethyluridine
  modified_base 73: mod_base = OTHER; note = 2'-Omethylguanosine

SEQ ID NO: 796 - RNA, 76 nt, synthetic construct; identical to SEQ ID NO: 625
  source 1..76: mol_type = other RNA
  modified_base 1: mod_base = OTHER; note = 2'-Omethylguanosine
  modified_base 4: mod_base = OTHER; note = 2'-Omethyluridine
  modified_base 13: mod_base = OTHER; note = 2'-Omethylcytosine
  modified_base 17: mod_base = OTHER; note = 2'-Omethylguanosine
  modified_base 18: mod_base = OTHER; note = 2'-Omethylguanosine
  modified_base 20: mod_base = OTHER; note = 2'-Omethyluridine
  modified_base 25: mod_base = OTHER; note = 2'-Omethylcytosine
  modified_base 29: mod_base = OTHER; note = 2'-Omethylguanosine
  modified_base 30: mod_base = OTHER; note = 2'-Omethylguanosine
  modified_base 49: mod_base = OTHER; note = 2'-Omethylcytosine
  modified_base 50: mod_base = OTHER; note = 2'-Omethylcytosine
  modified_base 52: mod_base = OTHER; note = 2'-Omethylguanosine
  modified_base 56: mod_base = OTHER; note = 2'-Omethylcytosine
  modified_base 59: mod_base = OTHER; note = 2'-Omethylguanosine
  modified_base 65: mod_base = OTHER; note = 2'-Omethylguanosine
  modified_base 69: mod_base = OTHER; note = 2'-Omethyladenosine
  modified_base 71: mod_base = OTHER; note = 2'-Omethyluridine
  modified_base 72: mod_base = OTHER; note = 2'-Omethylcytosine
  modified_base 73: mod_base = OTHER; note = 2'-Omethylguanosine

SEQ ID NO: 797 - RNA, 76 nt, synthetic construct; identical to SEQ ID NO: 625
  source 1..76: mol_type = other RNA
  modified_base 1: mod_base = OTHER; note = 2'-Omethylguanosine
  modified_base 4: mod_base = OTHER; note = 2'-Omethyluridine
  modified_base 10: mod_base = OTHER; note = 2'-Omethylguanosine
  modified_base 11: mod_base = OTHER; note = 2'-Omethylcytosine
  modified_base 12: mod_base = OTHER; note = 2'-Omethylguanosine
  modified_base 13: mod_base = OTHER; note = 2'-Omethylcytosine
  modified_base 17: mod_base = OTHER; note = 2'-Omethylguanosine
  modified_base 18: mod_base = OTHER; note = 2'-Omethylguanosine
  modified_base 20: mod_base = OTHER; note = 2'-Omethyluridine
  modified_base 25: mod_base = OTHER; note = 2'-Omethylcytosine
  modified_base 29: mod_base = OTHER; note = 2'-Omethylguanosine
  modified_base 30: mod_base = OTHER; note = 2'-Omethylguanosine
  modified_base 45: mod_base = OTHER; note = 2'-Omethylguanosine
  modified_base 49: mod_base = OTHER; note = 2'-Omethylcytosine
  modified_base 50: mod_base = OTHER; note = 2'-Omethylcytosine
  modified_base 52: mod_base = OTHER; note = 2'-Omethylguanosine
  modified_base 56: mod_base = OTHER; note = 2'-Omethylcytosine
  modified_base 59: mod_base = OTHER; note = 2'-Omethylguanosine
  modified_base 61: mod_base = OTHER; note = 2'-Omethylcytosine
  modified_base 65: mod_base = OTHER; note = 2'-Omethylguanosine
  modified_base 66: mod_base = OTHER; note = 2'-Omethylcytosine
  modified_base 68: mod_base = OTHER; note = 2'-Omethylguanosine
  modified_base 69: mod_base = OTHER; note = 2'-Omethyladenosine
  modified_base 71: mod_base = OTHER; note = 2'-Omethyluridine
  modified_base 72: mod_base = OTHER; note = 2'-Omethylcytosine
  modified_base 73: mod_base = OTHER; note = 2'-Omethylguanosine

SEQ ID NO: 798 - RNA, 76 nt, synthetic construct; identical to SEQ ID NO: 625
  source 1..76: mol_type = other RNA
  modified_base 1: mod_base = OTHER; note = 2'-Omethylguanosine
  modified_base 4: mod_base = OTHER; note = 2'-Omethyluridine
  modified_base 6: mod_base = OTHER; note = 2'-Omethylcytosine
  modified_base 10: mod_base = OTHER; note = 2'-Omethylguanosine
  modified_base 11: mod_base = OTHER; note = 2'-Omethylcytosine
  modified_base 12: mod_base = OTHER; note = 2'-Omethylguanosine
  modified_base 13: mod_base = OTHER; note = 2'-Omethylcytosine
  modified_base 17: mod_base = OTHER; note = 2'-Omethylguanosine
  modified_base 18: mod_base = OTHER; note = 2'-Omethylguanosine
  modified_base 20: mod_base = OTHER; note = 2'-Omethyluridine
  modified_base 22: mod_base = OTHER; note = 2'-Omethylguanosine
  modified_base 25: mod_base = OTHER; note = 2'-Omethylcytosine
  modified_base 29: mod_base = OTHER; note = 2'-Omethylguanosine
  modified_base 30: mod_base = OTHER; note = 2'-Omethylguanosine
  modified_base 41: mod_base = OTHER; note = 2'-Omethylcytosine
  modified_base 42: mod_base = OTHER; note = 2'-Omethyladenosine
  modified_base 43: mod_base = OTHER; note = 2'-Omethyladenosine
  modified_base 45: mod_base = OTHER; note = 2'-Omethylguanosine
  modified_base 49: mod_base = OTHER; note = 2'-Omethylcytosine
  modified_base 50: mod_base = OTHER; note = 2'-Omethylcytosine
  modified_base 52: mod_base = OTHER; note = 2'-Omethylguanosine
  modified_base 56: mod_base = OTHER; note = 2'-Omethylcytosine
  modified_base 59: mod_base = OTHER; note = 2'-Omethylguanosine
  modified_base 61: mod_base = OTHER; note = 2'-Omethylcytosine
  modified_base 62: mod_base = OTHER; note = 2'-Omethylcytosine
  modified_base 65: mod_base = OTHER; note = 2'-Omethylguanosine
  modified_base 66: mod_base = OTHER; note = 2'-Omethylcytosine
  modified_base 67: mod_base = OTHER; note = 2'-Omethylguanosine
  modified_base 68: mod_base = OTHER; note = 2'-Omethylguanosine
  modified_base 69: mod_base = OTHER; note = 2'-Omethyladenosine
  modified_base 71: mod_base = OTHER; note = 2'-Omethyluridine
  modified_base 72: mod_base = OTHER; note = 2'-Omethylcytosine
  modified_base 73: mod_base = OTHER; note = 2'-Omethylguanosine
  modified_base 76: mod_base = OTHER; note = 2'-Omethyladenosine

SEQ ID NO: 799 - RNA, 76 nt, synthetic construct; identical to SEQ ID NO: 625
  source 1..76: mol_type = other RNA
  modified_base 1: mod_base = OTHER; note = 2'-Omethylguanosine
  modified_base 4: mod_base = OTHER; note = 2'-Omethyluridine
  modified_base 5: mod_base = OTHER; note = 2'-Omethylcytosine
  modified_base 6: mod_base = OTHER; note = 2'-Omethylcytosine
  modified_base 10: mod_base = OTHER; note = 2'-Omethylguanosine
  modified_base 11: mod_base = OTHER; note = 2'-Omethylcytosine
  modified_base 12: mod_base = OTHER; note = 2'-Omethylguanosine
  modified_base 13: mod_base = OTHER; note = 2'-Omethylcytosine
  modified_base 14: mod_base = OTHER; note = 2'-Omethyladenosine
  modified_base 16: mod_base = OTHER; note = 2'-Omethyluridine
  modified_base 17: mod_base = OTHER; note = 2'-Omethylguanosine
  modified_base 18: mod_base = OTHER; note = 2'-Omethylguanosine
  modified_base 20: mod_base = OTHER; note = 2'-Omethyluridine
  modified_base 22: mod_base = OTHER; note = 2'-Omethylguanosine
  modified_base 23: mod_base = OTHER; note = 2'-Omethylcytosine
  modified_base 25: mod_base = OTHER; note = 2'-Omethylcytosine
  modified_base 28: mod_base = OTHER; note = 2'-Omethyluridine
  modified_base 29: mod_base = OTHER; note = 2'-Omethylguanosine
  modified_base 30: mod_base = OTHER; note = 2'-Omethylguanosine
  modified_base 41: mod_base = OTHER; note = 2'-Omethylcytosine
  modified_base 42: mod_base = OTHER; note = 2'-Omethyladenosine
  modified_base 43: mod_base = OTHER; note = 2'-Omethyladenosine
  modified_base 44: mod_base = OTHER; note = 2'-Omethyladenosine
  modified_base 45: mod_base = OTHER; note = 2'-Omethylguanosine
  modified_base 49: mod_base = OTHER; note = 2'-Omethylcytosine
  modified_base 50: mod_base = OTHER; note = 2'-Omethylcytosine
  modified_base 52: mod_base = OTHER; note = 2'-Omethylguanosine
  modified_base 53: mod_base = OTHER; note = 2'-Omethylguanosine
  modified_base 54: mod_base = OTHER; note = 2'-Omethyluridine
  modified_base 56: mod_base = OTHER; note = 2'-Omethylcytosine
  modified_base 59: mod_base = OTHER; note = 2'-Omethylguanosine
  modified_base 61: mod_base = OTHER; note = 2'-Omethylcytosine
  modified_base 62: mod_base = OTHER; note = 2'-Omethylcytosine
  modified_base 65: mod_base = OTHER; note = 2'-Omethylguanosine
  modified_base 66: mod_base = OTHER; note = 2'-Omethylcytosine
  modified_base 67: mod_base = OTHER; note = 2'-Omethylguanosine
  modified_base 68: mod_base = OTHER; note = 2'-Omethylguanosine
  modified_base 69: mod_base = OTHER; note = 2'-Omethyladenosine
  modified_base 71: mod_base = OTHER; note = 2'-Omethyluridine
  modified_base 72: mod_base = OTHER; note = 2'-Omethylcytosine
  modified_base 73: mod_base = OTHER; note = 2'-Omethylguanosine
  modified_base 75: mod_base = OTHER; note = 2'-Omethylcytosine
  modified_base 76: mod_base = OTHER; note = 2'-Omethyladenosine

SEQ ID NO: 800 - RNA, 76 nt, synthetic construct; identical to SEQ ID NO: 625
  source 1..76: mol_type = other RNA
  modified_base 1: mod_base = OTHER; note = 2'-Omethylguanosine
  modified_base 2: mod_base = OTHER; note = 2'-Omethylguanosine
  modified_base 3: mod_base = OTHER; note = 2'-Omethylcytosine
  modified_base 4: mod_base = OTHER; note = 2'-Omethyluridine
  modified_base 5: mod_base = OTHER; note = 2'-Omethylcytosine
  modified_base 6: mod_base = OTHER; note = 2'-Omethylcytosine
  modified_base 10: mod_base = OTHER; note = 2'-Omethylguanosine
  modified_base 11: mod_base = OTHER; note = 2'-Omethylcytosine
  modified_base 12: mod_base = OTHER; note = 2'-Omethylguanosine
  modified_base 13: mod_base = OTHER; note = 2'-Omethylcytosine
  modified_base 14: mod_base = OTHER; note = 2'-Omethyladenosine
  modified_base 16: mod_base = OTHER; note = 2'-Omethyluridine
  modified_base 17: mod_base = OTHER; note = 2'-Omethylguanosine
  modified_base 18: mod_base = OTHER; note = 2'-Omethylguanosine
  modified_base 20: mod_base = OTHER; note = 2'-Omethyluridine
  modified_base 22: mod_base = OTHER; note = 2'-Omethylguanosine
  modified_base 23: mod_base = OTHER; note = 2'-Omethylcytosine
  modified_base 24: mod_base = OTHER; note = 2'-Omethylguanosine
  modified_base 25: mod_base = OTHER; note = 2'-Omethylcytosine
  modified_base 28: mod_base = OTHER; note = 2'-Omethyluridine
  modified_base 29: mod_base = OTHER; note = 2'-Omethylguanosine
  modified_base 30: mod_base = OTHER; note = 2'-Omethylguanosine
  modified_base 41: mod_base = OTHER; note = 2'-Omethylcytosine
  modified_base 42: mod_base = OTHER; note = 2'-Omethyladenosine
  modified_base 43: mod_base = OTHER; note = 2'-Omethyladenosine
  modified_base 44: mod_base = OTHER; note = 2'-Omethyladenosine
  modified_base 45: mod_base = OTHER; note = 2'-Omethylguanosine
  modified_base 49: mod_base = OTHER; note = 2'-Omethylcytosine
  modified_base 50: mod_base = OTHER; note = 2'-Omethylcytosine
  modified_base 52: mod_base = OTHER; note = 2'-Omethylguanosine
  modified_base 53: mod_base = OTHER; note = 2'-Omethylguanosine
  modified_base 54: mod_base = OTHER; note = 2'-Omethyluridine
  modified_base 56: mod_base = OTHER; note = 2'-Omethylcytosine
  modified_base 59: mod_base = OTHER; note = 2'-Omethylguanosine
  modified_base 61: mod_base = OTHER; note = 2'-Omethylcytosine
  modified_base 62: mod_base = OTHER; note = 2'-Omethylcytosine
  modified_base 65: mod_base = OTHER; note = 2'-Omethylguanosine
  modified_base 66: mod_base = OTHER; note = 2'-Omethylcytosine
  modified_base 67: mod_base = OTHER; note = 2'-Omethylguanosine
  modified_base 68: mod_base = OTHER; note = 2'-Omethylguanosine
  modified_base 69: mod_base = OTHER; note = 2'-Omethyladenosine
  modified_base 71: mod_base = OTHER; note = 2'-Omethyluridine
  modified_base 72: mod_base = OTHER; note = 2'-Omethylcytosine
  modified_base 73: mod_base = OTHER; note = 2'-Omethylguanosine
  modified_base 74: mod_base = OTHER; note = 2'-Omethylcytosine
  modified_base 75: mod_base = OTHER; note = 2'-Omethylcytosine
  modified_base 76: mod_base = OTHER; note = 2'-Omethyladenosine

SEQ ID NO: 801-870 - skipped (70 entries)

SEQ ID NO: 871 - RNA, 76 nt, synthetic construct; identical to SEQ ID NO: 625
  source 1..76: mol_type = other RNA
  modified_base 9: mod_base = OTHER; note = Guanosine phosphorothiorate

SEQ ID NO: 872-877 - skipped (6 entries)

SEQ ID NO: 878 - RNA, 76 nt, synthetic construct; identical to SEQ ID NO: 625
  source 1..76: mol_type = other RNA
  modified_base 41: mod_base = OTHER; note = Cytosine phosphorothiorate

SEQ ID NO: 879-880 - skipped (2 entries)

SEQ ID NO: 881 - RNA, 76 nt, synthetic construct; identical to SEQ ID NO: 625
  source 1..76: mol_type = other RNA
  modified_base 43: mod_base = OTHER; note = Adenosine phosphorothiorate

SEQ ID NO: 882-884 - skipped (3 entries)

SEQ ID NO: 885 - RNA, 76 nt, synthetic construct; identical to SEQ ID NO: 625
  source 1..76: mol_type = other RNA
  modified_base 4: mod_base = OTHER; note = Uridine phosphorothiorate

SEQ ID NO: 886 - skipped

SEQ ID NO: 887 - RNA, 76 nt, synthetic construct; identical to SEQ ID NO: 625
  source 1..76: mol_type = other RNA
  modified_base 5: mod_base = OTHER; note = Cytosine phosphorothiorate

SEQ ID NO: 888 - RNA, 76 nt, synthetic construct; identical to SEQ ID NO: 625
  source 1..76: mol_type = other RNA
  modified_base 6: mod_base = OTHER; note = Cytosine phosphorothiorate

SEQ ID NO: 889 - skipped

SEQ ID NO: 890 - RNA, 76 nt, synthetic construct; identical to SEQ ID NO: 625
  source 1..76: mol_type = other RNA
  modified_base 7: mod_base = OTHER; note = Guanosine phosphorothiorate

SEQ ID NO: 891 - RNA, 76 nt, synthetic construct; identical to SEQ ID NO: 625
  source 1..76: mol_type = other RNA
  modified_base 8: mod_base = OTHER; note = Uridine phosphorothiorate

SEQ ID NO: 892 - RNA, 76 nt, synthetic construct; identical to SEQ ID NO: 625
  source 1..76: mol_type = other RNA
  modified_base 10: mod_base = OTHER; note = Guanosine phosphorothiorate

SEQ ID NO: 893 - RNA, 76 nt, synthetic construct; identical to SEQ ID NO: 625
  source 1..76: mol_type = other RNA
  modified_base 11: mod_base = OTHER; note = Cytosine phosphorothiorate

SEQ ID NO: 894 - RNA, 76 nt, synthetic construct; identical to SEQ ID NO: 625
  source 1..76: mol_type = other RNA
  modified_base 12: mod_base = OTHER; note = Guanosine phosphorothiorate

SEQ ID NO: 895 - RNA, 76 nt, synthetic construct; identical to SEQ ID NO: 625
  source 1..76: mol_type = other RNA
  modified_base 13: mod_base = OTHER; note = Cytosine phosphorothiorate

SEQ ID NO: 896 - RNA, 76 nt, synthetic construct; identical to SEQ ID NO: 625
  source 1..76: mol_type = other RNA
  modified_base 22: mod_base = OTHER; note = Guanosine phosphorothiorate

SEQ ID NO: 897 - skipped

SEQ ID NO: 898 - RNA, 76 nt, synthetic construct; identical to SEQ ID NO: 625
  source 1..76: mol_type = other RNA
  modified_base 23: mod_base = OTHER; note = Cytosine phosphorothiorate

SEQ ID NO: 899 - RNA, 76 nt, synthetic construct; identical to SEQ ID NO: 625
  source 1..76: mol_type = other RNA
  modified_base 24: mod_base = OTHER; note = Guanosine phosphorothiorate

SEQ ID NO: 900 - RNA, 76 nt, synthetic construct; identical to SEQ ID NO: 625
  source 1..76: mol_type = other RNA
  modified_base 25: mod_base = OTHER; note = Cytosine phosphorothiorate

SEQ ID NO: 901 - RNA, 76 nt, synthetic construct; identical to SEQ ID NO: 625
  source 1..76: mol_type = other RNA
  modified_base 26: mod_base = OTHER; note = Adenosine phosphorothiorate

SEQ ID NO: 902 - RNA, 76 nt, synthetic construct; identical to SEQ ID NO: 625
  source 1..76: mol_type = other RNA
  modified_base 27: mod_base = OTHER; note = Uridine phosphorothiorate

SEQ ID NO: 903 - RNA, 76 nt, synthetic construct; identical to SEQ ID NO: 625
  source 1..76: mol_type = other RNA
  modified_base 28: mod_base = OTHER; note = Uridine phosphorothiorate

SEQ ID NO: 904 - RNA, 76 nt, synthetic construct; identical to SEQ ID NO: 625
  source 1..76: mol_type = other RNA
  modified_base 29: mod_base = OTHER; note = Guanosine phosphorothiorate

SEQ ID NO: 905 - RNA, 76 nt, synthetic construct; identical to SEQ ID NO: 625
  source 1..76: mol_type = other RNA
  modified_base 30: mod_base = OTHER; note = Guanosine phosphorothiorate

SEQ ID NO: 906 - RNA, 76 nt, synthetic construct; identical to SEQ ID NO: 625
  source 1..76: mol_type = other RNA
  modified_base 31: mod_base = OTHER; note = Adenosine phosphorothiorate

SEQ ID NO: 907 - RNA, 76 nt, synthetic construct; identical to SEQ ID NO: 625
  source 1..76: mol_type = other RNA
  modified_base 39: mod_base = OTHER; note = Uridine phosphorothiorate

SEQ ID NO: 908 - skipped

SEQ ID NO: 909 - RNA, 76 nt, synthetic construct; identical to SEQ ID NO: 625
  source 1..76: mol_type = other RNA
  modified_base 40: mod_base = OTHER; note = Uridine phosphorothiorate

SEQ ID NO: 910 - RNA, 76 nt, synthetic construct; identical to SEQ ID NO: 625
  source 1..76: mol_type = other RNA
  modified_base 49: mod_base = OTHER; note = Cytosine phosphorothiorate

SEQ ID NO: 911 - skipped

SEQ ID NO: 912 - RNA, 76 nt, synthetic construct; identical to SEQ ID NO: 625
  source 1..76: mol_type = other RNA
  modified_base 50: mod_base = OTHER; note = Cytosine phosphorothiorate

SEQ ID NO: 913 - skipped

SEQ ID NO: 914 - RNA, 76 nt, synthetic construct; identical to SEQ ID NO: 625
  source 1..76: mol_type = other RNA
  modified_base 51: mod_base = OTHER; note = Guanosine phosphorothiorate

SEQ ID NO: 915 - RNA, 76 nt, synthetic construct; identical to SEQ ID NO: 625
  source 1..76: mol_type = other RNA
  modified_base 52: mod_base = OTHER; note = Guanosine phosphorothiorate

SEQ ID NO: 916 - skipped

SEQ ID NO: 917 - RNA, 76 nt, synthetic construct; identical to SEQ ID NO: 625
  source 1..76: mol_type = other RNA
  modified_base 53: mod_base = OTHER; note = Guanosine phosphorothiorate

SEQ ID NO: 918 - RNA, 76 nt, synthetic construct; identical to SEQ ID NO: 625
  source 1..76: mol_type = other RNA
  modified_base 61: mod_base = OTHER; note = Cytosine phosphorothiorate

SEQ ID NO: 919 - RNA, 76 nt, synthetic construct; identical to SEQ ID NO: 625
  source 1..76: mol_type = other RNA
  modified_base 62: mod_base = OTHER; note = Cytosine phosphorothiorate

SEQ ID NO: 920 - RNA, 76 nt, synthetic construct; identical to SEQ ID NO: 625
  source 1..76: mol_type = other RNA
  modified_base 63: mod_base = OTHER; note = Cytosine phosphorothiorate

SEQ ID NO: 921 - RNA, 76 nt, synthetic construct; identical to SEQ ID NO: 625
  source 1..76: mol_type = other RNA
  modified_base 64: mod_base = OTHER; note = Guanosine phosphorothiorate

SEQ ID NO: 922 - RNA, 76 nt, synthetic construct; identical to SEQ ID NO: 625
  source 1..76: mol_type = other RNA
  modified_base 65: mod_base = OTHER; note = Guanosine phosphorothiorate

SEQ ID NO: 923 - RNA, 76 nt, synthetic construct; identical to SEQ ID NO: 625
  source 1..76: mol_type = other RNA
  modified_base 66: mod_base = OTHER; note = Cytosine phosphorothiorate

SEQ ID NO: 924 - skipped

SEQ ID NO: 925 - RNA, 76 nt, synthetic construct; identical to SEQ ID NO: 625
  source 1..76: mol_type = other RNA
  modified_base 67: mod_base = OTHER; note = Guanosine phosphorothiorate

SEQ ID NO: 926 - skipped

SEQ ID NO: 927 - RNA, 76 nt, synthetic construct; identical to SEQ ID NO: 625
  source 1..76: mol_type = other RNA
  modified_base 68: mod_base = OTHER; note = Guanosine phosphorothiorate

SEQ ID NO: 928 - RNA, 76 nt, synthetic construct; identical to SEQ ID NO: 625
  source 1..76: mol_type = other RNA
  modified_base 69: mod_base = OTHER; note = Adenosine phosphorothiorate

SEQ ID NO: 929 - RNA, 76 nt, synthetic construct; identical to SEQ ID NO: 625
  source 1..76: mol_type = other RNA
  modified_base 70: mod_base = OTHER; note = Guanosine phosphorothiorate

SEQ ID NO: 930 - RNA, 76 nt, synthetic construct; identical to SEQ ID NO: 625
  source 1..76: mol_type = other RNA
  modified_base 71: mod_base = OTHER; note = Uridine phosphorothiorate

SEQ ID NO: 931 - RNA, 76 nt, synthetic construct; identical to SEQ ID NO: 625
  source 1..76: mol_type = other RNA
  modified_base 72: mod_base = OTHER; note = Cytosine phosphorothiorate

SEQ ID NO: 932 - skipped

SEQ ID NO: 933 - RNA, 75 nt, synthetic construct; identical to SEQ ID NO: 765
  source 1..75: mol_type = other RNA
  modified_base 73: mod_base = OTHER; note = 2'-Omethylguanosine

SEQ ID NO: 934 - RNA, 74 nt, synthetic construct; identical to SEQ ID NO: 766
  source 1..74: mol_type = other RNA
  modified_base 73: mod_base = OTHER; note = 2'-Omethylguanosine

SEQ ID NO: 935 - RNA, 73 nt, synthetic construct
  source 1..73: mol_type = other RNA
  modified_base 73: mod_base = OTHER; note = 2'-Omethylguanosine
ggctccgtggcgcaatggatagcgcattggacttcaaattcaaaggttccgggttcgagtcccggcggagtcg

SEQ ID NO: 936 - RNA, 73 nt, synthetic construct; identical to SEQ ID NO: 935
  source 1..73: mol_type = other RNA
  modified_base 1: mod_base = OTHER; note = 2'-Omethylguanosine
  modified_base 73: mod_base = OTHER; note = 2'-Omethylguanosine

SEQ ID NO: 937 - RNA, 74 nt, synthetic construct; identical to SEQ ID NO: 766
  source 1..74: mol_type = other RNA
  modified_base 1: mod_base = OTHER; note = 2'-Omethylguanosine
  modified_base 73: mod_base = OTHER; note = 2'-Omethylguanosine

SEQ ID NO: 938 - RNA, 75 nt, synthetic construct; identical to SEQ ID NO: 765
  source 1..75: mol_type = other RNA
  modified_base 1: mod_base = OTHER; note = 2'-Omethylguanosine
  modified_base 73: mod_base = OTHER; note = 2'-Omethylguanosine

SEQ ID NO: 939 - skipped

SEQ ID NO: 940 - RNA, 76 nt, synthetic construct; identical to SEQ ID NO: 625
  source 1..76: mol_type = other RNA
  modified_base 1: mod_base = OTHER; note = 2'-Omethylguanosine
  modified_base 2: mod_base = OTHER; note = 2'-Omethylguanosine
  modified_base 3: mod_base = OTHER; note = 2'-Omethylcytosine
  modified_base 4: mod_base = OTHER; note = 2'-Omethyluridine
  modified_base 5: mod_base = OTHER; note = 2'-Omethylcytosine
  modified_base 6: mod_base = OTHER; note = 2'-Omethylcytosine
  modified_base 10: mod_base = OTHER; note = 2'-Omethylguanosine
  modified_base 11: mod_base = OTHER; note = 2'-Omethylcytosine
  modified_base 12: mod_base = OTHER; note = 2'-Omethylguanosine
  modified_base 13: mod_base = OTHER; note = 2'-Omethylcytosine

SEQ ID NO: 941 - RNA, 76 nt, synthetic construct; identical to SEQ ID NO: 625
  source 1..76: mol_type = other RNA
  modified_base 1: mod_base = OTHER; note = 2'-Omethylguanosine
  modified_base 2: mod_base = OTHER; note = 2'-Omethylguanosine
  modified_base 3: mod_base = OTHER; note = 2'-Omethylcytosine
  modified_base 4: mod_base = OTHER; note = 2'-Omethyluridine
  modified_base 5: mod_base = OTHER; note = 2'-Omethylcytosine
  modified_base 6: mod_base = OTHER; note = 2'-Omethylcytosine
  modified_base 22: mod_base = OTHER; note = 2'-Omethylguanosine
  modified_base 23: mod_base = OTHER; note = 2'-Omethylcytosine
  modified_base 24: mod_base = OTHER; note = 2'-Omethylguanosine
  modified_base 25: mod_base = OTHER; note = 2'-Omethylcytosine

SEQ ID NO: 942 - RNA, 76 nt, synthetic construct; identical to SEQ ID NO: 625
  source 1..76: mol_type = other RNA
  modified_base 1: mod_base = OTHER; note = 2'-Omethylguanosine
  modified_base 2: mod_base = OTHER; note = 2'-Omethylguanosine
  modified_base 3: mod_base = OTHER; note = 2'-Omethylcytosine
  modified_base 4: mod_base = OTHER; note = 2'-Omethyluridine
  modified_base 5: mod_base = OTHER; note = 2'-Omethylcytosine
  modified_base 6: mod_base = OTHER; note = 2'-Omethylcytosine
  modified_base 49: mod_base = OTHER; note = 2'-Omethylcytosine
  modified_base 50: mod_base = OTHER; note = 2'-Omethylcytosine
  modified_base 51: mod_base = OTHER; note = 2'-Omethylguanosine
  modified_base 52: mod_base = OTHER; note = 2'-Omethylguanosine
  modified_base 53: mod_base = OTHER; note = 2'-Omethylguanosine

SEQ ID NO: 943 - RNA, 76 nt, synthetic construct; identical to SEQ ID NO: 625
  source 1..76: mol_type = other RNA
  modified_base 1: mod_base = OTHER; note = 2'-Omethylguanosine
  modified_base 2: mod_base = OTHER; note = 2'-Omethylguanosine
  modified_base 3: mod_base = OTHER; note = 2'-Omethylcytosine
  modified_base 4: mod_base = OTHER; note = 2'-Omethyluridine
  modified_base 5: mod_base = OTHER; note = 2'-Omethylcytosine
  modified_base 6: mod_base = OTHER; note = 2'-Omethylcytosine
  modified_base 73: mod_base = OTHER; note = 2'-Omethylguanosine

SEQ ID NO: 944 - RNA, 76 nt, synthetic construct; identical to SEQ ID NO: 625
  source 1..76: mol_type = other RNA
  modified_base 10: mod_base = OTHER; note = 2'-Omethylguanosine
  modified_base 11: mod_base = OTHER; note = 2'-Omethylcytosine
  modified_base 12: mod_base = OTHER; note = 2'-Omethylguanosine
  modified_base 13: mod_base = OTHER; note = 2'-Omethylcytosine
  modified_base 49: mod_base = OTHER; note = 2'-Omethylcytosine
  modified_base 50: mod_base = OTHER; note = 2'-Omethylcytosine
  modified_base 51: mod_base = OTHER; note = 2'-Omethylguanosine
  modified_base 52: mod_base = OTHER; note = 2'-Omethylguanosine
  modified_base 53: mod_base = OTHER; note = 2'-Omethylguanosine

SEQ ID NO: 945 - skipped

SEQ ID NO: 946 - RNA, 76 nt, synthetic construct; identical to SEQ ID NO: 625
  source 1..76: mol_type = other RNA
  modified_base 10: mod_base = OTHER; note = 2'-Omethylguanosine
  modified_base 11: mod_base = OTHER; note = 2'-Omethylcytosine
  modified_base 12: mod_base = OTHER; note = 2'-Omethylguanosine
  modified_base 13: mod_base = OTHER; note = 2'-Omethylcytosine
  modified_base 73: mod_base = OTHER; note = 2'-Omethylguanosine

SEQ ID NO: 947 - RNA, 76 nt, synthetic construct; identical to SEQ ID NO: 625
  source 1..76: mol_type = other RNA
  modified_base 22: mod_base = OTHER; note = 2'-Omethylguanosine
  modified_base 23: mod_base = OTHER; note = 2'-Omethylcytosine
  modified_base 24: mod_base = OTHER; note = 2'-Omethylguanosine
  modified_base 25: mod_base = OTHER; note = 2'-Omethylcytosine
  modified_base 49: mod_base = OTHER; note = 2'-Omethylcytosine
  modified_base 50: mod_base = OTHER; note = 2'-Omethylcytosine
  modified_base 51: mod_base = OTHER; note = 2'-Omethylguanosine
  modified_base 52: mod_base = OTHER; note = 2'-Omethylguanosine
  modified_base 53: mod_base = OTHER; note = 2'-Omethylguanosine

SEQ ID NO: 948 - skipped

SEQ ID NO: 949 - RNA, 76 nt, synthetic construct; identical to SEQ ID NO: 625
  source 1..76: mol_type = other RNA
  modified_base 22: mod_base = OTHER; note = 2'-Omethylguanosine
  modified_base 23: mod_base = OTHER; note = 2'-Omethylcytosine
  modified_base 24: mod_base = OTHER; note = 2'-Omethylguanosine
  modified_base 25: mod_base = OTHER; note = 2'-Omethylcytosine
  modified_base 73: mod_base = OTHER; note = 2'-Omethylguanosine

SEQ ID NO: 950 - RNA, 76 nt, synthetic construct; identical to SEQ ID NO: 625
  source 1..76: mol_type = other RNA
  modified_base 49: mod_base = OTHER; note = 2'-Omethylcytosine
  modified_base 50: mod_base = OTHER; note = 2'-Omethylcytosine
  modified_base 51: mod_base = OTHER; note = 2'-Omethylguanosine
  modified_base 52: mod_base = OTHER; note = 2'-Omethylguanosine
  modified_base 53: mod_base = OTHER; note = 2'-Omethylguanosine
  modified_base 73: mod_base = OTHER; note = 2'-Omethylguanosine

SEQ ID NO: 951 - RNA, 76 nt, synthetic construct; identical to SEQ ID NO: 625
  source 1..76: mol_type = other RNA
  modified_base 1: mod_base = OTHER; note = 2'-Omethylguanosine
  modified_base 2: mod_base = OTHER; note = 2'-Omethylguanosine
  modified_base 3: mod_base = OTHER; note = 2'-Omethylcytosine
  modified_base 4: mod_base = OTHER; note = 2'-Omethyluridine
  modified_base 5: mod_base = OTHER; note = 2'-Omethylcytosine
  modified_base 6: mod_base = OTHER; note = 2'-Omethylcytosine
  modified_base 10: mod_base = OTHER; note = 2'-Omethylguanosine
  modified_base 11: mod_base = OTHER; note = 2'-Omethylcytosine
  modified_base 12: mod_base = OTHER; note = 2'-Omethylguanosine
  modified_base 13: mod_base = OTHER; note = 2'-Omethylcytosine
  modified_base 22: mod_base = OTHER; note = 2'-Omethylguanosine
  modified_base 23: mod_base = OTHER; note = 2'-Omethylcytosine
  modified_base 24: mod_base = OTHER; note = 2'-Omethylguanosine
  modified_base 25: mod_base = OTHER; note = 2'-Omethylcytosine

SEQ ID NO: 952 - RNA, 76 nt, synthetic construct; identical to SEQ ID NO: 625
  source 1..76: mol_type = other RNA
  modified_base 1: mod_base = OTHER; note = 2'-Omethylguanosine
  modified_base 2: mod_base = OTHER; note = 2'-Omethylguanosine
  modified_base 3: mod_base = OTHER; note = 2'-Omethylcytosine
  modified_base 4: mod_base = OTHER; note = 2'-Omethyluridine
  modified_base 5: mod_base = OTHER; note = 2'-Omethylcytosine
  modified_base 6: mod_base = OTHER; note = 2'-Omethylcytosine
  modified_base 10: mod_base = OTHER; note = 2'-Omethylguanosine
  modified_base 11: mod_base = OTHER; note = 2'-Omethylcytosine
  modified_base 12: mod_base = OTHER; note = 2'-Omethylguanosine
  modified_base 13: mod_base = OTHER; note = 2'-Omethylcytosine
  modified_base 49: mod_base = OTHER; note = 2'-Omethylcytosine
  modified_base 50: mod_base = OTHER; note = 2'-Omethylcytosine
  modified_base 51: mod_base = OTHER; note = 2'-Omethylguanosine
  modified_base 52: mod_base = OTHER; note = 2'-Omethylguanosine
  modified_base 53: mod_base = OTHER; note = 2'-Omethylguanosine

SEQ ID NO: 953 - RNA, 76 nt, synthetic construct; identical to SEQ ID NO: 625
  source 1..76: mol_type = other RNA
  modified_base 1: mod_base = OTHER; note = 2'-Omethylguanosine
  modified_base 2: mod_base = OTHER; note = 2'-Omethylguanosine
  modified_base 3: mod_base = OTHER; note = 2'-Omethylcytosine
  modified_base 4: mod_base = OTHER; note = 2'-Omethyluridine
  modified_base 5: mod_base = OTHER; note = 2'-Omethylcytosine
  modified_base 6: mod_base = OTHER; note = 2'-Omethylcytosine
  modified_base 10: mod_base = OTHER; note = 2'-Omethylguanosine
  modified_base 11: mod_base = OTHER; note = 2'-Omethylcytosine
  modified_base 12: mod_base = OTHER; note = 2'-Omethylguanosine
  modified_base 13: mod_base = OTHER; note = 2'-Omethylcytosine
  modified_base 73: mod_base = OTHER; note = 2'-Omethylguanosine

SEQ ID NO: 954 - RNA, 76 nt, synthetic construct; identical to SEQ ID NO: 625
  source 1..76: mol_type = other RNA
  modified_base 10: mod_base = OTHER; note = 2'-Omethylguanosine
  modified_base 11: mod_base = OTHER; note = 2'-Omethylcytosine
  modified_base 12: mod_base = OTHER; note = 2'-Omethylguanosine
  modified_base 13: mod_base = OTHER; note = 2'-Omethylcytosine
  modified_base 22: mod_base = OTHER; note = 2'-Omethylguanosine
  modified_base 23: mod_base = OTHER; note = 2'-Omethylcytosine
  modified_base 24: mod_base = OTHER; note = 2'-Omethylguanosine
  modified_base 25: mod_base = OTHER; note = 2'-Omethylcytosine
  modified_base 49: mod_base = OTHER; note = 2'-Omethylcytosine
  modified_base 50: mod_base = OTHER; note = 2'-Omethylcytosine
  modified_base 51: mod_base = OTHER; note = 2'-Omethylguanosine
  modified_base 52: mod_base = OTHER; note = 2'-Omethylguanosine
  modified_base 53: mod_base = OTHER; note = 2'-Omethylguanosine

SEQ ID NO: 955 - skipped

SEQ ID NO: 956 - RNA, 76 nt, synthetic construct; identical to SEQ ID NO: 625
  source 1..76: mol_type = other RNA
  modified_base 10: mod_base = OTHER; note = 2'-Omethylguanosine
  modified_base 11: mod_base = OTHER; note = 2'-Omethylcytosine
  modified_base 12: mod_base = OTHER; note = 2'-Omethylguanosine
  modified_base 13: mod_base = OTHER; note = 2'-Omethylcytosine
  modified_base 22: mod_base = OTHER; note = 2'-Omethylguanosine
  modified_base 23: mod_base = OTHER; note = 2'-Omethylcytosine
  modified_base 24: mod_base = OTHER; note = 2'-Omethylguanosine
  modified_base 25: mod_base = OTHER; note = 2'-Omethylcytosine
  modified_base 73: mod_base = OTHER; note = 2'-Omethylguanosine

SEQ ID NO: 957 - RNA, 76 nt, synthetic construct; identical to SEQ ID NO: 625
  source 1..76: mol_type = other RNA
  modified_base 1: mod_base = OTHER; note = 2'-Omethylguanosine
  modified_base 2: mod_base = OTHER; note = 2'-Omethylguanosine
  modified_base 3: mod_base = OTHER; note = 2'-Omethylcytosine
  modified_base 4: mod_base = OTHER; note = 2'-Omethyluridine
  modified_base 5: mod_base = OTHER; note = 2'-Omethylcytosine
  modified_base 6: mod_base = OTHER; note = 2'-Omethylcytosine
  modified_base 22: mod_base = OTHER; note = 2'-Omethylguanosine
  modified_base 23: mod_base = OTHER; note = 2'-Omethylcytosine
  modified_base 24: mod_base = OTHER; note = 2'-Omethylguanosine
  modified_base 25: mod_base = OTHER; note = 2'-Omethylcytosine
  modified_base 49: mod_base = OTHER; note = 2'-Omethylcytosine
  modified_base 50: mod_base = OTHER; note = 2'-Omethylcytosine
  modified_base 51: mod_base = OTHER; note = 2'-Omethylguanosine
  modified_base 52: mod_base = OTHER; note = 2'-Omethylguanosine
  modified_base 53: mod_base = OTHER; note = 2'-Omethylguanosine

SEQ ID NO: 958 - RNA, 76 nt, synthetic construct; identical to SEQ ID NO: 625
  source 1..76: mol_type = other RNA
  modified_base 22: mod_base = OTHER; note = 2'-Omethylguanosine
  modified_base 23: mod_base = OTHER; note = 2'-Omethylcytosine
  modified_base 24: mod_base = OTHER; note = 2'-Omethylguanosine
  modified_base 25: mod_base = OTHER; note = 2'-Omethylcytosine
  modified_base 49: mod_base = OTHER; note = 2'-Omethylcytosine
  modified_base 50: mod_base = OTHER; note = 2'-Omethylcytosine
  modified_base 51: mod_base = OTHER; note = 2'-Omethylguanosine
  modified_base 52: mod_base = OTHER; note = 2'-Omethylguanosine
  modified_base 53: mod_base = OTHER; note = 2'-Omethylguanosine
  modified_base 73: mod_base = OTHER; note = 2'-Omethylguanosine

SEQ ID NO: 959 - RNA, 76 nt, synthetic construct; identical to SEQ ID NO: 625
  source 1..76: mol_type = other RNA
  modified_base 1: mod_base = OTHER; note = 2'-Omethylguanosine
  modified_base 2: mod_base = OTHER; note = 2'-Omethylguanosine
  modified_base 3: mod_base = OTHER; note = 2'-Omethylcytosine
  modified_base 4: mod_base = OTHER; note = 2'-Omethyluridine
  modified_base 5: mod_base = OTHER; note = 2'-Omethylcytosine
  modified_base 6: mod_base = OTHER; note = 2'-Omethylcytosine
  modified_base 49: mod_base = OTHER; note = 2'-Omethylcytosine
  modified_base 50: mod_base = OTHER; note = 2'-Omethylcytosine
  modified_base 51: mod_base = OTHER; note = 2'-Omethylguanosine
  modified_base 52: mod_base = OTHER; note = 2'-Omethylguanosine
  modified_base 53: mod_base = OTHER; note = 2'-Omethylguanosine
  modified_base 73: mod_base = OTHER; note = 2'-Omethylguanosine

SEQ ID NO: 960 - RNA, 76 nt, synthetic construct; identical to SEQ ID NO: 625
  source 1..76: mol_type = other RNA
  modified_base 10: mod_base = OTHER; note = 2'-Omethylguanosine
  modified_base 11: mod_base = OTHER; note = 2'-Omethylcytosine
  modified_base 12: mod_base = OTHER; note = 2'-Omethylguanosine
  modified_base 13: mod_base = OTHER; note = 2'-Omethylcytosine
  modified_base 49: mod_base = OTHER; note = 2'-Omethylcytosine
  modified_base 50: mod_base = OTHER; note = 2'-Omethylcytosine
  modified_base 51: mod_base = OTHER; note = 2'-Omethylguanosine
  modified_base 52: mod_base = OTHER; note = 2'-Omethylguanosine
  modified_base 53: mod_base = OTHER; note = 2'-Omethylguanosine
  modified_base 73: mod_base = OTHER; note = 2'-Omethylguanosine

SEQ ID NO: 961 - RNA, 76 nt, synthetic construct; identical to SEQ ID NO: 625
  source 1..76: mol_type = other RNA
  modified_base 1: mod_base = OTHER; note = 2'-Omethylguanosine
  modified_base 2: mod_base = OTHER; note = 2'-Omethylguanosine
  modified_base 3: mod_base = OTHER; note = 2'-Omethylcytosine
  modified_base 4: mod_base = OTHER; note = 2'-Omethyluridine
  modified_base 5: mod_base = OTHER; note = 2'-Omethylcytosine
  modified_base 6: mod_base = OTHER; note = 2'-Omethylcytosine
  modified_base 22: mod_base = OTHER; note = 2'-Omethylguanosine
  modified_base 23: mod_base = OTHER; note = 2'-Omethylcytosine
  modified_base 24: mod_base = OTHER; note = 2'-Omethylguanosine
  modified_base 25: mod_base = OTHER; note = 2'-Omethylcytosine
  modified_base 73: mod_base = OTHER; note = 2'-Omethylguanosine

SEQ ID NO: 962 - RNA, 76 nt, synthetic construct; identical to SEQ ID NO: 625
  source 1..76: mol_type = other RNA
  modified_base 1: mod_base = OTHER; note = 2'-Omethylguanosine
  modified_base 2: mod_base = OTHER; note = 2'-Omethylguanosine
  modified_base 3: mod_base = OTHER; note = 2'-Omethylcytosine
  modified_base 4: mod_base = OTHER; note = 2'-Omethyluridine
  modified_base 5: mod_base = OTHER; note = 2'-Omethylcytosine
  modified_base 6: mod_base = OTHER; note = 2'-Omethylcytosine
  modified_base 10: mod_base = OTHER; note = 2'-Omethylguanosine
  modified_base 11: mod_base = OTHER; note = 2'-Omethylcytosine
  modified_base 12: mod_base = OTHER; note = 2'-Omethylguanosine
  modified_base 13: mod_base = OTHER; note = 2'-Omethylcytosine
  modified_base 22: mod_base = OTHER; note = 2'-Omethylguanosine
  modified_base 23: mod_base = OTHER; note = 2'-Omethylcytosine
  modified_base 24: mod_base = OTHER; note = 2'-Omethylguanosine
  modified_base 25: mod_base = OTHER; note = 2'-Omethylcytosine
  modified_base 49: mod_base = OTHER; note = 2'-Omethylcytosine
  modified_base 50: mod_base = OTHER; note = 2'-Omethylcytosine
  modified_base 51: mod_base = OTHER; note = 2'-Omethylguanosine
  modified_base 52: mod_base = OTHER; note = 2'-Omethylguanosine
  modified_base 53: mod_base = OTHER; note = 2'-Omethylguanosine

SEQ ID NO: 963 - RNA, 76 nt, synthetic construct; identical to SEQ ID NO: 625
  source 1..76: mol_type = other RNA
  modified_base 1: mod_base = OTHER; note = 2'-Omethylguanosine
  modified_base 2: mod_base = OTHER; note = 2'-Omethylguanosine
  modified_base 3: mod_base = OTHER; note = 2'-Omethylcytosine
  modified_base 4: mod_base = OTHER; note = 2'-Omethyluridine
  modified_base 5: mod_base = OTHER; note = 2'-Omethylcytosine
  modified_base 6: mod_base = OTHER; note = 2'-Omethylcytosine
  modified_base 10: mod_base = OTHER; note = 2'-Omethylguanosine
  modified_base 11: mod_base = OTHER; note = 2'-Omethylcytosine
  modified_base 12: mod_base = OTHER; note = 2'-Omethylguanosine
  modified_base 13: mod_base = OTHER; note = 2'-Omethylcytosine
  modified_base 22: mod_base = OTHER; note = 2'-Omethylguanosine
  modified_base 23: mod_base = OTHER; note = 2'-Omethylcytosine
  modified_base 24: mod_base = OTHER; note = 2'-Omethylguanosine
  modified_base 25: mod_base = OTHER; note = 2'-Omethylcytosine
  modified_base 73: mod_base = OTHER; note = 2'-Omethylguanosine

SEQ ID NO: 964 - RNA, 76 nt, synthetic construct; identical to SEQ ID NO: 625
  source 1..76: mol_type = other RNA
  modified_base 1: mod_base = OTHER; note = 2'-Omethylguanosine
  modified_base 2: mod_base = OTHER; note = 2'-Omethylguanosine
  modified_base 3: mod_base = OTHER; note = 2'-Omethylcytosine
  modified_base 4: mod_base = OTHER; note = 2'-Omethyluridine
  modified_base 5: mod_base = OTHER; note = 2'-Omethylcytosine
  modified_base 6: mod_base = OTHER; note = 2'-Omethylcytosine
  modified_base 10: mod_base = OTHER; note = 2'-Omethylguanosine
  modified_base 11: mod_base = OTHER; note = 2'-Omethylcytosine
  modified_base 12: mod_base = OTHER; note = 2'-Omethylguanosine
  modified_base 13: mod_base = OTHER; note = 2'-Omethylcytosine
  modified_base 49: mod_base = OTHER; note = 2'-Omethylcytosine
  modified_base 50: mod_base = OTHER; note = 2'-Omethylcytosine
  modified_base 51: mod_base = OTHER; note = 2'-Omethylguanosine
  modified_base 52: mod_base = OTHER; note = 2'-Omethylguanosine
  modified_base 53: mod_base = OTHER; note = 2'-Omethylguanosine
  modified_base 73: mod_base = OTHER; note = 2'-Omethylguanosine

SEQ ID NO: 965 - RNA, 76 nt, synthetic construct; identical to SEQ ID NO: 625
  source 1..76: mol_type = other RNA
  modified_base 10: mod_base = OTHER; note = 2'-Omethylguanosine
  modified_base 11: mod_base = OTHER; note = 2'-Omethylcytosine
  modified_base 12: mod_base = OTHER; note = 2'-Omethylguanosine
  modified_base 13: mod_base = OTHER; note = 2'-Omethylcytosine
  modified_base 22: mod_base = OTHER; note = 2'-Omethylguanosine
  modified_base 23: mod_base = OTHER; note = 2'-Omethylcytosine
  modified_base 24: mod_base = OTHER; note = 2'-Omethylguanosine
  modified_base 25: mod_base = OTHER; note = 2'-Omethylcytosine
  modified_base 49: mod_base = OTHER; note = 2'-Omethylcytosine
  modified_base 50: mod_base = OTHER; note = 2'-Omethylcytosine
  modified_base 51: mod_base = OTHER; note = 2'-Omethylguanosine
  modified_base 52: mod_base = OTHER; note = 2'-Omethylguanosine
  modified_base 53: mod_base = OTHER; note = 2'-Omethylguanosine
  modified_base 73: mod_base = OTHER; note = 2'-Omethylguanosine

SEQ ID NO: 966 - RNA, 76 nt, synthetic construct; identical to SEQ ID NO: 625
  source 1..76: mol_type = other RNA
  modified_base 1: mod_base = OTHER; note = 2'-Omethylguanosine
  modified_base 2: mod_base = OTHER; note = 2'-Omethylguanosine
  modified_base 3: mod_base = OTHER; note = 2'-Omethylcytosine
  modified_base 4: mod_base = OTHER; note = 2'-Omethyluridine
  modified_base 5: mod_base = OTHER; note = 2'-Omethylcytosine
  modified_base 6: mod_base = OTHER; note = 2'-Omethylcytosine
  modified_base 10: mod_base = OTHER; note = 2'-Omethylguanosine
  modified_base 11: mod_base = OTHER; note = 2'-Omethylcytosine
  modified_base 12: mod_base = OTHER; note = 2'-Omethylguanosine
  modified_base 13: mod_base = OTHER; note = 2'-Omethylcytosine
  modified_base 22: mod_base = OTHER; note = 2'-Omethylguanosine
  modified_base 23: mod_base = OTHER; note = 2'-Omethylcytosine
  modified_base 24: mod_base = OTHER; note = 2'-Omethylguanosine
  modified_base 25: mod_base = OTHER; note = 2'-Omethylcytosine
  modified_base 49: mod_base = OTHER; note = 2'-Omethylcytosine
  modified_base 50: mod_base = OTHER; note = 2'-Omethylcytosine
  modified_base 51: mod_base = OTHER; note = 2'-Omethylguanosine
  modified_base 52: mod_base = OTHER; note = 2'-Omethylguanosine
  modified_base 53: mod_base = OTHER; note = 2'-Omethylguanosine
  modified_base 73: mod_base = OTHER; note = 2'-Omethylguanosine

SEQ ID NO: 967 - RNA, 73 nt, synthetic construct; identical to SEQ ID NO: 935
  source 1..73: mol_type = other RNA
  modified_base 1: mod_base = OTHER; note = 2'-Omethylguanosine
  modified_base 2: mod_base = OTHER; note = 2'-Omethylguanosine
  modified_base 3: mod_base = OTHER; note = 2'-Omethylcytosine
  modified_base 4: mod_base = OTHER; note = 2'-Omethyluridine
  modified_base 5: mod_base = OTHER; note = 2'-Omethylcytosine
  modified_base 6: mod_base = OTHER; note = 2'-Omethylcytosine
  modified_base 10: mod_base = OTHER; note = 2'-Omethylguanosine
  modified_base 11: mod_base = OTHER; note = 2'-Omethylcytosine
  modified_base 12: mod_base = OTHER; note = 2'-Omethylguanosine
  modified_base 13: mod_base = OTHER; note = 2'-Omethylcytosine
  modified_base 22: mod_base = OTHER; note = 2'-Omethylguanosine
  modified_base 23: mod_base = OTHER; note = 2'-Omethylcytosine
  modified_base 24: mod_base = OTHER; note = 2'-Omethylguanosine
  modified_base 25: mod_base = OTHER; note = 2'-Omethylcytosine
  modified_base 49: mod_base = OTHER; note = 2'-Omethylcytosine
  modified_base 50: mod_base = OTHER; note = 2'-Omethylcytosine
  modified_base 51: mod_base = OTHER; note = 2'-Omethylguanosine
  modified_base 52: mod_base = OTHER; note = 2'-Omethylguanosine
  modified_base 53: mod_base = OTHER; note = 2'-Omethylguanosine
  modified_base 73: mod_base = OTHER; note = 2'-Omethylguanosine

SEQ ID NO: 968 - RNA, 76 nt, synthetic construct
  source 1..76: mol_type = other RNA
ggctccgtggcgcaatggatagcgcattggacttcaaattcaaaggttccgggttcgagtcccggcggagccgcca

SEQ ID NO: 969 - RNA, 73 nt, synthetic construct
  source 1..73: mol_type = other RNA
ggctccgtggcgcaatggatagcgcattggacttcaaattcaaaggttccgggttcgagtcccggcggagccg

SEQ ID NO: 970 - RNA, 73 nt, synthetic construct; identical to SEQ ID NO: 935
  source 1..73: mol_type = other RNA
  modified_base 1: mod_base = OTHER; note = 2'-Omethylguanosine

SEQ ID NO: 971 - RNA, 73 nt, synthetic construct; identical to SEQ ID NO: 935
  source 1..73: mol_type = other RNA
  modified_base 1: mod_base = OTHER; note = 2'-Omethylguanosine
  modified_base 2: mod_base = OTHER; note = 2'-Omethylguanosine
  modified_base 3: mod_base = OTHER; note = 2'-Omethylcytosine
  modified_base 4: mod_base = OTHER; note = 2'-Omethyluridine
  modified_base 5: mod_base = OTHER; note = 2'-Omethylcytosine
  modified_base 6: mod_base = OTHER; note = 2'-Omethylcytosine

SEQ ID NO: 972 - RNA, 73 nt, synthetic construct; identical to SEQ ID NO: 935
  source 1..73: mol_type = other RNA
  modified_base 1: mod_base = OTHER; note = 2'-Omethylguanosine
  modified_base 2: mod_base = OTHER; note = 2'-Omethylguanosine
  modified_base 3: mod_base = OTHER; note = 2'-Omethylcytosine
  modified_base 4: mod_base = OTHER; note = 2'-Omethyluridine
  modified_base 5: mod_base = OTHER; note = 2'-Omethylcytosine
  modified_base 6: mod_base = OTHER; note = 2'-Omethylcytosine
  modified_base 7: mod_base = OTHER; note = 2'-Omethylguanosine

SEQ ID NO: 973 - RNA, 73 nt, synthetic construct; identical to SEQ ID NO: 935
  source 1..73: mol_type = other RNA
  modified_base 10: mod_base = OTHER; note = 2'-Omethylguanosine
  modified_base 11: mod_base = OTHER; note = 2'-Omethylcytosine
  modified_base 12: mod_base = OTHER; note = 2'-Omethylguanosine
  modified_base 13: mod_base = OTHER; note = 2'-Omethylcytosine
  modified_base 22: mod_base = OTHER; note = 2'-Omethylguanosine
  modified_base 23: mod_base = OTHER; note = 2'-Omethylcytosine
  modified_base 24: mod_base = OTHER; note = 2'-Omethylguanosine
  modified_base 25: mod_base = OTHER; note = 2'-Omethylcytosine

SEQ ID NO: 974 - RNA, 73 nt, synthetic construct; identical to SEQ ID NO: 935
  source 1..73: mol_type = other RNA
  modified_base 49: mod_base = OTHER; note = 2'-Omethylcytosine
  modified_base 50: mod_base = OTHER; note = 2'-Omethylcytosine
  modified_base 51: mod_base = OTHER; note = 2'-Omethylguanosine
  modified_base 52: mod_base = OTHER; note = 2'-Omethylguanosine
  modified_base 53: mod_base = OTHER; note = 2'-Omethylguanosine

SEQ ID NO: 975 - skipped

SEQ ID NO: 976 - RNA, 73 nt, synthetic construct; identical to SEQ ID NO: 935
  source 1..73: mol_type = other RNA
  modified_base 37: mod_base = OTHER; note = Adenosine phosphorothiorate

SEQ ID NO: 977 - RNA, 73 nt, synthetic construct; identical to SEQ ID NO: 935
  source 1..73: mol_type = other RNA
  modified_base 54: mod_base = OTHER; note = Uridine phosphorothiorate

SEQ ID NO: 978 - RNA, 76 nt, synthetic construct; identical to SEQ ID NO: 625
  source 1..76: mol_type = other RNA
  modified_base 1: mod_base = OTHER; note = 2'-Omethylguanosine
  modified_base 27: mod_base = OTHER; note = 2'-Omethyluridine
  modified_base 28: mod_base = OTHER; note = 2'-Omethyluridine
  modified_base 29: mod_base = OTHER; note = 2'-Omethylguanosine
  modified_base 30: mod_base = OTHER; note = 2'-Omethylguanosine
  modified_base 73: mod_base = OTHER; note = 2'-Omethylguanosine

SEQ ID NO: 979 - RNA, 76 nt, synthetic construct; identical to SEQ ID NO: 625
  source 1..76: mol_type = other RNA
  modified_base 1: mod_base = OTHER; note = 2'-Omethylguanosine
  modified_base 28: mod_base = OTHER; note = 2'-Omethyluridine
  modified_base 29: mod_base = OTHER; note = 2'-Omethylguanosine
  modified_base 30: mod_base = OTHER; note = 2'-Omethylguanosine
  modified_base 73: mod_base = OTHER; note = 2'-Omethylguanosine

SEQ ID NO: 980 - RNA, 76 nt, synthetic construct; identical to SEQ ID NO: 625
  source 1..76: mol_type = other RNA
  modified_base 1: mod_base = OTHER; note = 2'-Omethylguanosine
  modified_base 28: mod_base = OTHER; note = 2'-Omethyluridine
  modified_base 29: mod_base = OTHER; note = 2'-Omethylguanosine
  modified_base 73: mod_base = OTHER; note = 2'-Omethylguanosine

SEQ ID NO: 981 - RNA, 76 nt, synthetic construct; identical to SEQ ID NO: 625
  source 1..76: mol_type = other RNA
  modified_base 1: mod_base = OTHER; note = 2'-Omethylguanosine
  modified_base 29: mod_base = OTHER; note = 2'-Omethylguanosine
  modified_base 30: mod_base = OTHER; note = 2'-Omethylguanosine
  modified_base 73: mod_base = OTHER; note = 2'-Omethylguanosine

SEQ ID NO: 982 - RNA, 76 nt, synthetic construct; identical to SEQ ID NO: 625
  source 1..76: mol_type = other RNA
  modified_base 1: mod_base = OTHER; note = 2'-Omethylguanosine
  modified_base 28: mod_base = OTHER; note = 2'-Omethyluridine
  modified_base 30: mod_base = OTHER; note = 2'-Omethylguanosine
  modified_base 73: mod_base = OTHER; note = 2'-Omethylguanosine

SEQ ID NO: 983 - RNA, 76 nt, synthetic construct; identical to SEQ ID NO: 625
  source 1..76: mol_type = other RNA
  modified_base 1: mod_base = OTHER; note = 2'-Omethylguanosine
  modified_base 27: mod_base = OTHER; note = 2'-Omethyluridine
  modified_base 28: mod_base = OTHER; note = 2'-Omethyluridine
  modified_base 29: mod_base = OTHER; note = 2'-Omethylguanosine
  modified_base 73: mod_base = OTHER; note = 2'-Omethylguanosine

SEQ ID NO: 984 - RNA, 76 nt, synthetic construct; identical to SEQ ID NO: 625
  source 1..76: mol_type = other RNA
  modified_base 1: mod_base = OTHER; note = 2'-Omethylguanosine
  modified_base 27: mod_base = OTHER; note = 2'-Omethyluridine
  modified_base 29: mod_base = OTHER; note = 2'-Omethylguanosine
  modified_base 30: mod_base = OTHER; note = 2'-Omethylguanosine
  modified_base 73: mod_base = OTHER; note = 2'-Omethylguanosine

SEQ ID NO: 985 - RNA, 76 nt, synthetic construct; identical to SEQ ID NO: 625
  source 1..76: mol_type = other RNA
  modified_base 1: mod_base = OTHER; note = 2'-Omethylguanosine
  modified_base 27: mod_base = OTHER; note = 2'-Omethyluridine
  modified_base 28: mod_base = OTHER; note = 2'-Omethyluridine
  modified_base 30: mod_base = OTHER; note = 2'-Omethylguanosine
  modified_base 73: mod_base = OTHER; note = 2'-Omethylguanosine

SEQ ID NO: 986 - RNA, 76 nt, synthetic construct; identical to SEQ ID NO: 625
  source 1..76: mol_type = other RNA
  modified_base 1: mod_base = OTHER; note = 2'-Omethylguanosine
  modified_base 41: mod_base = OTHER; note = 2'-Omethylcytosine
  modified_base 42: mod_base = OTHER; note = 2'-Omethyladenosine
  modified_base 43: mod_base = OTHER; note = 2'-Omethyladenosine
  modified_base 73: mod_base = OTHER; note = 2'-Omethylguanosine

SEQ ID NO: 987 - RNA, 76 nt, synthetic construct; identical to SEQ ID NO: 625
  source 1..76: mol_type = other RNA
  modified_base 1: mod_base = OTHER; note = 2'-Omethylguanosine
  modified_base 41: mod_base = OTHER; note = 2'-fluorocytosine
  modified_base 42: mod_base = OTHER; note = 2'-Omethyladenosine
  modified_base 43: mod_base = OTHER; note = 2'-Omethyladenosine
  modified_base 73: mod_base = OTHER; note = 2'-Omethylguanosine

SEQ ID NO: 988 - skipped

SEQ ID NO: 989 - RNA, 76 nt, synthetic construct; identical to SEQ ID NO: 625
  source 1..76: mol_type = other RNA
  modified_base 1: mod_base = OTHER; note = 2'-Omethylguanosine
  modified_base 40: mod_base = OTHER; note = 2'-fluorouridine
  modified_base 41: mod_base = OTHER; note = 2'-Omethylcytosine
  modified_base 42: mod_base = OTHER; note = 2'-Omethyladenosine
  modified_base 43: mod_base = OTHER; note = 2'-Omethyladenosine
  modified_base 73: mod_base = OTHER; note = 2'-Omethylguanosine

SEQ ID NO: 990 - RNA, 76 nt, synthetic construct; identical to SEQ ID NO: 625
  source 1..76: mol_type = other RNA
  modified_base 1: mod_base = OTHER; note = 2'-Omethylguanosine
  modified_base 40: mod_base = OTHER; note = 2'-fluorouridine
  modified_base 41: mod_base = OTHER; note = 2'-fluorocytosine
  modified_base 42: mod_base = OTHER; note = 2'-Omethyladenosine
  modified_base 43: mod_base = OTHER; note = 2'-Omethyladenosine
  modified_base 73: mod_base = OTHER; note = 2'-Omethylguanosine

SEQ ID NO: 991 - RNA, 76 nt, synthetic construct; identical to SEQ ID NO: 625
  source 1..76: mol_type = other RNA
  modified_base 1: mod_base = OTHER; note = 2'-Omethylguanosine
  modified_base 28: mod_base = OTHER; note = 2'-Omethyluridine
  modified_base 29: mod_base = OTHER; note = 2'-Omethylguanosine
  modified_base 30: mod_base = OTHER; note = 2'-Omethylguanosine
  modified_base 41: mod_base = OTHER; note = 2'-Omethylcytosine
  modified_base 42: mod_base = OTHER; note = 2'-Omethyladenosine
  modified_base 43: mod_base = OTHER; note = 2'-Omethyladenosine
  modified_base 73: mod_base = OTHER; note = 2'-Omethylguanosine

SEQ ID NO: 992 - RNA, 76 nt, synthetic construct; identical to SEQ ID NO: 625
  source 1..76: mol_type = other RNA
  modified_base 1: mod_base = OTHER; note = 2'-Omethylguanosine
  modified_base 27: mod_base = OTHER; note = 2'-Omethyluridine
  modified_base 28: mod_base = OTHER; note = 2'-Omethyluridine
  modified_base 29: mod_base = OTHER; note = 2'-Omethylguanosine
  modified_base 30: mod_base = OTHER; note = 2'-Omethylguanosine
  modified_base 41: mod_base = OTHER; note = 2'-Omethylcytosine
  modified_base 42: mod_base = OTHER; note = 2'-Omethyladenosine
  modified_base 43: mod_base = OTHER; note = 2'-Omethyladenosine
  modified_base 73: mod_base = OTHER; note = 2'-Omethylguanosine

SEQ ID NO: 993 - RNA, 76 nt, synthetic construct; identical to SEQ ID NO: 625
  source 1..76: mol_type = other RNA
  modified_base 1: mod_base = OTHER; note = 2'-Omethylguanosine
  modified_base 28: mod_base = OTHER; note = 2'-Omethyluridine
  modified_base 29: mod_base = OTHER; note = 2'-Omethylguanosine
  modified_base 30: mod_base = OTHER; note = 2'-Omethylguanosine
  modified_base 41: mod_base = OTHER; note = 2'-fluorocytosine
  modified_base 42: mod_base = OTHER; note = 2'-Omethyladenosine
  modified_base 43: mod_base = OTHER; note = 2'-Omethyladenosine
  modified_base 73: mod_base = OTHER; note = 2'-Omethylguanosine

SEQ ID NO: 994 - RNA, 76 nt, synthetic construct; identical to SEQ ID NO: 625
  source 1..76: mol_type = other RNA
  modified_base 1: mod_base = OTHER; note = 2'-Omethylguanosine
  modified_base 28: mod_base = OTHER; note = 2'-Omethyluridine
  modified_base 29: mod_base = OTHER; note = 2'-Omethylguanosine
  modified_base 30: mod_base = OTHER; note = 2'-Omethylguanosine
  modified_base 40: mod_base = OTHER; note = 2'-fluorouridine
  modified_base 41: mod_base = OTHER; note = 2'-Omethylcytosine
  modified_base 42: mod_base = OTHER; note = 2'-Omethyladenosine
  modified_base 43: mod_base = OTHER; note = 2'-Omethyladenosine
  modified_base 73: mod_base = OTHER; note = 2'-Omethylguanosine

SEQ ID NO: 995 - RNA, 76 nt, synthetic construct; identical to SEQ ID NO: 625
  source 1..76: mol_type = other RNA
  modified_base 1: mod_base = OTHER; note = 2'-Omethylguanosine
  modified_base 28: mod_base = OTHER; note = 2'-Omethyluridine
  modified_base 29: mod_base = OTHER; note = 2'-Omethylguanosine
  modified_base 30: mod_base = OTHER; note = 2'-Omethylguanosine
  modified_base 40: mod_base = OTHER; note = 2'-fluorouridine
  modified_base 41: mod_base = OTHER; note = 2'-fluorocytosine
  modified_base 42: mod_base = OTHER; note = 2'-Omethyladenosine
  modified_base 43: mod_base = OTHER; note = 2'-Omethyladenosine
  modified_base 73: mod_base = OTHER; note = 2'-Omethylguanosine

SEQ ID NO: 996 - RNA, 76 nt, synthetic construct; identical to SEQ ID NO: 625
  source 1..76: mol_type = other RNA
  modified_base 1: mod_base = OTHER; note = 2'-Omethylguanosine
  modified_base 28: mod_base = OTHER; note = 2'-Omethyluridine
  modified_base 29: mod_base = OTHER; note = 2'-Omethylguanosine
  modified_base 30: mod_base = OTHER; note = 2'-Omethylguanosine
  modified_base 40: mod_base = OTHER; note = 2'-fluorouridine
  modified_base 41: mod_base = OTHER; note = 2'-Omethylcytosine
  modified_base 42: mod_base = OTHER; note = 2'-Omethyladenosine phosphorothiorate
  modified_base 43: mod_base = OTHER; note = 2'-Omethyladenosine
  modified_base 73: mod_base = OTHER; note = 2'-Omethylguanosine

SEQ ID NO: 997 - RNA, 76 nt, synthetic construct; identical to SEQ ID NO: 625
  source 1..76: mol_type = other RNA
  modified_base 1: mod_base = OTHER; note = 2'-Omethylguanosine
  modified_base 28: mod_base = OTHER; note = 2'-Omethyluridine
  modified_base 29: mod_base = OTHER; note = 2'-Omethylguanosine
  modified_base 30: mod_base = OTHER; note = 2'-Omethylguanosine
  modified_base 40: mod_base = OTHER; note = 2'-fluorouridine
  modified_base 41: mod_base = OTHER; note = 2'-fluorocytosine
  modified_base 42: mod_base = OTHER; note = 2'-Omethyladenosine phosphorothiorate
  modified_base 43: mod_base = OTHER; note = 2'-Omethyladenosine
  modified_base 73: mod_base = OTHER; note = 2'-Omethylguanosine

SEQ ID NO: 998 - RNA, 76 nt, synthetic construct; identical to SEQ ID NO: 625
  source 1..76: mol_type = other RNA
  modified_base 1: mod_base = OTHER; note = 2'-Omethylguanosine
  modified_base 37: mod_base = OTHER; note = Adenosine phosphorothiorate
  modified_base 38: mod_base = OTHER; note = Adenosine phosphorothiorate
  modified_base 73: mod_base = OTHER; note = 2'-Omethylguanosine

SEQ ID NO: 999 - RNA, 76 nt, synthetic construct; identical to SEQ ID NO: 625
  source 1..76: mol_type = other RNA
  modified_base 1: mod_base = OTHER; note = 2'-Omethylguanosine
  modified_base 35: mod_base = OTHER; note = Cytosine phosphorothiorate
  modified_base 37: mod_base = OTHER; note = Adenosine phosphorothiorate
  modified_base 73: mod_base = OTHER; note = 2'-Omethylguanosine

SEQ ID NO: 1000 - RNA, 76 nt, synthetic construct; identical to SEQ ID NO: 625
  source 1..76: mol_type = other RNA
  modified_base 1: mod_base = OTHER; note = 2'-Omethylguanosine
  modified_base 35: mod_base = OTHER; note = Cytosine phosphorothiorate
  modified_base 38: mod_base = OTHER; note = Adenosine phosphorothiorate
  modified_base 73: mod_base = OTHER; note = 2'-Omethylguanosine

SEQ ID NO: 1001 - RNA, 76 nt, synthetic construct; identical to SEQ ID NO: 625
  source 1..76: mol_type = other RNA
  modified_base 1: mod_base = OTHER; note = 2'-Omethylguanosine
  modified_base 35: mod_base = OTHER; note = Cytosine phosphorothiorate
  modified_base 37: mod_base = OTHER; note = Adenosine phosphorothiorate
  modified_base 38: mod_base = OTHER; note = Adenosine phosphorothiorate
  modified_base 73: mod_base = OTHER; note = 2'-Omethylguanosine

SEQ ID NO: 1002 - skipped

SEQ ID NO: 1003 - RNA, 76 nt, synthetic construct; identical to SEQ ID NO: 625
  source 1..76: mol_type = other RNA
  modified_base 1: mod_base = OTHER; note = 2'-Omethylguanosine
  modified_base 33: mod_base = OTHER; note = 2'-fluorouridine
  modified_base 35: mod_base = OTHER; note = Cytosine phosphorothiorate
  modified_base 37: mod_base = OTHER; note = Adenosine phosphorothiorate
  modified_base 38: mod_base = OTHER; note = Adenosine phosphorothiorate
  modified_base 73: mod_base = OTHER; note = 2'-Omethylguanosine

SEQ ID NO: 1004 - RNA, 76 nt, synthetic construct; identical to SEQ ID NO: 625
  source 1..76: mol_type = other RNA
  modified_base 1: mod_base = OTHER; note = 2'-Omethylguanosine
  modified_base 44: mod_base = OTHER; note = 2'-Omethyladenosine
  modified_base 45: mod_base = OTHER; note = 2'-Omethylguanosine
  modified_base 73: mod_base = OTHER; note = 2'-Omethylguanosine

SEQ ID NO: 1005 - RNA, 76 nt, synthetic construct; identical to SEQ ID NO: 625
  source 1..76: mol_type = other RNA
  modified_base 1: mod_base = OTHER; note = 2'-Omethylguanosine
  modified_base 46: mod_base = OTHER; note = 2'-fluoroguanosine
  modified_base 47: mod_base = OTHER; note = 2'-fluorouridine
  modified_base 73: mod_base = OTHER; note = 2'-Omethylguanosine

SEQ ID NO: 1006 - RNA, 76 nt, synthetic construct; identical to SEQ ID NO: 625
  source 1..76: mol_type = other RNA
  modified_base 1: mod_base = OTHER; note = 2'-Omethylguanosine
  modified_base 47: mod_base = OTHER; note = 2'-fluorouridine
  modified_base 48: mod_base = OTHER; note = 2'-fluorouridine
  modified_base 73: mod_base = OTHER; note = 2'-Omethylguanosine

SEQ ID NO: 1007 - RNA, 76 nt, synthetic construct; identical to SEQ ID NO: 625
  source 1..76: mol_type = other RNA
  modified_base 1: mod_base = OTHER; note = 2'-Omethylguanosine
  modified_base 46: mod_base = OTHER; note = 2'-fluoroguanosine
  modified_base 48: mod_base = OTHER; note = 2'-fluorouridine
  modified_base 73: mod_base = OTHER; note = 2'-Omethylguanosine

SEQ ID NO: 1008 - RNA, 76 nt, synthetic construct; identical to SEQ ID NO: 625
  source 1..76: mol_type = other RNA
  modified_base 1: mod_base = OTHER; note = 2'-Omethylguanosine
  modified_base 46: mod_base = OTHER; note = 2'-fluoroguanosine
  modified_base 47: mod_base = OTHER; note = 2'-fluorouridine
  modified_base 48: mod_base = OTHER; note = 2'-fluorouridine
  modified_base 73: mod_base = OTHER; note = 2'-Omethylguanosine

SEQ ID NO: 1009 - RNA, 76 nt, synthetic construct; identical to SEQ ID NO: 625
  source 1..76: mol_type = other RNA
  modified_base 1: mod_base = OTHER; note = 2'-Omethylguanosine
  modified_base 44: mod_base = OTHER; note = 2'-Omethyladenosine
  modified_base 45: mod_base = OTHER; note = 2'-Omethylguanosine
  modified_base 46: mod_base = OTHER; note = 2'-fluoroguanosine
  modified_base 47: mod_base = OTHER; note = 2'-fluorouridine
  modified_base 73: mod_base = OTHER; note = 2'-Omethylguanosine

SEQ ID NO: 1010 - RNA, 76 nt, synthetic construct; identical to SEQ ID NO: 625
  source 1..76: mol_type = other RNA
  modified_base 1: mod_base = OTHER; note = 2'-Omethylguanosine
  modified_base 44: mod_base = OTHER; note = 2'-Omethyladenosine
  modified_base 45: mod_base = OTHER; note = 2'-Omethylguanosine
  modified_base 47: mod_base = OTHER; note = 2'-fluorouridine
  modified_base 48: mod_base = OTHER; note = 2'-fluorouridine
  modified_base 73: mod_base = OTHER; note = 2'-Omethylguanosine

SEQ ID NO: 1011 - RNA, 76 nt, synthetic construct; identical to SEQ ID NO: 625
  source 1..76: mol_type = other RNA
  modified_base 1: mod_base = OTHER; note = 2'-Omethylguanosine
  modified_base 44: mod_base = OTHER; note = 2'-Omethyladenosine
  modified_base 45: mod_base = OTHER; note = 2'-Omethylguanosine
  modified_base 46: mod_base = OTHER; note = 2'-fluoroguanosine
  modified_base 48: mod_base = OTHER; note = 2'-fluorouridine
  modified_base 73: mod_base = OTHER; note = 2'-Omethylguanosine

SEQ ID NO: 1012 - RNA, 76 nt, synthetic construct; identical to SEQ ID NO: 625
  source 1..76: mol_type = other RNA
  modified_base 1: mod_base = OTHER; note = 2'-Omethylguanosine
  modified_base 44: mod_base = OTHER; note = 2'-Omethyladenosine
  modified_base 45: mod_base = OTHER; note = 2'-Omethylguanosine
  modified_base 46: mod_base = OTHER; note = 2'-fluoroguanosine
  modified_base 47: mod_base = OTHER; note = 2'-fluorouridine
  modified_base 48: mod_base = OTHER; note = 2'-fluorouridine
  modified_base 73: mod_base = OTHER; note = 2'-Omethylguanosine

SEQ ID NO: 1013 - RNA, 76 nt, synthetic construct; identical to SEQ ID NO: 625
  source 1..76: mol_type = other RNA
  modified_base 1: mod_base = OTHER; note = 2'-Omethylguanosine
  modified_base 44: mod_base = OTHER; note = 2'-Omethyladenosine phosphorothiorate
  modified_base 45: mod_base = OTHER; note = 2'-Omethylguanosine
  modified_base 46: mod_base = OTHER; note = 2'-fluoroguanosine
  modified_base 47: mod_base = OTHER; note = 2'-fluorouridine
  modified_base 48: mod_base = OTHER; note = 2'-fluorouridine
  modified_base 73: mod_base = OTHER; note = 2'-Omethylguanosine

SEQ ID NO: 1014 - RNA, 76 nt, synthetic construct; identical to SEQ ID NO: 625
  source 1..76: mol_type = other RNA
  modified_base 1: mod_base = OTHER; note = 2'-Omethylguanosine
  modified_base 44: mod_base = OTHER; note = 2'-Omethyladenosine phosphorothiorate
  modified_base 45: mod_base = OTHER; note = 2'-Omethylguanosine
  modified_base 46: mod_base = OTHER; note = 2'-fluoroguanosine phosphorothiorate
  modified_base 47: mod_base = OTHER; note = 2'-fluorouridine
  modified_base 48: mod_base = OTHER; note = 2'-fluorouridine
  modified_base 73: mod_base = OTHER; note = 2'-Omethylguanosine

SEQ ID NO: 1015 - skipped

SEQ ID NO: 1016 - RNA, 76 nt, synthetic construct; identical to SEQ ID NO: 625
  source 1..76: mol_type = other RNA
  modified_base 1: mod_base = OTHER; note = 2'-Omethylguanosine
  modified_base 16: mod_base = OTHER; note = 2'-Omethyluridine
  modified_base 17: mod_base = OTHER; note = 2'-Omethylguanosine
  modified_base 18: mod_base = OTHER; note = 2'-Omethylguanosine
  modified_base 54: mod_base = OTHER; note = 2'-Omethyluridine
  modified_base 56: mod_base = OTHER; note = 2'-Omethylcytosine
  modified_base 59: mod_base = OTHER; note = 2'-Omethylguanosine
  modified_base 73: mod_base = OTHER; note = 2'-Omethylguanosine

SEQ ID NO: 1017 - RNA, 76 nt, synthetic construct; identical to SEQ ID NO: 625
  source 1..76: mol_type = other RNA
  modified_base 1: mod_base = OTHER; note = 2'-Omethylguanosine
  modified_base 16: mod_base = OTHER; note = 2'-Omethyluridine
  modified_base 17: mod_base = OTHER; note = 2'-Omethylguanosine
  modified_base 18: mod_base = OTHER; note = 2'-Omethylguanosine
  modified_base 54: mod_base = OTHER; note = 2'-Omethyluridine
  modified_base 56: mod_base = OTHER; note = 2'-Omethylcytosine
  modified_base 57: mod_base = OTHER; note = 2'-Omethylguanosine
  modified_base 59: mod_base = OTHER; note = 2'-Omethylguanosine
  modified_base 73: mod_base = OTHER; note = 2'-Omethylguanosine

SEQ ID NO: 1018 - RNA, 76 nt, synthetic construct; identical to SEQ ID NO: 625
  source 1..76: mol_type = other RNA
  modified_base 1: mod_base = OTHER; note = 2'-Omethylguanosine
  modified_base 16: mod_base = OTHER; note = 2'-Omethyluridine
  modified_base 17: mod_base = OTHER; note = 2'-Omethylguanosine
  modified_base 18: mod_base = OTHER; note = 2'-Omethylguanosine
  modified_base 54: mod_base = OTHER; note = 2'-Omethyluridine
  modified_base 56: mod_base = OTHER; note = 2'-Omethylcytosine
  modified_base 59: mod_base = OTHER; note = 2'-Omethylguanosine
  modified_base 60: mod_base = OTHER; note = 2'-Omethyluridine
  modified_base 73: mod_base = OTHER; note = 2'-Omethylguanosine

SEQ ID NO: 1019 - RNA, 76 nt, synthetic construct; identical to SEQ ID NO: 625
  source 1..76: mol_type = other RNA
  modified_base 1: mod_base = OTHER; note = 2'-Omethylguanosine
  modified_base 16: mod_base = OTHER; note = 2'-Omethyluridine
  modified_base 17: mod_base = OTHER; note = 2'-Omethylguanosine
  modified_base 18: mod_base = OTHER; note = 2'-Omethylguanosine
  modified_base 54: mod_base = OTHER; note = 2'-Omethyluridine
  modified_base 56: mod_base = OTHER; note = 2'-Omethylcytosine
  modified_base 57: mod_base = OTHER; note = 2'-Omethylguanosine
  modified_base 59: mod_base = OTHER; note = 2'-Omethylguanosine
  modified_base 60: mod_base = OTHER; note = 2'-Omethyluridine
  modified_base 73: mod_base = OTHER; note = 2'-Omethylguanosine

SEQ ID NO: 1020 - RNA, 76 nt, synthetic construct; identical to SEQ ID NO: 625
  source 1..76: mol_type = other RNA
  modified_base 1: mod_base = OTHER; note = 2'-Omethylguanosine
  modified_base 16: mod_base = OTHER; note = 2'-Omethyluridine
  modified_base 17: mod_base = OTHER; note = 2'-Omethylguanosine
  modified_base 18: mod_base = OTHER; note = 2'-Omethylguanosine
  modified_base 54: mod_base = OTHER; note = 2'-Omethyluridine
  modified_base 56: mod_base = OTHER; note = 2'-Omethylcytosine
  modified_base 57: mod_base = OTHER; note = 2'-fluoroguanosine
  modified_base 59: mod_base = OTHER; note = 2'-Omethylguanosine
  modified_base 73: mod_base = OTHER; note = 2'-Omethylguanosine

SEQ ID NO: 1021 - RNA, 76 nt, synthetic construct; identical to SEQ ID NO: 625
  source 1..76: mol_type = other RNA
  modified_base 1: mod_base = OTHER; note = 2'-Omethylguanosine
  modified_base 16: mod_base = OTHER; note = 2'-Omethyluridine
  modified_base 17: mod_base = OTHER; note = 2'-Omethylguanosine
  modified_base 18: mod_base = OTHER; note = 2'-Omethylguanosine
  modified_base 54: mod_base = OTHER; note = 2'-Omethyluridine
  modified_base 56: mod_base = OTHER; note = 2'-Omethylcytosine
  modified_base 58: mod_base = OTHER; note = 2'-fluoroadenosine
  modified_base 59: mod_base = OTHER; note = 2'-Omethylguanosine
  modified_base 73: mod_base = OTHER; note = 2'-Omethylguanosine

SEQ ID NO: 1022 - RNA, 76 nt, synthetic construct; identical to SEQ ID NO: 625
  source 1..76: mol_type = other RNA
  modified_base 1: mod_base = OTHER; note = 2'-Omethylguanosine
  modified_base 16: mod_base = OTHER; note = 2'-Omethyluridine
  modified_base 17: mod_base = OTHER; note = 2'-Omethylguanosine
  modified_base 18: mod_base = OTHER; note = 2'-Omethylguanosine
  modified_base 54: mod_base = OTHER; note = 2'-Omethyluridine
  modified_base 56: mod_base = OTHER; note = 2'-Omethylcytosine
  modified_base 57: mod_base = OTHER; note = 2'-fluoroguanosine
  modified_base 58: mod_base = OTHER; note = 2'-fluoroadenosine
  modified_base 59: mod_base = OTHER; note = 2'-Omethylguanosine
  modified_base 73: mod_base = OTHER; note = 2'-Omethylguanosine

SEQ ID NO: 1023 - RNA, 76 nt, synthetic construct; identical to SEQ ID NO: 625
  source 1..76: mol_type = other RNA
  modified_base 1: mod_base = OTHER; note = 2'-Omethylguanosine
  modified_base 16: mod_base = OTHER; note = 2'-Omethyluridine
  modified_base 17: mod_base = OTHER; note = 2'-Omethylguanosine
  modified_base 18: mod_base = OTHER; note = 2'-Omethylguanosine
  modified_base 54: mod_base = OTHER; note = 2'-Omethyluridine
  modified_base 56: mod_base = OTHER; note = 2'-Omethylcytosine
  modified_base 58: mod_base = OTHER; note = 2'-fluoroadenosine
  modified_base 59: mod_base = OTHER; note = 2'-Omethylguanosine
  modified_base 60: mod_base = OTHER; note = 2'-fluorouridine
  modified_base 73: mod_base = OTHER; note = 2'-Omethylguanosine

SEQ ID NO: 1024 - RNA, 76 nt, synthetic construct; identical to SEQ ID NO: 625
  source 1..76: mol_type = other RNA
  modified_base 1: mod_base = OTHER; note = 2'-Omethylguanosine
  modified_base 16: mod_base = OTHER; note = 2'-Omethyluridine
  modified_base 17: mod_base = OTHER; note = 2'-Omethylguanosine
  modified_base 18: mod_base = OTHER; note = 2'-Omethylguanosine
  modified_base 54: mod_base = OTHER; note = 2'-Omethyluridine
  modified_base 56: mod_base = OTHER; note = 2'-Omethylcytosine
  modified_base 57: mod_base = OTHER; note = 2'-fluoroguanosine
  modified_base 59: mod_base = OTHER; note = 2'-Omethylguanosine
  modified_base 60: mod_base = OTHER; note = 2'-fluorouridine
  modified_base 73: mod_base = OTHER; note = 2'-Omethylguanosine

SEQ ID NO: 1025 - RNA, 76 nt, synthetic construct; identical to SEQ ID NO: 625
  source 1..76: mol_type = other RNA
  modified_base 1: mod_base = OTHER; note = 2'-Omethylguanosine
  modified_base 16: mod_base = OTHER; note = 2'-Omethyluridine
  modified_base 17: mod_base = OTHER; note = 2'-Omethylguanosine
  modified_base 18: mod_base = OTHER; note = 2'-Omethylguanosine
  modified_base 54: mod_base = OTHER; note = 2'-Omethyluridine
  modified_base 56: mod_base = OTHER; note = 2'-Omethylcytosine
  modified_base 57: mod_base = OTHER; note = 2'-fluoroguanosine
  modified_base 58: mod_base = OTHER; note = 2'-fluoroadenosine
  modified_base 59: mod_base = OTHER; note = 2'-Omethylguanosine
  modified_base 60: mod_base = OTHER; note = 2'-fluorouridine
  modified_base 73: mod_base = OTHER; note = 2'-Omethylguanosine

SEQ ID NO: 1026 - RNA, 76 nt, synthetic construct; identical to SEQ ID NO: 625
  source 1..76: mol_type = other RNA
  modified_base 1: mod_base = OTHER; note = 2'-Omethylguanosine
  modified_base 16: mod_base = OTHER; note = 2'-Omethyluridine
  modified_base 17: mod_base = OTHER; note = 2'-Omethylguanosine
  modified_base 18: mod_base = OTHER; note = 2'-Omethylguanosine
  modified_base 54: mod_base = OTHER; note = 2'-Omethyluridine
  modified_base 56: mod_base = OTHER; note = 2'-Omethylcytosine
  modified_base 57: mod_base = OTHER; note = 2'-fluoroguanosine
  modified_base 58: mod_base = OTHER; note = 2'-fluoroadenosine
  modified_base 59: mod_base = OTHER; note = 2'-Omethylguanosine
  modified_base 60: mod_base = OTHER; note = 2'-Omethyluridine
  modified_base 73: mod_base = OTHER; note = 2'-Omethylguanosine

SEQ ID NO: 1027 - RNA, 76 nt, synthetic construct; identical to SEQ ID NO: 625
  source 1..76: mol_type = other RNA
  modified_base 1: mod_base = OTHER; note = 2'-Omethylguanosine
  modified_base 16: mod_base = OTHER; note = 2'-Omethyluridine
  modified_base 17: mod_base = OTHER; note = 2'-Omethylguanosine
  modified_base 18: mod_base = OTHER; note = 2'-Omethylguanosine
  modified_base 54: mod_base = OTHER; note = 2'-Omethyluridine phosphorothiorate
  modified_base 56: mod_base = OTHER; note = 2'-Omethylcytosine
  modified_base 59: mod_base = OTHER; note = 2'-Omethylguanosine
  modified_base 73: mod_base = OTHER; note = 2'-Omethylguanosine

SEQ ID NO: 1028 - RNA, 76 nt, synthetic construct; identical to SEQ ID NO: 625
  source 1..76: mol_type = other RNA
  modified_base 1: mod_base = OTHER; note = 2'-Omethylguanosine
  modified_base 16: mod_base = OTHER; note = 2'-Omethyluridine
  modified_base 17: mod_base = OTHER; note = 2'-Omethylguanosine
  modified_base 18: mod_base = OTHER; note = 2'-Omethylguanosine
  modified_base 54: mod_base = OTHER; note = 2'-Omethyluridine
  modified_base 55: mod_base = OTHER; note = Uridine phosphorothiorate
  modified_base 56: mod_base = OTHER; note = 2'-Omethylcytosine
  modified_base 59: mod_base = OTHER; note = 2'-Omethylguanosine
  modified_base 73: mod_base = OTHER; note = 2'-Omethylguanosine

SEQ ID NO: 1029 - RNA, 76 nt, synthetic construct; identical to SEQ ID NO: 625
  source 1..76: mol_type = other RNA
  modified_base 1: mod_base = OTHER; note = 2'-Omethylguanosine
  modified_base 16: mod_base = OTHER; note = 2'-Omethyluridine
  modified_base 17: mod_base = OTHER; note = 2'-Omethylguanosine
  modified_base 18: mod_base = OTHER; note = 2'-Omethylguanosine
  modified_base 54: mod_base = OTHER; note = 2'-Omethyluridine phosphorothiorate
  modified_base 55: mod_base = OTHER; note = Uridine phosphorothiorate
  modified_base 56: mod_base = OTHER; note = 2'-Omethylcytosine
  modified_base 59: mod_base = OTHER; note = 2'-Omethylguanosine
  modified_base 73: mod_base = OTHER; note = 2'-Omethylguanosine

SEQ ID NO: 1030 - RNA, 76 nt, synthetic construct; identical to SEQ ID NO: 625
  source 1..76: mol_type = other RNA
  modified_base 1: mod_base = OTHER; note = 2'-Omethylguanosine
  modified_base 16: mod_base = OTHER; note = 2'-Omethyluridine
  modified_base 17: mod_base = OTHER; note = 2'-Omethylguanosine
  modified_base 18: mod_base = OTHER; note = 2'-Omethylguanosine
  modified_base 54: mod_base = OTHER; note = 2'-Omethyluridine phosphorothiorate
  modified_base 55: mod_base = OTHER; note = Uridine phosphorothiorate
  modified_base 56: mod_base = OTHER; note = 2'-Omethylcytosine
  modified_base 57: mod_base = OTHER; note = 2'-fluoroguanosine
  modified_base 58: mod_base = OTHER; note = 2'-fluoroadenosine
  modified_base 59: mod_base = OTHER; note = 2'-Omethylguanosine
  modified_base 60: mod_base = OTHER; note = 2'-fluorouridine
  modified_base 73: mod_base = OTHER; note = 2'-Omethylguanosine

SEQ ID NO: 1031 - RNA, 76 nt, synthetic construct; identical to SEQ ID NO: 625
  source 1..76: mol_type = other RNA
  modified_base 1: mod_base = OTHER; note = 2'-Omethylguanosine
  modified_base 16: mod_base = OTHER; note = 2'-Omethyluridine
  modified_base 17: mod_base = OTHER; note = 2'-Omethylguanosine
  modified_base 18: mod_base = OTHER; note = 2'-Omethylguanosine
  modified_base 54: mod_base = OTHER; note = 2'-Omethyluridine phosphorothiorate
  modified_base 55: mod_base = OTHER; note = Uridine phosphorothiorate
  modified_base 56: mod_base = OTHER; note = 2'-Omethylcytosine
  modified_base 57: mod_base = OTHER; note = 2'-fluoroguanosine
  modified_base 58: mod_base = OTHER; note = 2'-fluoroadenosine
  modified_base 59: mod_base = OTHER; note = 2'-Omethylguanosine
  modified_base 60: mod_base = OTHER; note = 2'-Omethyluridine
  modified_base 73: mod_base = OTHER; note = 2'-Omethylguanosine

SEQ ID NO: 1032 - RNA, 76 nt, synthetic construct; identical to SEQ ID NO: 625
  source 1..76: mol_type = other RNA
  modified_base 1: mod_base = OTHER; note = 2'-Omethylguanosine
  modified_base 10: mod_base = OTHER; note = 2'-Omethylguanosine
  modified_base 13: mod_base = OTHER; note = 2'-Omethylcytosine
  modified_base 17: mod_base = OTHER; note = Guanosine phosphorothiorate
  modified_base 18: mod_base = OTHER; note = 2'-Omethylguanosine
  modified_base 19: mod_base = OTHER; note = Adenosine phosphorothiorate
  modified_base 20: mod_base = OTHER; note = 2'-Omethyluridine
  modified_base 25: mod_base = OTHER; note = 2'-Omethylcytosine
  modified_base 29: mod_base = OTHER; note = 2'-Omethylguanosine
  modified_base 33: mod_base = OTHER; note = 2'-fluorouridine
  modified_base 35: mod_base = OTHER; note = Cytosine phosphorothiorate
  modified_base 37: mod_base = OTHER; note = Adenosine phosphorothiorate
  modified_base 38: mod_base = OTHER; note = Adenosine phosphorothiorate
  modified_base 41: mod_base = OTHER; note = 2'-fluorocytosine
  modified_base 43: mod_base = OTHER; note = 2'-Omethyladenosine
  modified_base 44: mod_base = OTHER; note = 2'-fluoroadenosine
  modified_base 46: mod_base = OTHER; note = Guanosine phosphorothiorate
  modified_base 50: mod_base = OTHER; note = 2'-Omethylcytosine
  modified_base 52: mod_base = OTHER; note = 2'-Omethylguanosine
  modified_base 54: mod_base = OTHER; note = Uridine phosphorothiorate
  modified_base 55: mod_base = OTHER; note = Uridine phosphorothiorate
  modified_base 56: mod_base = OTHER; note = 2'-Omethylcytosine
  modified_base 57: mod_base = OTHER; note = Guanosine phosphorothiorate
  modified_base 62: mod_base = OTHER; note = 2'-Omethylcytosine
  modified_base 63: mod_base = OTHER; note = 2'-fluorocytosine
  modified_base 65: mod_base = OTHER; note = 2'-Omethylguanosine
  modified_base 71: mod_base = OTHER; note = 2'-Omethyluridine
  modified_base 73: mod_base = OTHER; note = 2'-Omethylguanosine

SEQ ID NO: 1033 - RNA, 76 nt, synthetic construct; identical to SEQ ID NO: 625
  source 1..76: mol_type = other RNA
  modified_base 1: mod_base = OTHER; note = 2'-Omethylguanosine
  modified_base 2: mod_base = OTHER; note = 2'-Omethylguanosine
  modified_base 4: mod_base = OTHER; note = 2'-Omethyluridine
  modified_base 6: mod_base = OTHER; note = 2'-Omethylcytosine
  modified_base 10: mod_base = OTHER; note = 2'-Omethylguanosine
  modified_base 11: mod_base = OTHER; note = 2'-Omethylcytosine
  modified_base 12: mod_base = OTHER; note = 2'-Omethylguanosine
  modified_base 13: mod_base = OTHER; note = 2'-Omethylcytosine
  modified_base 14: mod_base = OTHER; note = 2'-Omethyladenosine
  modified_base 16: mod_base = OTHER; note = 2'-Omethyluridine
  modified_base 17: mod_base = OTHER; note = 2'-Omethylguanosine phosphorothiorate
  modified_base 18: mod_base = OTHER; note = 2'-Omethylguanosine
  modified_base 19: mod_base = OTHER; note = Adenosine phosphorothiorate
  modified_base 20: mod_base = OTHER; note = 2'-Omethyluridine
  modified_base 22: mod_base = OTHER; note = 2'-Omethylguanosine
  modified_base 25: mod_base = OTHER; note = 2'-Omethylcytosine
  modified_base 29: mod_base = OTHER; note = 2'-Omethylguanosine
  modified_base 30: mod_base = OTHER; note = 2'-Omethylguanosine
  modified_base 33: mod_base = OTHER; note = 2'-fluorouridine
  modified_base 35: mod_base = OTHER; note = Cytosine phosphorothiorate
  modified_base 37: mod_base = OTHER; note = Adenosine phosphorothiorate
  modified_base 38: mod_base = OTHER; note = Adenosine phosphorothiorate
  modified_base 40: mod_base = OTHER; note = 2'-fluorouridine
  modified_base 41: mod_base = OTHER; note = 2'-fluorocytosine
  modified_base 42: mod_base = OTHER; note = 2'-Omethyladenosine
  modified_base 43: mod_base = OTHER; note = 2'-Omethyladenosine
  modified_base 44: mod_base = OTHER; note = 2'-fluoroadenosine
  modified_base 45: mod_base = OTHER; note = 2'-Omethylguanosine
  modified_base 46: mod_base = OTHER; note = Guanosine phosphorothiorate
  modified_base 48: mod_base = OTHER; note = 2'-fluorouridine
  modified_base 50: mod_base = OTHER; note = 2'-Omethylcytosine
  modified_base 52: mod_base = OTHER; note = 2'-Omethylguanosine
  modified_base 53: mod_base = OTHER; note = 2'-Omethylguanosine
  modified_base 54: mod_base = OTHER; note = 2'-Omethyluridine phosphorothiorate
  modified_base 55: mod_base = OTHER; note = Uridine phosphorothiorate
  modified_base 56: mod_base = OTHER; note = 2'-Omethylcytosine
  modified_base 57: mod_base = OTHER; note = Guanosine phosphorothiorate
  modified_base 58: mod_base = OTHER; note = Adenosine phosphorothiorate
  modified_base 59: mod_base = OTHER; note = 2'-Omethylguanosine
  modified_base 61: mod_base = OTHER; note = 2'-Omethylcytosine
  modified_base 62: mod_base = OTHER; note = 2'-Omethylcytosine
  modified_base 63: mod_base = OTHER; note = 2'-fluorocytosine
  modified_base 65: mod_base = OTHER; note = 2'-Omethylguanosine
  modified_base 66: mod_base = OTHER; note = 2'-Omethylcytosine
  modified_base 67: mod_base = OTHER; note = 2'-Omethylguanosine
  modified_base 68: mod_base = OTHER; note = 2'-Omethylguanosine
  modified_base 69: mod_base = OTHER; note = 2'-Omethyladenosine
  modified_base 71: mod_base = OTHER; note = 2'-Omethyluridine
  modified_base 72: mod_base = OTHER; note = 2'-Omethylcytosine
  modified_base 73: mod_base = OTHER; note = 2'-Omethylguanosine
  modified_base 76: mod_base = OTHER; note = 2'-Omethyladenosine

SEQ ID NO: 1034 - RNA, 76 nt, synthetic construct; identical to SEQ ID NO: 625
  source 1..76: mol_type = other RNA
  modified_base 1: mod_base = OTHER; note = 2'-Omethylguanosine
  modified_base 9: mod_base = OTHER; note = 2'-fluoroguanosine
  modified_base 10: mod_base = OTHER; note = 2'-Omethylguanosine
  modified_base 13: mod_base = OTHER; note = 2'-Omethylcytosine
  modified_base 17: mod_base = OTHER; note = Guanosine phosphorothiorate
  modified_base 18: mod_base = OTHER; note = 2'-Omethylguanosine
  modified_base 19: mod_base = OTHER; note = Adenosine phosphorothiorate
  modified_base 20: mod_base = OTHER; note = 2'-Omethyluridine
  modified_base 25: mod_base = OTHER; note = 2'-Omethylcytosine
  modified_base 29: mod_base = OTHER; note = 2'-Omethylguanosine
  modified_base 33: mod_base = OTHER; note = 2'-fluorouridine
  modified_base 35: mod_base = OTHER; note = Cytosine phosphorothiorate
  modified_base 37: mod_base = OTHER; note = Adenosine phosphorothiorate
  modified_base 38: mod_base = OTHER; note = Adenosine phosphorothiorate
  modified_base 41: mod_base = OTHER; note = 2'-fluorocytosine
  modified_base 43: mod_base = OTHER; note = 2'-Omethyladenosine
  modified_base 44: mod_base = OTHER; note = 2'-fluoroadenosine
  modified_base 46: mod_base = OTHER; note = Guanosine phosphorothiorate
  modified_base 50: mod_base = OTHER; note = 2'-Omethylcytosine
  modified_base 52: mod_base = OTHER; note = 2'-Omethylguanosine
  modified_base 54: mod_base = OTHER; note = Uridine phosphorothiorate
  modified_base 55: mod_base = OTHER; note = Uridine phosphorothiorate
  modified_base 56: mod_base = OTHER; note = 2'-Omethylcytosine
  modified_base 57: mod_base = OTHER; note = Guanosine phosphorothiorate
  modified_base 62: mod_base = OTHER; note = 2'-Omethylcytosine
  modified_base 63: mod_base = OTHER; note = 2'-fluorocytosine
  modified_base 65: mod_base = OTHER; note = 2'-Omethylguanosine
  modified_base 71: mod_base = OTHER; note = 2'-Omethyluridine
  modified_base 73: mod_base = OTHER; note = 2'-Omethylguanosine

SEQ ID NO: 1035 - RNA, 76 nt, synthetic construct; identical to SEQ ID NO: 625
  source 1..76: mol_type = other RNA
  modified_base 1: mod_base = OTHER; note = 2'-Omethylguanosine
  modified_base 2: mod_base = OTHER; note = 2'-Omethylguanosine
  modified_base 4: mod_base = OTHER; note = 2'-Omethyluridine
  modified_base 6: mod_base = OTHER; note = 2'-Omethylcytosine
  modified_base 9: mod_base = OTHER; note = 2'-fluoroguanosine
  modified_base 10: mod_base = OTHER; note = 2'-Omethylguanosine
  modified_base 11: mod_base = OTHER; note = 2'-Omethylcytosine
  modified_base 12: mod_base = OTHER; note = 2'-Omethylguanosine
  modified_base 13: mod_base = OTHER; note = 2'-Omethylcytosine
  modified_base 14: mod_base = OTHER; note = 2'-Omethyladenosine
  modified_base 16: mod_base = OTHER; note = 2'-Omethyluridine
  modified_base 17: mod_base = OTHER; note = 2'-Omethylguanosine phosphorothiorate
  modified_base 18: mod_base = OTHER; note = 2'-Omethylguanosine
  modified_base 19: mod_base = OTHER; note = Adenosine phosphorothiorate
  modified_base 20: mod_base = OTHER; note = 2'-Omethyluridine
  modified_base 22: mod_base = OTHER; note = 2'-Omethylguanosine
  modified_base 25: mod_base = OTHER; note = 2'-Omethylcytosine
  modified_base 29: mod_base = OTHER; note = 2'-Omethylguanosine
  modified_base 30: mod_base = OTHER; note = 2'-Omethylguanosine
  modified_base 33: mod_base = OTHER; note = 2'-fluorouridine
  modified_base 35: mod_base = OTHER; note = Cytosine phosphorothiorate
  modified_base 37: mod_base = OTHER; note = Adenosine phosphorothiorate
  modified_base 38: mod_base = OTHER; note = Adenosine phosphorothiorate
  modified_base 40: mod_base = OTHER; note = 2'-fluorouridine
  modified_base 41: mod_base = OTHER; note = 2'-fluorocytosine
  modified_base 42: mod_base = OTHER; note = 2'-Omethyladenosine
  modified_base 43: mod_base = OTHER; note = 2'-Omethyladenosine
  modified_base 44: mod_base = OTHER; note = 2'-fluoroadenosine
  modified_base 45: mod_base = OTHER; note = 2'-Omethylguanosine
  modified_base 46: mod_base = OTHER; note = Guanosine phosphorothiorate
  modified_base 48: mod_base = OTHER; note = 2'-fluorouridine
  modified_base 50: mod_base = OTHER; note = 2'-Omethylcytosine
  modified_base 52: mod_base = OTHER; note = 2'-Omethylguanosine
  modified_base 53: mod_base = OTHER; note = 2'-Omethylguanosine
  modified_base 54: mod_base = OTHER; note = 2'-Omethyluridine phosphorothiorate
  modified_base 55: mod_base = OTHER; note = Uridine phosphorothiorate
  modified_base 56: mod_base = OTHER; note = 2'-Omethylcytosine
  modified_base 57: mod_base = OTHER; note = Guanosine phosphorothiorate
  modified_base 58: mod_base = OTHER; note = Adenosine phosphorothiorate
  modified_base 59: mod_base = OTHER; note = 2'-Omethylguanosine
  modified_base 61: mod_base = OTHER; note = 2'-Omethylcytosine
  modified_base 62: mod_base = OTHER; note = 2'-Omethylcytosine
  modified_base 63: mod_base = OTHER; note = 2'-fluorocytosine
  modified_base 65: mod_base = OTHER; note = 2'-Omethylguanosine
  modified_base 66: mod_base = OTHER; note = 2'-Omethylcytosine
  modified_base 67: mod_base = OTHER; note = 2'-Omethylguanosine
  modified_base 68: mod_base = OTHER; note = 2'-Omethylguanosine
  modified_base 69: mod_base = OTHER; note = 2'-Omethyladenosine
  modified_base 71: mod_base = OTHER; note = 2'-Omethyluridine
  modified_base 72: mod_base = OTHER; note = 2'-Omethylcytosine
  modified_base 73: mod_base = OTHER; note = 2'-Omethylguanosine
  modified_base 76: mod_base = OTHER; note = 2'-Omethyladenosine

SEQ ID NO: 1036 - RNA, 76 nt, synthetic construct; identical to SEQ ID NO: 625
  source 1..76: mol_type = other RNA
  modified_base 1: mod_base = OTHER; note = 2'-Omethylguanosine
  modified_base 10: mod_base = OTHER; note = 2'-Omethylguanosine
  modified_base 13: mod_base = OTHER; note = 2'-Omethylcytosine
  modified_base 16: mod_base = OTHER; note = Uridine phosphorothiorate
  modified_base 17: mod_base = OTHER; note = Guanosine phosphorothiorate
  modified_base 18: mod_base = OTHER; note = 2'-Omethylguanosine phosphorothiorate
  modified_base 19: mod_base = OTHER; note = Adenosine phosphorothiorate
  modified_base 20: mod_base = OTHER; note = 2'-Omethyluridine phosphorothiorate
  modified_base 25: mod_base = OTHER; note = 2'-Omethylcytosine
  modified_base 29: mod_base = OTHER; note = 2'-Omethylguanosine
  modified_base 33: mod_base = OTHER; note = 2'-fluorouridine
  modified_base 35: mod_base = OTHER; note = Cytosine phosphorothiorate
  modified_base 37: mod_base = OTHER; note = Adenosine phosphorothiorate
  modified_base 38: mod_base = OTHER; note = Adenosine phosphorothiorate
  modified_base 41: mod_base = OTHER; note = 2'-fluorocytosine
  modified_base 42: mod_base = OTHER; note = Adenosine phosphorothiorate
  modified_base 43: mod_base = OTHER; note = 2'-Omethyladenosine
  modified_base 44: mod_base = OTHER; note = 2'-fluoroadenosine
  modified_base 46: mod_base = OTHER; note = Guanosine phosphorothiorate
  modified_base 50: mod_base = OTHER; note = 2'-Omethylcytosine
  modified_base 52: mod_base = OTHER; note = 2'-Omethylguanosine
  modified_base 54: mod_base = OTHER; note = Uridine phosphorothiorate
  modified_base 55: mod_base = OTHER; note = Uridine phosphorothiorate
  modified_base 56: mod_base = OTHER; note = 2'-Omethylcytosine
  modified_base 57: mod_base = OTHER; note = Guanosine phosphorothiorate
  modified_base 58: mod_base = OTHER; note = Adenosine phosphorothiorate
  modified_base 62: mod_base = OTHER; note = 2'-Omethylcytosine
  modified_base 63: mod_base = OTHER; note = 2'-fluorocytosine
  modified_base 65: mod_base = OTHER; note = 2'-Omethylguanosine
  modified_base 71: mod_base = OTHER; note = 2'-Omethyluridine
  modified_base 73: mod_base = OTHER; note = 2'-Omethylguanosine

SEQ ID NO: 1037 - RNA, 76 nt, synthetic construct; identical to SEQ ID NO: 625
  source 1..76: mol_type = other RNA
  modified_base 1: mod_base = OTHER; note = 2'-Omethylguanosine
  modified_base 2: mod_base = OTHER; note = 2'-Omethylguanosine
  modified_base 4: mod_base = OTHER; note = 2'-Omethyluridine
  modified_base 6: mod_base = OTHER; note = 2'-Omethylcytosine
  modified_base 10: mod_base = OTHER; note = 2'-Omethylguanosine
  modified_base 11: mod_base = OTHER; note = 2'-Omethylcytosine
  modified_base 12: mod_base = OTHER; note = 2'-Omethylguanosine
  modified_base 13: mod_base = OTHER; note = 2'-Omethylcytosine
  modified_base 14: mod_base = OTHER; note = 2'-Omethyladenosine
  modified_base 16: mod_base = OTHER; note = 2'-Omethyluridine phosphorothiorate
  modified_base 17: mod_base = OTHER; note = 2'-Omethylguanosine phosphorothiorate
  modified_base 18: mod_base = OTHER; note = 2'-Omethylguanosine phosphorothiorate
  modified_base 19: mod_base = OTHER; note = Adenosine phosphorothiorate
  modified_base 20: mod_base = OTHER; note = 2'-Omethyluridine phosphorothiorate
  modified_base 22: mod_base = OTHER; note = 2'-Omethylguanosine
  modified_base 25: mod_base = OTHER; note = 2'-Omethylcytosine
  modified_base 29: mod_base = OTHER; note = 2'-Omethylguanosine
  modified_base 30: mod_base = OTHER; note = 2'-Omethylguanosine
  modified_base 33: mod_base = OTHER; note = 2'-fluorouridine
  modified_base 35: mod_base = OTHER; note = Cytosine phosphorothiorate
  modified_base 37: mod_base = OTHER; note = Adenosine phosphorothiorate
  modified_base 38: mod_base = OTHER; note = Adenosine phosphorothiorate
  modified_base 40: mod_base = OTHER; note = 2'-fluorouridine
  modified_base 41: mod_base = OTHER; note = 2'-fluorocytosine
  modified_base 42: mod_base = OTHER; note = 2'-Omethyladenosine phosphorothiorate
  modified_base 43: mod_base = OTHER; note = 2'-Omethyladenosine
  modified_base 44: mod_base = OTHER; note = 2'-fluoroadenosine
  modified_base 45: mod_base = OTHER; note = 2'-Omethylguanosine
  modified_base 46: mod_base = OTHER; note = Guanosine phosphorothiorate
  modified_base 48: mod_base = OTHER; note = 2'-fluorouridine
  modified_base 50: mod_base = OTHER; note = 2'-Omethylcytosine
  modified_base 52: mod_base = OTHER; note = 2'-Omethylguanosine
  modified_base 53: mod_base = OTHER; note = 2'-Omethylguanosine
  modified_base 54: mod_base = OTHER; note = 2'-Omethyluridine phosphorothiorate
  modified_base 55: mod_base = OTHER; note = Uridine phosphorothiorate
  modified_base 56: mod_base = OTHER; note = 2'-Omethylcytosine
  modified_base 57: mod_base = OTHER; note = Guanosine phosphorothiorate
  modified_base 58: mod_base = OTHER; note = Adenosine phosphorothiorate
  modified_base 59: mod_base = OTHER; note = 2'-Omethylguanosine
  modified_base 61: mod_base = OTHER; note = 2'-Omethylcytosine
  modified_base 62: mod_base = OTHER; note = 2'-Omethylcytosine
  modified_base 63: mod_base = OTHER; note = 2'-fluorocytosine
  modified_base 65: mod_base = OTHER; note = 2'-Omethylguanosine
  modified_base 66: mod_base = OTHER; note = 2'-Omethylcytosine
  modified_base 67: mod_base = OTHER; note = 2'-Omethylguanosine
  modified_base 68: mod_base = OTHER; note = 2'-Omethylguanosine
  modified_base 69: mod_base = OTHER; note = 2'-Omethyladenosine
  modified_base 71: mod_base = OTHER; note = 2'-Omethyluridine
  modified_base 72: mod_base = OTHER; note = 2'-Omethylcytosine
  modified_base 73: mod_base = OTHER; note = 2'-Omethylguanosine
  modified_base 76: mod_base = OTHER; note = 2'-Omethyladenosine

SEQ ID NO: 1038 - RNA, 76 nt, synthetic construct; identical to SEQ ID NO: 625
  source 1..76: mol_type = other RNA
  modified_base 1: mod_base = OTHER; note = 2'-Omethylguanosine phosphorothiorate
  modified_base 2: mod_base = OTHER; note = 2'-Omethylguanosine phosphorothiorate
  modified_base 10: mod_base = OTHER; note = 2'-Omethylguanosine
  modified_base 13: mod_base = OTHER; note = 2'-Omethylcytosine
  modified_base 16: mod_base = OTHER; note = Uridine phosphorothiorate
  modified_base 17: mod_base = OTHER; note = Guanosine phosphorothiorate
  modified_base 18: mod_base = OTHER; note = 2'-Omethylguanosine phosphorothiorate
  modified_base 19: mod_base = OTHER; note = Adenosine phosphorothiorate
  modified_base 20: mod_base = OTHER; note = 2'-Omethyluridine phosphorothiorate
  modified_base 25: mod_base = OTHER; note = 2'-Omethylcytosine
  modified_base 29: mod_base = OTHER; note = 2'-Omethylguanosine
  modified_base 33: mod_base = OTHER; note = 2'-fluorouridine
  modified_base 35: mod_base = OTHER; note = Cytosine phosphorothiorate
  modified_base 37: mod_base = OTHER; note = Adenosine phosphorothiorate
  modified_base 38: mod_base = OTHER; note = Adenosine phosphorothiorate
  modified_base 41: mod_base = OTHER; note = 2'-fluorocytosine
  modified_base 42: mod_base = OTHER; note = Adenosine phosphorothiorate
  modified_base 43: mod_base = OTHER; note = 2'-Omethyladenosine
  modified_base 44: mod_base = OTHER; note = 2'-fluoroadenosine
  modified_base 46: mod_base = OTHER; note = Guanosine phosphorothiorate
  modified_base 50: mod_base = OTHER; note = 2'-Omethylcytosine
  modified_base 52: mod_base = OTHER; note = 2'-Omethylguanosine
  modified_base 54: mod_base = OTHER; note = Uridine phosphorothiorate
  modified_base 55: mod_base = OTHER; note = Uridine phosphorothiorate
  modified_base 56: mod_base = OTHER; note = 2'-Omethylcytosine
  modified_base 57: mod_base = OTHER; note = Guanosine phosphorothiorate
  modified_base 62: mod_base = OTHER; note = 2'-Omethylcytosine
  modified_base 63: mod_base = OTHER; note = 2'-fluorocytosine
  modified_base 65: mod_base = OTHER; note = 2'-Omethylguanosine
  modified_base 71: mod_base = OTHER; note = 2'-Omethyluridine
  modified_base 73: mod_base = OTHER; note = 2'-Omethylguanosine

SEQ ID NO: 1039 - RNA, 76 nt, synthetic construct; identical to SEQ ID NO: 625
  source 1..76: mol_type = other RNA
  modified_base 1: mod_base = OTHER; note = 2'-Omethylguanosine phosphorothiorate
  modified_base 2: mod_base = OTHER; note = 2'-Omethylguanosine phosphorothiorate
  modified_base 4: mod_base = OTHER; note = 2'-Omethyluridine
  modified_base 6: mod_base = OTHER; note = 2'-Omethylcytosine
  modified_base 10: mod_base = OTHER; note = 2'-Omethylguanosine
  modified_base 11: mod_base = OTHER; note = 2'-Omethylcytosine
  modified_base 12: mod_base = OTHER; note = 2'-Omethylguanosine
  modified_base 13: mod_base = OTHER; note = 2'-Omethylcytosine
  modified_base 14: mod_base = OTHER; note = 2'-Omethyladenosine
  modified_base 16: mod_base = OTHER; note = 2'-Omethyluridine phosphorothiorate
  modified_base 17: mod_base = OTHER; note = 2'-Omethylguanosine phosphorothiorate
  modified_base 18: mod_base = OTHER; note = 2'-Omethylguanosine phosphorothiorate
  modified_base 19: mod_base = OTHER; note = Adenosine phosphorothiorate
  modified_base 20: mod_base = OTHER; note = 2'-Omethyluridine
  modified_base 22: mod_base = OTHER; note = 2'-Omethylguanosine phosphorothiorate
  modified_base 25: mod_base = OTHER; note = 2'-Omethylcytosine
  modified_base 29: mod_base = OTHER; note = 2'-Omethylguanosine
  modified_base 30: mod_base = OTHER; note = 2'-Omethylguanosine
  modified_base 33: mod_base = OTHER; note = 2'-fluorouridine
  modified_base 35: mod_base = OTHER; note = Cytosine phosphorothiorate
  modified_base 37: mod_base = OTHER; note = Adenosine phosphorothiorate
  modified_base 38: mod_base = OTHER; note = Adenosine phosphorothiorate
  modified_base 40: mod_base = OTHER; note = 2'-fluorouridine
  modified_base 41: mod_base = OTHER; note = 2'-fluorocytosine
  modified_base 42: mod_base = OTHER; note = 2'-Omethyladenosine phosphorothiorate
  modified_base 43: mod_base = OTHER; note = 2'-Omethyladenosine
  modified_base 44: mod_base = OTHER; note = 2'-fluoroadenosine
  modified_base 45: mod_base = OTHER; note = 2'-Omethylguanosine
  modified_base 46: mod_base = OTHER; note = Guanosine phosphorothiorate
  modified_base 48: mod_base = OTHER; note = 2'-fluorouridine
  modified_base 50: mod_base = OTHER; note = 2'-Omethylcytosine
  modified_base 52: mod_base = OTHER; note = 2'-Omethylguanosine
  modified_base 53: mod_base = OTHER; note = 2'-Omethylguanosine
  modified_base 54: mod_base = OTHER; note = 2'-Omethyluridine phosphorothiorate
  modified_base 55: mod_base = OTHER; note = Uridine phosphorothiorate
  modified_base 56: mod_base = OTHER; note = 2'-Omethylcytosine
  modified_base 57: mod_base = OTHER; note = Guanosine phosphorothiorate
  modified_base 58: mod_base = OTHER; note = Adenosine phosphorothiorate
  modified_base 59: mod_base = OTHER; note = 2'-Omethylguanosine
  modified_base 61: mod_base = OTHER; note = 2'-Omethylcytosine
  modified_base 62: mod_base = OTHER; note = 2'-Omethylcytosine
  modified_base 63: mod_base = OTHER; note = 2'-fluorocytosine
  modified_base 65: mod_base = OTHER; note = 2'-Omethylguanosine
  modified_base 66: mod_base = OTHER; note = 2'-Omethylcytosine
  modified_base 67: mod_base = OTHER; note = 2'-Omethylguanosine
  modified_base 68: mod_base = OTHER; note = 2'-Omethylguanosine
  modified_base 69: mod_base = OTHER; note = 2'-Omethyladenosine
  modified_base 71: mod_base = OTHER; note = 2'-Omethyluridine
  modified_base 72: mod_base = OTHER; note = 2'-Omethylcytosine
  modified_base 73: mod_base = OTHER; note = 2'-Omethylguanosine
  modified_base 76: mod_base = OTHER; note = 2'-Omethyladenosine

SEQ ID NO: 1040 - RNA, 76 nt, synthetic construct; identical to SEQ ID NO: 625
  source 1..76: mol_type = other RNA
  modified_base 1: mod_base = OTHER; note = 2'-Omethylguanosine
  modified_base 9: mod_base = OTHER; note = Guanosine phosphorothiorate
  modified_base 10: mod_base = OTHER; note = 2'-Omethylguanosine
  modified_base 13: mod_base = OTHER; note = 2'-Omethylcytosine
  modified_base 17: mod_base = OTHER; note = Guanosine phosphorothiorate
  modified_base 18: mod_base = OTHER; note = 2'-Omethylguanosine
  modified_base 19: mod_base = OTHER; note = Adenosine phosphorothiorate
  modified_base 20: mod_base = OTHER; note = 2'-Omethyluridine
  modified_base 25: mod_base = OTHER; note = 2'-Omethylcytosine
  modified_base 29: mod_base = OTHER; note = 2'-Omethylguanosine
  modified_base 33: mod_base = OTHER; note = 2'-fluorouridine
  modified_base 35: mod_base = OTHER; note = Cytosine phosphorothiorate
  modified_base 37: mod_base = OTHER; note = Adenosine phosphorothiorate
  modified_base 38: mod_base = OTHER; note = Adenosine phosphorothiorate
  modified_base 41: mod_base = OTHER; note = 2'-fluorocytosine
  modified_base 43: mod_base = OTHER; note = 2'-Omethyladenosine
  modified_base 44: mod_base = OTHER; note = 2'-fluoroadenosine
  modified_base 46: mod_base = OTHER; note = Guanosine phosphorothiorate
  modified_base 50: mod_base = OTHER; note = 2'-Omethylcytosine
  modified_base 52: mod_base = OTHER; note = 2'-Omethylguanosine
  modified_base 54: mod_base = OTHER; note = Uridine phosphorothiorate
  modified_base 55: mod_base = OTHER; note = Uridine phosphorothiorate
  modified_base 56: mod_base = OTHER; note = 2'-Omethylcytosine
  modified_base 57: mod_base = OTHER; note = Guanosine phosphorothiorate
  modified_base 62: mod_base = OTHER; note = 2'-Omethylcytosine
  modified_base 63: mod_base = OTHER; note = 2'-fluorocytosine
  modified_base 65: mod_base = OTHER; note = 2'-Omethylguanosine
  modified_base 71: mod_base = OTHER; note = 2'-Omethyluridine
  modified_base 73: mod_base = OTHER; note = 2'-Omethylguanosine

SEQ ID NO: 1041 - RNA, 76 nt, synthetic construct; identical to SEQ ID NO: 625
  source 1..76: mol_type = other RNA
  modified_base 1: mod_base = OTHER; note = 2'-Omethylguanosine
  modified_base 10: mod_base = OTHER; note = 2'-Omethylguanosine
  modified_base 13: mod_base = OTHER; note = 2'-Omethylcytosine
  modified_base 17: mod_base = OTHER; note = Guanosine phosphorothiorate
  modified_base 18: mod_base = OTHER; note = 2'-Omethylguanosine
  modified_base 19: mod_base = OTHER; note = Adenosine phosphorothiorate
  modified_base 20: mod_base = OTHER; note = 2'-Omethyluridine
  modified_base 25: mod_base = OTHER; note = 2'-Omethylcytosine
  modified_base 29: mod_base = OTHER; note = 2'-Omethylguanosine
  modified_base 33: mod_base = OTHER; note = 2'-fluorouridine
  modified_base 35: mod_base = OTHER; note = Cytosine phosphorothiorate
  modified_base 37: mod_base = OTHER; note = Adenosine phosphorothiorate
  modified_base 38: mod_base = OTHER; note = Adenosine phosphorothiorate
  modified_base 41: mod_base = OTHER; note = 2'-fluorocytosine phosphorothiorate
  modified_base 43: mod_base = OTHER; note = 2'-Omethyladenosine
  modified_base 44: mod_base = OTHER; note = 2'-fluoroadenosine
  modified_base 46: mod_base = OTHER; note = Guanosine phosphorothiorate
  modified_base 50: mod_base = OTHER; note = 2'-Omethylcytosine
  modified_base 52: mod_base = OTHER; note = 2'-Omethylguanosine
  modified_base 54: mod_base = OTHER; note = Uridine phosphorothiorate
  modified_base 55: mod_base = OTHER; note = Uridine phosphorothiorate
  modified_base 56: mod_base = OTHER; note = 2'-Omethylcytosine
  modified_base 57: mod_base = OTHER; note = Guanosine phosphorothiorate
  modified_base 62: mod_base = OTHER; note = 2'-Omethylcytosine
  modified_base 63: mod_base = OTHER; note = 2'-fluorocytosine
  modified_base 65: mod_base = OTHER; note = 2'-Omethylguanosine
  modified_base 71: mod_base = OTHER; note = 2'-Omethyluridine
  modified_base 73: mod_base = OTHER; note = 2'-Omethylguanosine

SEQ ID NO: 1042 - RNA, 76 nt, synthetic construct; identical to SEQ ID NO: 625
  source 1..76: mol_type = other RNA
  modified_base 1: mod_base = OTHER; note = 2'-Omethylguanosine
  modified_base 10: mod_base = OTHER; note = 2'-Omethylguanosine
  modified_base 13: mod_base = OTHER; note = 2'-Omethylcytosine
  modified_base 16: mod_base = OTHER; note = Uridine phosphorothiorate
  modified_base 17: mod_base = OTHER; note = Guanosine phosphorothiorate
  modified_base 18: mod_base = OTHER; note = 2'-Omethylguanosine phosphorothiorate
  modified_base 19: mod_base = OTHER; note = Adenosine phosphorothiorate
  modified_base 20: mod_base = OTHER; note = 2'-Omethyluridine phosphorothiorate
  modified_base 25: mod_base = OTHER; note = 2'-Omethylcytosine
  modified_base 29: mod_base = OTHER; note = 2'-Omethylguanosine
  modified_base 33: mod_base = OTHER; note = 2'-fluorouridine phosphorothiorate
  modified_base 35: mod_base = OTHER; note = Cytosine phosphorothiorate
  modified_base 37: mod_base = OTHER; note = Adenosine phosphorothiorate
  modified_base 38: mod_base = OTHER; note = Adenosine phosphorothiorate
  modified_base 41: mod_base = OTHER; note = 2'-fluorocytosine
  modified_base 42: mod_base = OTHER; note = Adenosine phosphorothiorate
  modified_base 43: mod_base = OTHER; note = 2'-Omethyladenosine
  modified_base 44: mod_base = OTHER; note = 2'-fluoroadenosine
  modified_base 46: mod_base = OTHER; note = Guanosine phosphorothiorate
  modified_base 47: mod_base = OTHER; note = Uridine phosphorothiorate
  modified_base 50: mod_base = OTHER; note = 2'-Omethylcytosine
  modified_base 52: mod_base = OTHER; note = 2'-Omethylguanosine
  modified_base 54: mod_base = OTHER; note = Uridine phosphorothiorate
  modified_base 55: mod_base = OTHER; note = Uridine phosphorothiorate
  modified_base 56: mod_base = OTHER; note = 2'-Omethylcytosine
  modified_base 57: mod_base = OTHER; note = Guanosine phosphorothiorate
  modified_base 60: mod_base = OTHER; note = Uridine phosphorothiorate
  modified_base 62: mod_base = OTHER; note = 2'-Omethylcytosine
  modified_base 63: mod_base = OTHER; note = 2'-fluorocytosine
  modified_base 65: mod_base = OTHER; note = 2'-Omethylguanosine
  modified_base 71: mod_base = OTHER; note = 2'-Omethyluridine
  modified_base 73: mod_base = OTHER; note = 2'-Omethylguanosine

SEQ ID NO: 1043 - RNA, 76 nt, synthetic construct; identical to SEQ ID NO: 625
  source 1..76: mol_type = other RNA
  modified_base 1: mod_base = OTHER; note = 2'-Omethylguanosine
  modified_base 9: mod_base = OTHER; note = Guanosine phosphorothiorate
  modified_base 10: mod_base = OTHER; note = 2'-Omethylguanosine
  modified_base 13: mod_base = OTHER; note = 2'-Omethylcytosine
  modified_base 16: mod_base = OTHER; note = Uridine phosphorothiorate
  modified_base 17: mod_base = OTHER; note = Guanosine phosphorothiorate
  modified_base 18: mod_base = OTHER; note = 2'-Omethylguanosine phosphorothiorate
  modified_base 19: mod_base = OTHER; note = Adenosine phosphorothiorate
  modified_base 20: mod_base = OTHER; note = 2'-Omethyluridine phosphorothiorate
  modified_base 25: mod_base = OTHER; note = 2'-Omethylcytosine
  modified_base 29: mod_base = OTHER; note = 2'-Omethylguanosine
  modified_base 33: mod_base = OTHER; note = 2'-fluorouridine phosphorothiorate
  modified_base 35: mod_base = OTHER; note = Cytosine phosphorothiorate
  modified_base 37: mod_base = OTHER; note = Adenosine phosphorothiorate
  modified_base 38: mod_base = OTHER; note = Adenosine phosphorothiorate
  modified_base 41: mod_base = OTHER; note = 2'-fluorocytosine phosphorothiorate
  modified_base 42: mod_base = OTHER; note = Adenosine phosphorothiorate
  modified_base 43: mod_base = OTHER; note = 2'-Omethyladenosine
  modified_base 44: mod_base = OTHER; note = 2'-fluoroadenosine
  modified_base 46: mod_base = OTHER; note = Guanosine phosphorothiorate
  modified_base 47: mod_base = OTHER; note = Uridine phosphorothiorate
  modified_base 50: mod_base = OTHER; note = 2'-Omethylcytosine
  modified_base 52: mod_base = OTHER; note = 2'-Omethylguanosine
  modified_base 54: mod_base = OTHER; note = Uridine phosphorothiorate
  modified_base 55: mod_base = OTHER; note = Uridine phosphorothiorate
  modified_base 56: mod_base = OTHER; note = 2'-Omethylcytosine
  modified_base 57: mod_base = OTHER; note = Guanosine phosphorothiorate
  modified_base 60: mod_base = OTHER; note = Uridine phosphorothiorate
  modified_base 62: mod_base = OTHER; note = 2'-Omethylcytosine
  modified_base 63: mod_base = OTHER; note = 2'-fluorocytosine
  modified_base 65: mod_base = OTHER; note = 2'-Omethylguanosine
  modified_base 71: mod_base = OTHER; note = 2'-Omethyluridine
  modified_base 73: mod_base = OTHER; note = 2'-Omethylguanosine

SEQ ID NO: 1044 - skipped

SEQ ID NO: 1045 - RNA, 75 nt, synthetic construct
  source 1..75: mol_type = other RNA
  modified_base 1: mod_base = OTHER; note = 2'-Omethylguanosine
ggttccatggtgtaatggtaagcactctggactttaaatccagcgatccgagttcgagtctcggtggaacctcca

SEQ ID NO: 1046-1065 - skipped (20 entries)

SEQ ID NO: 1066 - RNA, 75 nt, synthetic construct; identical to SEQ ID NO: 1045
  source 1..75: mol_type = other RNA
  modified_base 22: mod_base = OTHER; note = 2'-Omethylguanosine

SEQ ID NO: 1067-1123 - skipped (57 entries)

SEQ ID NO: 1124 - RNA, 75 nt, synthetic construct; identical to SEQ ID NO: 1045
  source 1..75: mol_type = other RNA
  modified_base 1: mod_base = OTHER; note = 2'-Omethylguanosine
  modified_base 2: mod_base = OTHER; note = 2'-Omethylguanosine
  modified_base 3: mod_base = OTHER; note = 2'-Omethyluridine

SEQ ID NO: 1125 - skipped

SEQ ID NO: 1126 - RNA, 75 nt, synthetic construct; identical to SEQ ID NO: 1045
  source 1..75: mol_type = other RNA
  modified_base 33: mod_base = OTHER; note = 2'-fluorouridine

SEQ ID NO: 1127 - skipped

SEQ ID NO: 1128 - RNA, 75 nt, synthetic construct; identical to SEQ ID NO: 1045
  source 1..75: mol_type = other RNA
  modified_base 72: mod_base = OTHER; note = 2'-fluorouridine

SEQ ID NO: 1129-1131 - skipped (3 entries)

SEQ ID NO: 1132 - RNA, 85 nt, synthetic construct
  source 1..85: mol_type = other RNA
  modified_base 1: mod_base = OTHER; note = 2'-Omethylguanosine
  modified_base 2: mod_base = OTHER; note = 2'-Omethyladenosine
  modified_base 3: mod_base = OTHER; note = 2'-Omethylcytosine
gacgaggtggccgagtggttaaggcgatggactctaaatccattgtgctctgcacgcgtgggttcgaatcccatcctcgtcgcca

SEQ ID NO: 1133 - skipped

SEQ ID NO: 1134 - RNA, 85 nt, synthetic construct; identical to SEQ ID NO: 1132
  source 1..85: mol_type = other RNA
  modified_base 33: mod_base = OTHER; note = 2'-fluorouridine

SEQ ID NO: 1135 - skipped

SEQ ID NO: 1136 - RNA, 85 nt, synthetic construct; identical to SEQ ID NO: 1132
  source 1..85: mol_type = other RNA
  modified_base 82: mod_base = OTHER; note = 2'-fluoroguanosine

SEQ ID NO: 1137-1179 - skipped (43 entries)

SEQ ID NO: 1180 - RNA, 85 nt, synthetic construct; identical to SEQ ID NO: 1132
  source 1..85: mol_type = other RNA
  modified_base 42: mod_base = OTHER; note = 2'-Omethyladenosine

SEQ ID NO: 1181-1199 - skipped (19 entries)

SEQ ID NO: 1200 - DNA, 73 bp, synthetic construct; identical to SEQ ID NO: 4
  source 1..73: mol_type = other DNA

SEQ ID NO: 1201 - DNA, 72 bp, synthetic construct; identical to SEQ ID NO: 17
  source 1..72: mol_type = other DNA

SEQ ID NO: 1202 - DNA, 72 bp, synthetic construct
  source 1..72: mol_type = other DNA
gggggtgtagctcagtggtagagcgcatgctttgcatgtatgaggccccgggttcgatccccggcacctcca

SEQ ID NO: 1203 - DNA, 73 bp, synthetic construct; identical to SEQ ID NO: 28
  source 1..73: mol_type = other DNA

SEQ ID NO: 1204 - DNA, 73 bp, synthetic construct; identical to SEQ ID NO: 30
  source 1..73: mol_type = other DNA

SEQ ID NO: 1205 - DNA, 73 bp, synthetic construct; identical to SEQ ID NO: 32
  source 1..73: mol_type = other DNA

SEQ ID NO: 1206 - DNA, 73 bp, synthetic construct
  source 1..73: mol_type = other DNA
gaccgcgtggcctaatggataaggcgtctgacttcggatcagaagattgagggttcgagtccctccgtggtcg

SEQ ID NO: 1207 - DNA, 74 bp, synthetic construct
  source 1..74: mol_type = other DNA
  misc_difference 21: note = a, c, t, g, unknown or other
  misc_difference 65: note = a, c, t, g, unknown or other
ggctctgtggcgcaatggatnagcgcattggacttctaattcaaaggttgcgggttcgagtcccnccagagtcg

SEQ ID NO: 1208 - DNA, 75 bp, synthetic construct
  source 1..75: mol_type = other DNA
  misc_difference 43: note = a, c, t, g, unknown or other
gtctctgtggcgcaatcggttagcgcgttcggctgttaaccgnaaaggttggtggttcgagcccacccagggacg

SEQ ID NO: 1209 - DNA, 72 bp, synthetic construct; identical to SEQ ID NO: 62
  source 1..72: mol_type = other DNA

SEQ ID NO: 1210 - DNA, 73 bp, synthetic construct
  source 1..73: mol_type = other DNA
  misc_difference 16: note = a, c, t, g, unknown or other
gggggtatagctcagngggtagagcatttgactgcagatcaagaggtccccggttcaaatccgggtgccccct

SEQ ID NO: 1211 - DNA, 72 bp, synthetic construct
  source 1..72: mol_type = other DNA
  misc_difference 20: note = a, c, t, g, unknown or other
ggttccatggtgtaatggtnagcactctggactctgaatccagcgatccgagttcaagtctcggtggaacct

SEQ ID NO: 1212 - DNA, 72 bp, synthetic construct; identical to SEQ ID NO: 94
  source 1..72: mol_type = other DNA

SEQ ID NO: 1213 - DNA, 72 bp, synthetic construct; identical to SEQ ID NO: 98
  source 1..72: mol_type = other DNA

SEQ ID NO: 1214 - DNA, 72 bp, synthetic construct
  source 1..72: mol_type = other DNA
  misc_difference 42: note = a, c, t, g, unknown or other
tccctggtggtctagtggctaggattcggcgctttcaccgcngcggcccgggttcgattcccggtcagggaa

SEQ ID NO: 1215 - DNA, 71 bp, synthetic construct
  source 1..71: mol_type = other DNA
  misc_difference 40: note = a, c, t, g, unknown or other
gcattggtggttcagtggtagaattctcgcctcccacgcnggagacccgggttcgattcccggccaatgca

SEQ ID NO: 1216 - DNA, 71 bp, synthetic construct; identical to SEQ ID NO: 108
  source 1..71: mol_type = other DNA

SEQ ID NO: 1217 - DNA, 72 bp, synthetic construct; identical to SEQ ID NO: 113
  source 1..72: mol_type = other DNA

SEQ ID NO: 1218 - DNA, 74 bp, synthetic construct; identical to SEQ ID NO: 122
  source 1..74: mol_type = other DNA

SEQ ID NO: 1219 - DNA, 74 bp, synthetic construct
  source 1..74: mol_type = other DNA
gctccagtggcgcaatcggttagcgcgcggtacttataatgccgaggttgtgagttcgagcctcacctggagca

SEQ ID NO: 1220 - DNA, 82 bp, synthetic construct; identical to SEQ ID NO: 134
  source 1..82: mol_type = other DNA

SEQ ID NO: 1221 - DNA, 85 bp, synthetic construct
  source 1..85: mol_type = other DNA
  misc_difference 21: note = a, c, t, g, unknown or other
  misc_difference 52: note = a, c, t, g, unknown or other
gtcaggatggccgagtggtcntaaggcgccagactcaagttctggtctccgnatggaggcgtgggttcgaatcccacttctgaca

SEQ ID NO: 1222 - DNA, 83 bp, synthetic construct; identical to SEQ ID NO: 144
  source 1..83: mol_type = other DNA

SEQ ID NO: 1223 - DNA, 83 bp, synthetic construct
  source 1..83: mol_type = other DNA
accaggatggccgagtggttaaggcgttggacttaagatccaatggacagatgtccgcgtgggttcgaaccccactcctggta

SEQ ID NO: 1224 - DNA, 82 bp, synthetic construct
  source 1..82: mol_type = other DNA
  misc_difference 54: note = a, c, t, g, unknown or other
ggtagcgtggccgagcggtctaaggcgctggatttaggctccagtctcttcggnggcgtgggttcgaatcccaccgctgcca

SEQ ID NO: 1225 - DNA, 76 bp, synthetic construct
  source 1..76: mol_type = other DNA
  misc_difference 74: note = a, c, t, g, unknown or other
  misc_difference 75: note = a, c, t, g, unknown or other
  misc_difference 76: note = a, c, t, g, unknown or other
gcccggctagctcagtcggtagagcatgagactcttaatctcagggtcgtgggttcgagccccacgttgggcgnnn

SEQ ID NO: 1226 - RNA, 76 nt, synthetic construct; identical to SEQ ID NO: 625
  source 1..76: mol_type = other RNA
  modified_base 1: mod_base = OTHER; note = 2'-Omethylguanosine
  modified_base 2: mod_base = OTHER; note = 2'-Omethylguanosine
  modified_base 3: mod_base = OTHER; note = 2'-Omethylcytosine
  modified_base 4: mod_base = OTHER; note = 2'-Omethyluridine

SEQ ID NO: 1227 - RNA, 76 nt, synthetic construct; identical to SEQ ID NO: 625
  source 1..76: mol_type = other RNA
  modified_base 1: mod_base = OTHER; note = 2'-Omethylguanosine
  modified_base 2: mod_base = OTHER; note = 2'-Omethylguanosine
  modified_base 3: mod_base = OTHER; note = 2'-Omethylcytosine
  modified_base 4: mod_base = OTHER; note = 2'-Omethyluridine
  modified_base 5: mod_base = OTHER; note = 2'-Omethylcytosine

SEQ ID NO: 1228 - RNA, 76 nt, synthetic construct; identical to SEQ ID NO: 625
  source 1..76: mol_type = other RNA
  modified_base 1: mod_base = OTHER; note = 2'-Omethylguanosine
  modified_base 2: mod_base = OTHER; note = 2'-Omethylguanosine
  modified_base 3: mod_base = OTHER; note = 2'-Omethylcytosine
  modified_base 4: mod_base = OTHER; note = 2'-Omethyluridine
  modified_base 5: mod_base = OTHER; note = 2'-Omethylcytosine
  modified_base 6: mod_base = OTHER; note = 2'-Omethylcytosine

SEQ ID NO: 1229 - RNA, 76 nt, synthetic construct; identical to SEQ ID NO: 625
  source 1..76: mol_type = other RNA
  modified_base 1: mod_base = OTHER; note = 2'-Omethylguanosine
  modified_base 72: mod_base = OTHER; note = 2'-Omethylcytosine
  modified_base 73: mod_base = OTHER; note = 2'-Omethylguanosine

SEQ ID NO: 1230 - RNA, 76 nt, synthetic construct; identical to SEQ ID NO: 625
  source 1..76: mol_type = other RNA
  modified_base 1: mod_base = OTHER; note = 2'-Omethylguanosine
  modified_base 71: mod_base = OTHER; note = 2'-Omethyluridine
  modified_base 72: mod_base = OTHER; note = 2'-Omethylcytosine
  modified_base 73: mod_base = OTHER; note = 2'-Omethylguanosine

SEQ ID NO: 1231 - RNA, 76 nt, synthetic construct; identical to SEQ ID NO: 625
  source 1..76: mol_type = other RNA
  modified_base 1: mod_base = OTHER; note = 2'-Omethylguanosine
  modified_base 66: mod_base = OTHER; note = 2'-Omethylcytosine
  modified_base 67: mod_base = OTHER; note = 2'-Omethylguanosine
  modified_base 68: mod_base = OTHER; note = 2'-Omethylguanosine
  modified_base 73: mod_base = OTHER; note = 2'-Omethylguanosine

SEQ ID NO: 1232 - RNA, 76 nt, synthetic construct; identical to SEQ ID NO: 625
  source 1..76: mol_type = other RNA
  modified_base 1: mod_base = OTHER; note = 2'-Omethylguanosine
  modified_base 66: mod_base = OTHER; note = 2'-Omethylcytosine
  modified_base 67: mod_base = OTHER; note = 2'-Omethylguanosine
  modified_base 68: mod_base = OTHER; note = 2'-Omethylguanosine
  modified_base 72: mod_base = OTHER; note = 2'-Omethylcytosine
  modified_base 73: mod_base = OTHER; note = 2'-Omethylguanosine

SEQ ID NO: 1233 - RNA, 76 nt, synthetic construct; identical to SEQ ID NO: 625
  source 1..76: mol_type = other RNA
  modified_base 1: mod_base = OTHER; note = 2'-Omethylguanosine
  modified_base 66: mod_base = OTHER; note = 2'-Omethylcytosine
  modified_base 67: mod_base = OTHER; note = 2'-Omethylguanosine
  modified_base 68: mod_base = OTHER; note = 2'-Omethylguanosine
  modified_base 71: mod_base = OTHER; note = 2'-Omethyluridine
  modified_base 72: mod_base = OTHER; note = 2'-Omethylcytosine
  modified_base 73: mod_base = OTHER; note = 2'-Omethylguanosine

SEQ ID NO: 1234 - RNA, 76 nt, synthetic construct; identical to SEQ ID NO: 625
  source 1..76: mol_type = other RNA
  modified_base 1: mod_base = OTHER; note = 2'-Omethylguanosine
  modified_base 66: mod_base = OTHER; note = 2'-Omethylcytosine
  modified_base 67: mod_base = OTHER; note = 2'-Omethylguanosine
  modified_base 68: mod_base = OTHER; note = 2'-Omethylguanosine
  modified_base 69: mod_base = OTHER; note = 2'-Omethyladenosine

SEQ ID NO: 1235 - RNA, 76 nt, synthetic construct; identical to SEQ ID NO: 625
  source 1..76: mol_type = other RNA
  modified_base 1: mod_base = OTHER; note = 2'-Omethylguanosine
  modified_base 66: mod_base = OTHER; note = 2'-Omethylcytosine
  modified_base 67: mod_base = OTHER; note = 2'-Omethylguanosine
  modified_base 68: mod_base = OTHER; note = 2'-Omethylguanosine
  modified_base 69: mod_base = OTHER; note = 2'-Omethyladenosine
  modified_base 73: mod_base = OTHER; note = 2'-Omethylguanosine

SEQ ID NO: 1236 - RNA, 76 nt, synthetic construct; identical to SEQ ID NO: 625
  source 1..76: mol_type = other RNA
  modified_base 1: mod_base = OTHER; note = 2'-Omethylguanosine
  modified_base 66: mod_base = OTHER; note = 2'-Omethylcytosine
  modified_base 67: mod_base = OTHER; note = 2'-Omethylguanosine
  modified_base 68: mod_base = OTHER; note = 2'-Omethylguanosine
  modified_base 69: mod_base = OTHER; note = 2'-Omethyladenosine
  modified_base 72: mod_base = OTHER; note = 2'-Omethylcytosine
  modified_base 73: mod_base = OTHER; note = 2'-Omethylguanosine

SEQ ID NO: 1237 - RNA, 76 nt, synthetic construct; identical to SEQ ID NO: 625
  source 1..76: mol_type = other RNA
  modified_base 1: mod_base = OTHER; note = 2'-Omethylguanosine
  modified_base 66: mod_base = OTHER; note = 2'-Omethylcytosine
  modified_base 67: mod_base = OTHER; note = 2'-Omethylguanosine
  modified_base 68: mod_base = OTHER; note = 2'-Omethylguanosine
  modified_base 69: mod_base = OTHER; note = 2'-Omethyladenosine
  modified_base 71: mod_base = OTHER; note = 2'-Omethyluridine
  modified_base 72: mod_base = OTHER; note = 2'-Omethylcytosine
  modified_base 73: mod_base = OTHER; note = 2'-Omethylguanosine

SEQ ID NO: 1238 - RNA, 76 nt, synthetic construct; identical to SEQ ID NO: 625
  source 1..76: mol_type = other RNA
  modified_base 1: mod_base = OTHER; note = 2'-Omethylguanosine
  modified_base 2: mod_base = OTHER; note = 2'-Omethylguanosine
  modified_base 3: mod_base = OTHER; note = 2'-Omethylcytosine
  modified_base 66: mod_base = OTHER; note = 2'-Omethylcytosine
  modified_base 67: mod_base = OTHER; note = 2'-Omethylguanosine
  modified_base 68: mod_base = OTHER; note = 2'-Omethylguanosine
  modified_base 73: mod_base = OTHER; note = 2'-Omethylguanosine

SEQ ID NO: 1239 - DNA, 72 bp, synthetic construct; identical to SEQ ID NO: 229
  source 1..72: mol_type = other DNA

SEQ ID NO: 1240 - RNA, 76 nt, synthetic construct; identical to SEQ ID NO: 625
  source 1..76: mol_type = other RNA
  modified_base 1: mod_base = OTHER; note = 2'-Omethylguanosine
  modified_base 2: mod_base = OTHER; note = 2'-Omethylguanosine
  modified_base 3: mod_base = OTHER; note = 2'-Omethylcytosine
  modified_base 4: mod_base = OTHER; note = 2'-Omethyluridine
  modified_base 5: mod_base = OTHER; note = 2'-Omethylcytosine
  modified_base 6: mod_base = OTHER; note = 2'-Omethylcytosine
  modified_base 66: mod_base = OTHER; note = 2'-Omethylcytosine
  modified_base 67: mod_base = OTHER; note = 2'-Omethylguanosine
  modified_base 68: mod_base = OTHER; note = 2'-Omethylguanosine
  modified_base 73: mod_base = OTHER; note = 2'-Omethylguanosine

SEQ ID NO: 1241 - RNA, 76 nt, synthetic construct; identical to SEQ ID NO: 625
  source 1..76: mol_type = other RNA
  modified_base 1: mod_base = OTHER; note = 2'-Omethylguanosine
  modified_base 2: mod_base = OTHER; note = 2'-Omethylguanosine
  modified_base 3: mod_base = OTHER; note = 2'-Omethylcytosine
  modified_base 73: mod_base = OTHER; note = 2'-Omethylguanosine

SEQ ID NO: 1242 - RNA, 76 nt, synthetic construct; identical to SEQ ID NO: 625
  source 1..76: mol_type = other RNA
  modified_base 1: mod_base = OTHER; note = 2'-Omethylguanosine
  modified_base 2: mod_base = OTHER; note = 2'-Omethylguanosine
  modified_base 3: mod_base = OTHER; note = 2'-Omethylcytosine
  modified_base 72: mod_base = OTHER; note = 2'-Omethylcytosine
  modified_base 73: mod_base = OTHER; note = 2'-Omethylguanosine

SEQ ID NO: 1243 - RNA, 76 nt, synthetic construct; identical to SEQ ID NO: 625
  source 1..76: mol_type = other RNA
  modified_base 1: mod_base = OTHER; note = 2'-Omethylguanosine
  modified_base 2: mod_base = OTHER; note = 2'-Omethylguanosine
  modified_base 3: mod_base = OTHER; note = 2'-Omethylcytosine
  modified_base 71: mod_base = OTHER; note = 2'-Omethyluridine
  modified_base 72: mod_base = OTHER; note = 2'-Omethylcytosine
  modified_base 73: mod_base = OTHER; note = 2'-Omethylguanosine

SEQ ID NO: 1244 - RNA, 76 nt, synthetic construct; identical to SEQ ID NO: 625
  source 1..76: mol_type = other RNA
  modified_base 1: mod_base = OTHER; note = 2'-Omethylguanosine
  modified_base 2: mod_base = OTHER; note = 2'-Omethylguanosine
  modified_base 3: mod_base = OTHER; note = 2'-Omethylcytosine
  modified_base 4: mod_base = OTHER; note = 2'-Omethyluridine
  modified_base 5: mod_base = OTHER; note = 2'-Omethylcytosine
  modified_base 6: mod_base = OTHER; note = 2'-Omethylcytosine
  modified_base 66: mod_base = OTHER; note = 2'-Omethylcytosine
  modified_base 67: mod_base = OTHER; note = 2'-Omethylguanosine
  modified_base 68: mod_base = OTHER; note = 2'-Omethylguanosine
  modified_base 69: mod_base = OTHER; note = 2'-Omethyladenosine
  modified_base 71: mod_base = OTHER; note = 2'-Omethyluridine
  modified_base 72: mod_base = OTHER; note = 2'-Omethylcytosine
  modified_base 73: mod_base = OTHER; note = 2'-Omethylguanosine

SEQ ID NO: 1245 - RNA, 76 nt, synthetic construct; identical to SEQ ID NO: 625
  source 1..76: mol_type = other RNA
  modified_base 1: mod_base = OTHER; note = 2'-Omethylguanosine
  modified_base 2: mod_base = OTHER; note = 2'-Omethylguanosine
  modified_base 3: mod_base = OTHER; note = 2'-Omethylcytosine
  modified_base 4: mod_base = OTHER; note = 2'-Omethyluridine
  modified_base 5: mod_base = OTHER; note = 2'-Omethylcytosine
  modified_base 6: mod_base = OTHER; note = 2'-Omethylcytosine
  modified_base 9: mod_base = OTHER; note = 2'-fluoroguanosine
  modified_base 66: mod_base = OTHER; note = 2'-Omethylcytosine
  modified_base 67: mod_base = OTHER; note = 2'-Omethylguanosine
  modified_base 68: mod_base = OTHER; note = 2'-Omethylguanosine
  modified_base 69: mod_base = OTHER; note = 2'-Omethyladenosine
  modified_base 71: mod_base = OTHER; note = 2'-Omethyluridine
  modified_base 72: mod_base = OTHER; note = 2'-Omethylcytosine
  modified_base 73: mod_base = OTHER; note = 2'-Omethylguanosine

SEQ ID NO: 1246 - RNA, 76 nt, synthetic construct; identical to SEQ ID NO: 625
  source 1..76: mol_type = other RNA
  modified_base 1: mod_base = OTHER; note = 2'-Omethylguanosine
  modified_base 2: mod_base = OTHER; note = 2'-Omethylguanosine
  modified_base 3: mod_base = OTHER; note = 2'-Omethylcytosine
  modified_base 4: mod_base = OTHER; note = 2'-Omethyluridine
  modified_base 5: mod_base = OTHER; note = 2'-Omethylcytosine
  modified_base 6: mod_base = OTHER; note = 2'-Omethylcytosine
  modified_base 66: mod_base = OTHER; note = 2'-Omethylcytosine
  modified_base 67: mod_base = OTHER; note = 2'-Omethylguanosine
  modified_base 68: mod_base = OTHER; note = 2'-Omethylguanosine
  modified_base 69: mod_base = OTHER; note = 2'-Omethyladenosine
  modified_base 70: mod_base = OTHER; note = 2'-fluoroguanosine
  modified_base 71: mod_base = OTHER; note = 2'-Omethyluridine
  modified_base 72: mod_base = OTHER; note = 2'-Omethylcytosine
  modified_base 73: mod_base = OTHER; note = 2'-Omethylguanosine

SEQ ID NO: 1247 - RNA, 76 nt, synthetic construct; identical to SEQ ID NO: 625
  source 1..76: mol_type = other RNA
  modified_base 1: mod_base = OTHER; note = 2'-Omethylguanosine
  modified_base 2: mod_base = OTHER; note = 2'-Omethylguanosine
  modified_base 3: mod_base = OTHER; note = 2'-Omethylcytosine
  modified_base 4: mod_base = OTHER; note = 2'-Omethyluridine
  modified_base 5: mod_base = OTHER; note = 2'-Omethylcytosine
  modified_base 6: mod_base = OTHER; note = 2'-Omethylcytosine
  modified_base 7: mod_base = OTHER; note = Guanosine phosphorothiorate
  modified_base 66: mod_base = OTHER; note = 2'-Omethylcytosine
  modified_base 67: mod_base = OTHER; note = 2'-Omethylguanosine
  modified_base 68: mod_base = OTHER; note = 2'-Omethylguanosine
  modified_base 69: mod_base = OTHER; note = 2'-Omethyladenosine
  modified_base 70: mod_base = OTHER; note = 2'-fluoroguanosine
  modified_base 71: mod_base = OTHER; note = 2'-Omethyluridine
  modified_base 72: mod_base = OTHER; note = 2'-Omethylcytosine
  modified_base 73: mod_base = OTHER; note = 2'-Omethylguanosine

SEQ ID NO: 1248 - RNA, 76 nt, synthetic construct; identical to SEQ ID NO: 625
  source 1..76: mol_type = other RNA
  modified_base 1: mod_base = OTHER; note = 2'-Omethylguanosine phosphorothiorate
  modified_base 2: mod_base = OTHER; note = 2'-Omethylguanosine
  modified_base 3: mod_base = OTHER; note = 2'-Omethylcytosine
  modified_base 4: mod_base = OTHER; note = 2'-Omethyluridine
  modified_base 5: mod_base = OTHER; note = 2'-Omethylcytosine
  modified_base 6: mod_base = OTHER; note = 2'-Omethylcytosine
  modified_base 66: mod_base = OTHER; note = 2'-Omethylcytosine
  modified_base 67: mod_base = OTHER; note = 2'-Omethylguanosine
  modified_base 68: mod_base = OTHER; note = 2'-Omethylguanosine
  modified_base 69: mod_base = OTHER; note = 2'-Omethyladenosine
  modified_base 70: mod_base = OTHER; note = 2'-fluoroguanosine
  modified_base 71: mod_base = OTHER; note = 2'-Omethyluridine
  modified_base 72: mod_base = OTHER; note = 2'-Omethylcytosine
  modified_base 73: mod_base = OTHER; note = 2'-Omethylguanosine

SEQ ID NO: 1249 - RNA, 76 nt, synthetic construct; identical to SEQ ID NO: 625
  source 1..76: mol_type = other RNA
  modified_base 1: mod_base = OTHER; note = 2'-Omethylguanosine phosphorothiorate
  modified_base 2: mod_base = OTHER; note = 2'-Omethylguanosine phosphorothiorate
  modified_base 3: mod_base = OTHER; note = 2'-Omethylcytosine
  modified_base 4: mod_base = OTHER; note = 2'-Omethyluridine
  modified_base 5: mod_base = OTHER; note = 2'-Omethylcytosine
  modified_base 6: mod_base = OTHER; note = 2'-Omethylcytosine
  modified_base 66: mod_base = OTHER; note = 2'-Omethylcytosine
  modified_base 67: mod_base = OTHER; note = 2'-Omethylguanosine
  modified_base 68: mod_base = OTHER; note = 2'-Omethylguanosine
  modified_base 69: mod_base = OTHER; note = 2'-Omethyladenosine
  modified_base 70: mod_base = OTHER; note = 2'-fluoroguanosine
  modified_base 71: mod_base = OTHER; note = 2'-Omethyluridine
  modified_base 72: mod_base = OTHER; note = 2'-Omethylcytosine
  modified_base 73: mod_base = OTHER; note = 2'-Omethylguanosine

SEQ ID NO: 1250 - RNA, 76 nt, synthetic construct; identical to SEQ ID NO: 625
  source 1..76: mol_type = other RNA
  modified_base 1: mod_base = OTHER; note = 2'-Omethylguanosine
  modified_base 61: mod_base = OTHER; note = 2'-Omethylcytosine
  modified_base 62: mod_base = OTHER; note = 2'-Omethylcytosine
  modified_base 65: mod_base = OTHER; note = 2'-Omethylguanosine
  modified_base 73: mod_base = OTHER; note = 2'-Omethylguanosine

SEQ ID NO: 1251 - RNA, 76 nt, synthetic construct; identical to SEQ ID NO: 625
  source 1..76: mol_type = other RNA
  modified_base 1: mod_base = OTHER; note = 2'-Omethylguanosine
  modified_base 49: mod_base = OTHER; note = 2'-Omethylcytosine
  modified_base 50: mod_base = OTHER; note = 2'-Omethylcytosine
  modified_base 51: mod_base = OTHER; note = 2'-Omethylguanosine
  modified_base 52: mod_base = OTHER; note = 2'-Omethylguanosine
  modified_base 53: mod_base = OTHER; note = 2'-Omethylguanosine
  modified_base 61: mod_base = OTHER; note = 2'-Omethylcytosine
  modified_base 62: mod_base = OTHER; note = 2'-Omethylcytosine
  modified_base 65: mod_base = OTHER; note = 2'-Omethylguanosine
  modified_base 73: mod_base = OTHER; note = 2'-Omethylguanosine

SEQ ID NO: 1252 - RNA, 76 nt, synthetic construct; identical to SEQ ID NO: 625
  source 1..76: mol_type = other RNA
  modified_base 1: mod_base = OTHER; note = 2'-Omethylguanosine
  modified_base 61: mod_base = OTHER; note = 2'-Omethylcytosine
  modified_base 62: mod_base = OTHER; note = 2'-Omethylcytosine
  modified_base 64: mod_base = OTHER; note = 2'-Omethylguanosine
  modified_base 65: mod_base = OTHER; note = 2'-Omethylguanosine
  modified_base 73: mod_base = OTHER; note = 2'-Omethylguanosine

SEQ ID NO: 1253 - RNA, 76 nt, synthetic construct; identical to SEQ ID NO: 625
  source 1..76: mol_type = other RNA
  modified_base 1: mod_base = OTHER; note = 2'-Omethylguanosine
  modified_base 49: mod_base = OTHER; note = 2'-Omethylcytosine
  modified_base 50: mod_base = OTHER; note = 2'-Omethylcytosine
  modified_base 51: mod_base = OTHER; note = 2'-Omethylguanosine
  modified_base 52: mod_base = OTHER; note = 2'-Omethylguanosine
  modified_base 53: mod_base = OTHER; note = 2'-Omethylguanosine
  modified_base 61: mod_base = OTHER; note = 2'-Omethylcytosine
  modified_base 62: mod_base = OTHER; note = 2'-Omethylcytosine
  modified_base 64: mod_base = OTHER; note = 2'-Omethylguanosine
  modified_base 65: mod_base = OTHER; note = 2'-Omethylguanosine
  modified_base 73: mod_base = OTHER; note = 2'-Omethylguanosine

SEQ ID NO: 1254 - DNA, 75 bp, synthetic construct
  source 1..75: mol_type = other DNA
  misc_difference 73: note = a, c, g, t, unknown, or other
  misc_difference 74: note = a, c, g, t, unknown, or other
  misc_difference 75: note = a, c, g, t, unknown, or other
tcctcgttagtatagtggtgagtatccccgcctgtcacgcgggagaccggggttcgattccccgacggggagnnn

SEQ ID NO: 1255 - RNA, 76 nt, synthetic construct; identical to SEQ ID NO: 625
  source 1..76: mol_type = other RNA
  modified_base 1: mod_base = OTHER; note = 2'-Omethylguanosine
  modified_base 49: mod_base = OTHER; note = 2'-Omethylcytosine
  modified_base 50: mod_base = OTHER; note = 2'-Omethylcytosine
  modified_base 51: mod_base = OTHER; note = 2'-Omethylguanosine
  modified_base 52: mod_base = OTHER; note = 2'-Omethylguanosine
  modified_base 53: mod_base = OTHER; note = 2'-Omethylguanosine
  modified_base 61: mod_base = OTHER; note = 2'-Omethylcytosine
  modified_base 62: mod_base = OTHER; note = 2'-Omethylcytosine
  modified_base 63: mod_base = OTHER; note = 2'-fluorocytosine
  modified_base 64: mod_base = OTHER; note = 2'-Omethylguanosine
  modified_base 65: mod_base = OTHER; note = 2'-Omethylguanosine
  modified_base 73: mod_base = OTHER; note = 2'-Omethylguanosine

SEQ ID NO: 1256 - RNA, 76 nt, synthetic construct; identical to SEQ ID NO: 625
  source 1..76: mol_type = other RNA
  modified_base 1: mod_base = OTHER; note = 2'-Omethylguanosine
  modified_base 65: mod_base = OTHER; note = 2'-Omethylguanosine
  modified_base 66: mod_base = OTHER; note = 2'-Omethylcytosine
  modified_base 67: mod_base = OTHER; note = 2'-Omethylguanosine
  modified_base 68: mod_base = OTHER; note = 2'-Omethylguanosine
  modified_base 73: mod_base = OTHER; note = 2'-Omethylguanosine

SEQ ID NO: 1257 - RNA, 76 nt, synthetic construct; identical to SEQ ID NO: 625
  source 1..76: mol_type = other RNA
  modified_base 1: mod_base = OTHER; note = 2'-Omethylguanosine
  modified_base 61: mod_base = OTHER; note = 2'-Omethylcytosine
  modified_base 62: mod_base = OTHER; note = 2'-Omethylcytosine
  modified_base 65: mod_base = OTHER; note = 2'-Omethylguanosine
  modified_base 66: mod_base = OTHER; note = 2'-Omethylcytosine
  modified_base 67: mod_base = OTHER; note = 2'-Omethylguanosine
  modified_base 68: mod_base = OTHER; note = 2'-Omethylguanosine
  modified_base 73: mod_base = OTHER; note = 2'-Omethylguanosine

SEQ ID NO: 1258 - RNA, 76 nt, synthetic construct; identical to SEQ ID NO: 625
  source 1..76: mol_type = other RNA
  modified_base 1: mod_base = OTHER; note = 2'-Omethylguanosine
  modified_base 65: mod_base = OTHER; note = 2'-Omethylguanosine
  modified_base 66: mod_base = OTHER; note = 2'-Omethylcytosine
  modified_base 67: mod_base = OTHER; note = 2'-Omethylguanosine
  modified_base 68: mod_base = OTHER; note = 2'-Omethylguanosine
  modified_base 71: mod_base = OTHER; note = 2'-Omethyluridine
  modified_base 72: mod_base = OTHER; note = 2'-Omethylcytosine
  modified_base 73: mod_base = OTHER; note = 2'-Omethylguanosine

SEQ ID NO: 1259 - RNA, 76 nt, synthetic construct; identical to SEQ ID NO: 625
  source 1..76: mol_type = other RNA
  modified_base 1: mod_base = OTHER; note = 2'-Omethylguanosine
  modified_base 61: mod_base = OTHER; note = 2'-Omethylcytosine
  modified_base 62: mod_base = OTHER; note = 2'-Omethylcytosine
  modified_base 64: mod_base = OTHER; note = 2'-Omethylguanosine
  modified_base 65: mod_base = OTHER; note = 2'-Omethylguanosine
  modified_base 66: mod_base = OTHER; note = 2'-Omethylcytosine
  modified_base 67: mod_base = OTHER; note = 2'-Omethylguanosine
  modified_base 68: mod_base = OTHER; note = 2'-Omethylguanosine
  modified_base 73: mod_base = OTHER; note = 2'-Omethylguanosine

SEQ ID NO: 1260 - RNA, 76 nt, synthetic construct; identical to SEQ ID NO: 625
  source 1..76: mol_type = other RNA
  modified_base 1: mod_base = OTHER; note = 2'-Omethylguanosine
  modified_base 61: mod_base = OTHER; note = 2'-Omethylcytosine
  modified_base 62: mod_base = OTHER; note = 2'-Omethylcytosine
  modified_base 65: mod_base = OTHER; note = 2'-Omethylguanosine
  modified_base 66: mod_base = OTHER; note = 2'-Omethylcytosine
  modified_base 67: mod_base = OTHER; note = 2'-Omethylguanosine
  modified_base 68: mod_base = OTHER; note = 2'-Omethylguanosine
  modified_base 69: mod_base = OTHER; note = 2'-Omethyladenosine
  modified_base 73: mod_base = OTHER; note = 2'-Omethylguanosine

SEQ ID NO: 1261 - RNA, 76 nt, synthetic construct; identical to SEQ ID NO: 625
  source 1..76: mol_type = other RNA
  modified_base 1: mod_base = OTHER; note = 2'-Omethylguanosine
  modified_base 64: mod_base = OTHER; note = 2'-Omethylguanosine
  modified_base 65: mod_base = OTHER; note = 2'-Omethylguanosine
  modified_base 66: mod_base = OTHER; note = 2'-Omethylcytosine
  modified_base 67: mod_base = OTHER; note = 2'-Omethylguanosine
  modified_base 68: mod_base = OTHER; note = 2'-Omethylguanosine
  modified_base 71: mod_base = OTHER; note = 2'-Omethyluridine
  modified_base 72: mod_base = OTHER; note = 2'-Omethylcytosine
  modified_base 73: mod_base = OTHER; note = 2'-Omethylguanosine

SEQ ID NO: 1262 - RNA, 76 nt, synthetic construct; identical to SEQ ID NO: 625
  source 1..76: mol_type = other RNA
  modified_base 1: mod_base = OTHER; note = 2'-Omethylguanosine
  modified_base 65: mod_base = OTHER; note = 2'-Omethylguanosine
  modified_base 66: mod_base = OTHER; note = 2'-Omethylcytosine
  modified_base 67: mod_base = OTHER; note = 2'-Omethylguanosine
  modified_base 68: mod_base = OTHER; note = 2'-Omethylguanosine
  modified_base 69: mod_base = OTHER; note = 2'-Omethyladenosine
  modified_base 71: mod_base = OTHER; note = 2'-Omethyluridine
  modified_base 72: mod_base = OTHER; note = 2'-Omethylcytosine
  modified_base 73: mod_base = OTHER; note = 2'-Omethylguanosine

SEQ ID NO: 1263 - RNA, 76 nt, synthetic construct; identical to SEQ ID NO: 625
  source 1..76: mol_type = other RNA
  modified_base 1: mod_base = OTHER; note = 2'-Omethylguanosine
  modified_base 61: mod_base = OTHER; note = 2'-Omethylcytosine
  modified_base 62: mod_base = OTHER; note = 2'-Omethylcytosine
  modified_base 64: mod_base = OTHER; note = 2'-Omethylguanosine
  modified_base 65: mod_base = OTHER; note = 2'-Omethylguanosine
  modified_base 66: mod_base = OTHER; note = 2'-Omethylcytosine
  modified_base 67: mod_base = OTHER; note = 2'-Omethylguanosine
  modified_base 68: mod_base = OTHER; note = 2'-Omethylguanosine
  modified_base 69: mod_base = OTHER; note = 2'-Omethyladenosine
  modified_base 73: mod_base = OTHER; note = 2'-Omethylguanosine

SEQ ID NO: 1264 - RNA, 76 nt, synthetic construct; identical to SEQ ID NO: 625
  source 1..76: mol_type = other RNA
  modified_base 1: mod_base = OTHER; note = 2'-Omethylguanosine
  modified_base 64: mod_base = OTHER; note = 2'-Omethylguanosine
  modified_base 65: mod_base = OTHER; note = 2'-Omethylguanosine
  modified_base 66: mod_base = OTHER; note = 2'-Omethylcytosine
  modified_base 67: mod_base = OTHER; note = 2'-Omethylguanosine
  modified_base 68: mod_base = OTHER; note = 2'-Omethylguanosine
  modified_base 69: mod_base = OTHER; note = 2'-Omethyladenosine
  modified_base 71: mod_base = OTHER; note = 2'-Omethyluridine
  modified_base 72: mod_base = OTHER; note = 2'-Omethylcytosine
  modified_base 73: mod_base = OTHER; note = 2'-Omethylguanosine

SEQ ID NO: 1265 - RNA, 76 nt, synthetic construct; identical to SEQ ID NO: 625
  source 1..76: mol_type = other RNA
  modified_base 1: mod_base = OTHER; note = 2'-Omethylguanosine
  modified_base 61: mod_base = OTHER; note = 2'-Omethylcytosine
  modified_base 62: mod_base = OTHER; note = 2'-Omethylcytosine
  modified_base 65: mod_base = OTHER; note = 2'-Omethylguanosine
  modified_base 66: mod_base = OTHER; note = 2'-Omethylcytosine
  modified_base 67: mod_base = OTHER; note = 2'-Omethylguanosine
  modified_base 68: mod_base = OTHER; note = 2'-Omethylguanosine
  modified_base 69: mod_base = OTHER; note = 2'-Omethyladenosine
  modified_base 71: mod_base = OTHER; note = 2'-Omethyluridine
  modified_base 72: mod_base = OTHER; note = 2'-Omethylcytosine
  modified_base 73: mod_base = OTHER; note = 2'-Omethylguanosine

SEQ ID NO: 1266 - RNA, 76 nt, synthetic construct; identical to SEQ ID NO: 625
  source 1..76: mol_type = other RNA
  modified_base 1: mod_base = OTHER; note = 2'-Omethylguanosine
  modified_base 61: mod_base = OTHER; note = 2'-Omethylcytosine
  modified_base 62: mod_base = OTHER; note = 2'-Omethylcytosine
  modified_base 64: mod_base = OTHER; note = 2'-Omethylguanosine
  modified_base 65: mod_base = OTHER; note = 2'-Omethylguanosine
  modified_base 66: mod_base = OTHER; note = 2'-Omethylcytosine
  modified_base 67: mod_base = OTHER; note = 2'-Omethylguanosine
  modified_base 68: mod_base = OTHER; note = 2'-Omethylguanosine
  modified_base 71: mod_base = OTHER; note = 2'-Omethyluridine
  modified_base 72: mod_base = OTHER; note = 2'-Omethylcytosine
  modified_base 73: mod_base = OTHER; note = 2'-Omethylguanosine

SEQ ID NO: 1267 - RNA, 76 nt, synthetic construct; identical to SEQ ID NO: 625
  source 1..76: mol_type = other RNA
  modified_base 1: mod_base = OTHER; note = 2'-Omethylguanosine
  modified_base 61: mod_base = OTHER; note = 2'-Omethylcytosine
  modified_base 62: mod_base = OTHER; note = 2'-Omethylcytosine
  modified_base 63: mod_base = OTHER; note = 2'-fluorocytosine
  modified_base 64: mod_base = OTHER; note = 2'-Omethylguanosine
  modified_base 65: mod_base = OTHER; note = 2'-Omethylguanosine
  modified_base 66: mod_base = OTHER; note = 2'-Omethylcytosine
  modified_base 67: mod_base = OTHER; note = 2'-Omethylguanosine
  modified_base 68: mod_base = OTHER; note = 2'-Omethylguanosine
  modified_base 69: mod_base = OTHER; note = 2'-Omethyladenosine
  modified_base 71: mod_base = OTHER; note = 2'-Omethyluridine
  modified_base 72: mod_base = OTHER; note = 2'-Omethylcytosine
  modified_base 73: mod_base = OTHER; note = 2'-Omethylguanosine

SEQ ID NO: 1268 - RNA, 76 nt, synthetic construct; identical to SEQ ID NO: 625
  source 1..76: mol_type = other RNA
  modified_base 1: mod_base = OTHER; note = 2'-Omethylguanosine
  modified_base 61: mod_base = OTHER; note = 2'-Omethylcytosine
  modified_base 62: mod_base = OTHER; note = 2'-Omethylcytosine
  modified_base 64: mod_base = OTHER; note = 2'-Omethylguanosine
  modified_base 65: mod_base = OTHER; note = 2'-Omethylguanosine
  modified_base 66: mod_base = OTHER; note = 2'-Omethylcytosine
  modified_base 67: mod_base = OTHER; note = 2'-Omethylguanosine
  modified_base 68: mod_base = OTHER; note = 2'-Omethylguanosine
  modified_base 69: mod_base = OTHER; note = 2'-Omethyladenosine
  modified_base 70: mod_base = OTHER; note = 2'-fluoroguanosine
  modified_base 71: mod_base = OTHER; note = 2'-Omethyluridine
  modified_base 72: mod_base = OTHER; note = 2'-Omethylcytosine
  modified_base 73: mod_base = OTHER; note = 2'-Omethylguanosine

SEQ ID NO: 1269 - RNA, 76 nt, synthetic construct; identical to SEQ ID NO: 625
  source 1..76: mol_type = other RNA
  modified_base 1: mod_base = OTHER; note = 2'-Omethylguanosine
  modified_base 61: mod_base = OTHER; note = 2'-Omethylcytosine
  modified_base 62: mod_base = OTHER; note = 2'-Omethylcytosine
  modified_base 63: mod_base = OTHER; note = 2'-fluorocytosine
  modified_base 64: mod_base = OTHER; note = 2'-Omethylguanosine
  modified_base 65: mod_base = OTHER; note = 2'-Omethylguanosine
  modified_base 66: mod_base = OTHER; note = 2'-Omethylcytosine
  modified_base 67: mod_base = OTHER; note = 2'-Omethylguanosine
  modified_base 68: mod_base = OTHER; note = 2'-Omethylguanosine
  modified_base 69: mod_base = OTHER; note = 2'-Omethyladenosine
  modified_base 70: mod_base = OTHER; note = 2'-fluoroguanosine
  modified_base 71: mod_base = OTHER; note = 2'-Omethyluridine
  modified_base 72: mod_base = OTHER; note = 2'-Omethylcytosine
  modified_base 73: mod_base = OTHER; note = 2'-Omethylguanosine

SEQ ID NO: 1270 - RNA, 76 nt, synthetic construct; identical to SEQ ID NO: 625
  source 1..76: mol_type = other RNA
  modified_base 1: mod_base = OTHER; note = 2'-Omethylguanosine
  modified_base 61: mod_base = OTHER; note = 2'-Omethylcytosine
  modified_base 62: mod_base = OTHER; note = 2'-Omethylcytosine
  modified_base 63: mod_base = OTHER; note = 2'-fluorocytosine
  modified_base 64: mod_base = OTHER; note = 2'-fluoroguanosine
  modified_base 65: mod_base = OTHER; note = 2'-Omethylguanosine
  modified_base 66: mod_base = OTHER; note = 2'-Omethylcytosine
  modified_base 67: mod_base = OTHER; note = 2'-Omethylguanosine
  modified_base 68: mod_base = OTHER; note = 2'-Omethylguanosine
  modified_base 69: mod_base = OTHER; note = 2'-Omethyladenosine
  modified_base 70: mod_base = OTHER; note = 2'-fluoroguanosine
  modified_base 71: mod_base = OTHER; note = 2'-Omethyluridine
  modified_base 72: mod_base = OTHER; note = 2'-Omethylcytosine
  modified_base 73: mod_base = OTHER; note = 2'-Omethylguanosine

SEQ ID NO: 1271 - RNA, 76 nt, synthetic construct; identical to SEQ ID NO: 625
  source 1..76: mol_type = other RNA
  modified_base 1: mod_base = OTHER; note = 2'-Omethylguanosine
  modified_base 54: mod_base = OTHER; note = 2'-Omethyluridine
  modified_base 56: mod_base = OTHER; note = 2'-Omethylcytosine
  modified_base 59: mod_base = OTHER; note = 2'-Omethylguanosine
  modified_base 73: mod_base = OTHER; note = 2'-Omethylguanosine

SEQ ID NO: 1272 - RNA, 76 nt, synthetic construct; identical to SEQ ID NO: 625
  source 1..76: mol_type = other RNA
  modified_base 1: mod_base = OTHER; note = 2'-Omethylguanosine
  modified_base 54: mod_base = OTHER; note = 2'-Omethyluridine
  modified_base 56: mod_base = OTHER; note = 2'-Omethylcytosine
  modified_base 57: mod_base = OTHER; note = 2'-Omethylguanosine
  modified_base 59: mod_base = OTHER; note = 2'-Omethylguanosine
  modified_base 73: mod_base = OTHER; note = 2'-Omethylguanosine

SEQ ID NO: 1273 - RNA, 76 nt, synthetic construct; identical to SEQ ID NO: 625
  source 1..76: mol_type = other RNA
  modified_base 1: mod_base = OTHER; note = 2'-Omethylguanosine
  modified_base 54: mod_base = OTHER; note = 2'-Omethyluridine
  modified_base 56: mod_base = OTHER; note = 2'-Omethylcytosine
  modified_base 57: mod_base = OTHER; note = 2'-Omethylguanosine
  modified_base 59: mod_base = OTHER; note = 2'-Omethylguanosine
  modified_base 60: mod_base = OTHER; note = 2'-Omethyluridine
  modified_base 73: mod_base = OTHER; note = 2'-Omethylguanosine

SEQ ID NO: 1274 - RNA, 76 nt, synthetic construct; identical to SEQ ID NO: 625
  source 1..76: mol_type = other RNA
  modified_base 1: mod_base = OTHER; note = 2'-Omethylguanosine
  modified_base 54: mod_base = OTHER; note = 2'-Omethyluridine phosphorothiorate
  modified_base 56: mod_base = OTHER; note = 2'-Omethylcytosine
  modified_base 59: mod_base = OTHER; note = 2'-Omethylguanosine
  modified_base 73: mod_base = OTHER; note = 2'-Omethylguanosine

SEQ ID NO: 1275 - RNA, 76 nt, synthetic construct; identical to SEQ ID NO: 625
  source 1..76: mol_type = other RNA
  modified_base 1: mod_base = OTHER; note = 2'-Omethylguanosine
  modified_base 54: mod_base = OTHER; note = 2'-Omethyluridine
  modified_base 55: mod_base = OTHER; note = Uridine phosphorothiorate
  modified_base 56: mod_base = OTHER; note = 2'-Omethylcytosine
  modified_base 59: mod_base = OTHER; note = 2'-Omethylguanosine
  modified_base 73: mod_base = OTHER; note = 2'-Omethylguanosine

SEQ ID NO: 1276 - RNA, 76 nt, synthetic construct; identical to SEQ ID NO: 625
  source 1..76: mol_type = other RNA
  modified_base 1: mod_base = OTHER; note = 2'-Omethylguanosine
  modified_base 54: mod_base = OTHER; note = 2'-Omethyluridine phosphorothiorate
  modified_base 55: mod_base = OTHER; note = Uridine phosphorothiorate
  modified_base 56: mod_base = OTHER; note = 2'-Omethylcytosine
  modified_base 59: mod_base = OTHER; note = 2'-Omethylguanosine
  modified_base 73: mod_base = OTHER; note = 2'-Omethylguanosine

SEQ ID NO: 1277 - RNA, 76 nt, synthetic construct; identical to SEQ ID NO: 625
  source 1..76: mol_type = other RNA
  modified_base 1: mod_base = OTHER; note = 2'-Omethylguanosine
  modified_base 54: mod_base = OTHER; note = 2'-Omethyluridine
  modified_base 56: mod_base = OTHER; note = 2'-Omethylcytosine
  modified_base 57: mod_base = OTHER; note = 2'-fluoroguanosine
  modified_base 59: mod_base = OTHER; note = 2'-Omethylguanosine
  modified_base 73: mod_base = OTHER; note = 2'-Omethylguanosine

SEQ ID NO: 1278 - RNA, 76 nt, synthetic construct; identical to SEQ ID NO: 625
  source 1..76: mol_type = other RNA
  modified_base 1: mod_base = OTHER; note = 2'-Omethylguanosine
  modified_base 54: mod_base = OTHER; note = 2'-Omethyluridine
  modified_base 56: mod_base = OTHER; note = 2'-Omethylcytosine
  modified_base 57: mod_base = OTHER; note = 2'-fluoroguanosine
  modified_base 59: mod_base = OTHER; note = 2'-Omethylguanosine
  modified_base 60: mod_base = OTHER; note = 2'-Omethyluridine
  modified_base 73: mod_base = OTHER; note = 2'-Omethylguanosine

SEQ ID NO: 1279 - RNA, 76 nt, synthetic construct; identical to SEQ ID NO: 625
  source 1..76: mol_type = other RNA
  modified_base 1: mod_base = OTHER; note = 2'-Omethylguanosine
  modified_base 54: mod_base = OTHER; note = 2'-Omethyluridine
  modified_base 56: mod_base = OTHER; note = 2'-Omethylcytosine
  modified_base 59: mod_base = OTHER; note = 2'-Omethylguanosine
  modified_base 60: mod_base = OTHER; note = 2'-fluorouridine
  modified_base 73: mod_base = OTHER; note = 2'-Omethylguanosine

SEQ ID NO: 1280 - RNA, 76 nt, synthetic construct; identical to SEQ ID NO: 625
  source 1..76: mol_type = other RNA
  modified_base 1: mod_base = OTHER; note = 2'-Omethylguanosine
  modified_base 54: mod_base = OTHER; note = 2'-Omethyluridine
  modified_base 56: mod_base = OTHER; note = 2'-Omethylcytosine
  modified_base 57: mod_base = OTHER; note = 2'-Omethylguanosine
  modified_base 59: mod_base = OTHER; note = 2'-Omethylguanosine
  modified_base 60: mod_base = OTHER; note = 2'-fluorouridine
  modified_base 73: mod_base = OTHER; note = 2'-Omethylguanosine

SEQ ID NO: 1281 - RNA, 76 nt, synthetic construct; identical to SEQ ID NO: 625
  source 1..76: mol_type = other RNA
  modified_base 1: mod_base = OTHER; note = 2'-Omethylguanosine
  modified_base 54: mod_base = OTHER; note = 2'-Omethyluridine
  modified_base 56: mod_base = OTHER; note = 2'-Omethylcytosine
  modified_base 57: mod_base = OTHER; note = 2'-fluoroguanosine
  modified_base 59: mod_base = OTHER; note = 2'-Omethylguanosine
  modified_base 60: mod_base = OTHER; note = 2'-fluorouridine
  modified_base 73: mod_base = OTHER; note = 2'-Omethylguanosine

SEQ ID NO: 1282 - RNA, 76 nt, synthetic construct; identical to SEQ ID NO: 625
  source 1..76: mol_type = other RNA
  modified_base 1: mod_base = OTHER; note = 2'-Omethylguanosine
  modified_base 54: mod_base = OTHER; note = 2'-Omethyluridine
  modified_base 56: mod_base = OTHER; note = 2'-Omethylcytosine
  modified_base 57: mod_base = OTHER; note = 2'-fluoroguanosine
  modified_base 58: mod_base = OTHER; note = 2'-fluoroadenosine
  modified_base 59: mod_base = OTHER; note = 2'-Omethylguanosine
  modified_base 60: mod_base = OTHER; note = 2'-fluorouridine
  modified_base 73: mod_base = OTHER; note = 2'-Omethylguanosine

SEQ ID NO: 1283 - RNA, 76 nt, synthetic construct; identical to SEQ ID NO: 625
  source 1..76: mol_type = other RNA
  modified_base 1: mod_base = OTHER; note = 2'-Omethylguanosine
  modified_base 54: mod_base = OTHER; note = 2'-Omethyluridine phosphorothiorate
  modified_base 56: mod_base = OTHER; note = 2'-Omethylcytosine
  modified_base 57: mod_base = OTHER; note = 2'-fluoroguanosine
  modified_base 59: mod_base = OTHER; note = 2'-Omethylguanosine
  modified_base 60: mod_base = OTHER; note = 2'-fluorouridine
  modified_base 73: mod_base = OTHER; note = 2'-Omethylguanosine

SEQ ID NO: 1284 - RNA, 76 nt, synthetic construct; identical to SEQ ID NO: 625
  source 1..76: mol_type = other RNA
  modified_base 1: mod_base = OTHER; note = 2'-Omethylguanosine
  modified_base 54: mod_base = OTHER; note = 2'-Omethyluridine
  modified_base 55: mod_base = OTHER; note = Uridine phosphorothiorate
  modified_base 56: mod_base = OTHER; note = 2'-Omethylcytosine
  modified_base 57: mod_base = OTHER; note = 2'-fluoroguanosine
  modified_base 59: mod_base = OTHER; note = 2'-Omethylguanosine
  modified_base 60: mod_base = OTHER; note = 2'-fluorouridine
  modified_base 73: mod_base = OTHER; note = 2'-Omethylguanosine

SEQ ID NO: 1285 - DNA, 76 bp, synthetic construct
  source 1..76: mol_type = other DNA
  misc_difference 74: note = a, c, g, t, unknown, or other
  misc_difference 75: note = a, c, g, t, unknown, or other
  misc_difference 76: note = a, c, g, t, unknown, or other
ccttcgatagctcagctggtagagcggaggactgtagatccttaggtcgctggttcgattccggctcgaaggannn

SEQ ID NO: 1286 - RNA, 76 nt, synthetic construct; identical to SEQ ID NO: 625
  source 1..76: mol_type = other RNA
  modified_base 1: mod_base = OTHER; note = 2'-Omethylguanosine
  modified_base 54: mod_base = OTHER; note = 2'-Omethyluridine
  modified_base 56: mod_base = OTHER; note = 2'-Omethylcytosine
  modified_base 57: mod_base = OTHER; note = 2'-fluoroguanosine
  modified_base 58: mod_base = OTHER; note = Adenosine phosphorothiorate
  modified_base 59: mod_base = OTHER; note = 2'-Omethylguanosine
  modified_base 60: mod_base = OTHER; note = 2'-fluorouridine
  modified_base 73: mod_base = OTHER; note = 2'-Omethylguanosine

SEQ ID NO: 1287 - RNA, 76 nt, synthetic construct; identical to SEQ ID NO: 625
  source 1..76: mol_type = other RNA
  modified_base 1: mod_base = OTHER; note = 2'-Omethylguanosine
  modified_base 54: mod_base = OTHER; note = 2'-Omethyluridine
  modified_base 56: mod_base = OTHER; note = 2'-Omethylcytosine
  modified_base 57: mod_base = OTHER; note = 2'-fluoroguanosine
  modified_base 58: mod_base = OTHER; note = 2'-fluoroadenosine phosphorothiorate
  modified_base 59: mod_base = OTHER; note = 2'-Omethylguanosine
  modified_base 60: mod_base = OTHER; note = 2'-fluorouridine
  modified_base 73: mod_base = OTHER; note = 2'-Omethylguanosine

SEQ ID NO: 1288 - RNA, 76 nt, synthetic construct; identical to SEQ ID NO: 625
  source 1..76: mol_type = other RNA
  modified_base 1: mod_base = OTHER; note = 2'-Omethylguanosine
  modified_base 54: mod_base = OTHER; note = 2'-Omethyluridine phosphorothiorate
  modified_base 55: mod_base = OTHER; note = Uridine phosphorothiorate
  modified_base 56: mod_base = OTHER; note = 2'-Omethylcytosine
  modified_base 57: mod_base = OTHER; note = 2'-fluoroguanosine
  modified_base 59: mod_base = OTHER; note = 2'-Omethylguanosine
  modified_base 60: mod_base = OTHER; note = 2'-fluorouridine
  modified_base 73: mod_base = OTHER; note = 2'-Omethylguanosine

SEQ ID NO: 1289 - RNA, 76 nt, synthetic construct; identical to SEQ ID NO: 625
  source 1..76: mol_type = other RNA
  modified_base 1: mod_base = OTHER; note = 2'-Omethylguanosine
  modified_base 54: mod_base = OTHER; note = 2'-Omethyluridine phosphorothiorate
  modified_base 55: mod_base = OTHER; note = Uridine phosphorothiorate
  modified_base 56: mod_base = OTHER; note = 2'-Omethylcytosine
  modified_base 57: mod_base = OTHER; note = 2'-fluoroguanosine
  modified_base 58: mod_base = OTHER; note = Adenosine phosphorothiorate
  modified_base 59: mod_base = OTHER; note = 2'-Omethylguanosine
  modified_base 60: mod_base = OTHER; note = 2'-fluorouridine
  modified_base 73: mod_base = OTHER; note = 2'-Omethylguanosine

SEQ ID NO: 1290 - RNA, 76 nt, synthetic construct; identical to SEQ ID NO: 625
  source 1..76: mol_type = other RNA
  modified_base 1: mod_base = OTHER; note = 2'-Omethylguanosine
  modified_base 54: mod_base = OTHER; note = 2'-Omethyluridine phosphorothiorate
  modified_base 55: mod_base = OTHER; note = Uridine phosphorothiorate
  modified_base 56: mod_base = OTHER; note = 2'-Omethylcytosine
  modified_base 57: mod_base = OTHER; note = 2'-fluoroguanosine
  modified_base 58: mod_base = OTHER; note = 2'-fluoroadenosine
  modified_base 59: mod_base = OTHER; note = 2'-Omethylguanosine
  modified_base 60: mod_base = OTHER; note = 2'-fluorouridine
  modified_base 73: mod_base = OTHER; note = 2'-Omethylguanosine

SEQ ID NO: 1291 - skipped

SEQ ID NO: 1292 - RNA, 76 nt, synthetic construct; identical to SEQ ID NO: 625
  source 1..76: mol_type = other RNA
  modified_base 1: mod_base = OTHER; note = 2'-Omethylguanosine
  modified_base 54: mod_base = OTHER; note = 2'-Omethyluridine phosphorothiorate
  modified_base 55: mod_base = OTHER; note = Uridine phosphorothiorate
  modified_base 56: mod_base = OTHER; note = 2'-Omethylcytosine
  modified_base 57: mod_base = OTHER; note = 2'-fluoroguanosine
  modified_base 58: mod_base = OTHER; note = 2'-fluoroadenosine phosphorothiorate
  modified_base 59: mod_base = OTHER; note = 2'-Omethylguanosine
  modified_base 60: mod_base = OTHER; note = 2'-fluorouridine
  modified_base 73: mod_base = OTHER; note = 2'-Omethylguanosine

SEQ ID NO: 1293 - RNA, 76 nt, synthetic construct; identical to SEQ ID NO: 625
  source 1..76: mol_type = other RNA
  modified_base 1: mod_base = OTHER; note = 2'-Omethylguanosine
  modified_base 14: mod_base = OTHER; note = 2'-Omethyladenosine
  modified_base 16: mod_base = OTHER; note = 2'-Omethyluridine
  modified_base 73: mod_base = OTHER; note = 2'-Omethylguanosine

SEQ ID NO: 1294 - RNA, 76 nt, synthetic construct; identical to SEQ ID NO: 625
  source 1..76: mol_type = other RNA
  modified_base 1: mod_base = OTHER; note = 2'-Omethylguanosine
  modified_base 14: mod_base = OTHER; note = 2'-Omethyladenosine
  modified_base 15: mod_base = OTHER; note = 2'-Omethyladenosine
  modified_base 73: mod_base = OTHER; note = 2'-Omethylguanosine

SEQ ID NO: 1295 - skipped

SEQ ID NO: 1296 - RNA, 76 nt, synthetic construct; identical to SEQ ID NO: 625
  source 1..76: mol_type = other RNA
  modified_base 1: mod_base = OTHER; note = 2'-Omethylguanosine
  modified_base 15: mod_base = OTHER; note = 2'-Omethyladenosine
  modified_base 16: mod_base = OTHER; note = 2'-Omethyluridine
  modified_base 73: mod_base = OTHER; note = 2'-Omethylguanosine

SEQ ID NO: 1297 - RNA, 76 nt, synthetic construct; identical to SEQ ID NO: 625
  source 1..76: mol_type = other RNA
  modified_base 1: mod_base = OTHER; note = 2'-Omethylguanosine
  modified_base 16: mod_base = OTHER; note = 2'-Omethyluridine
  modified_base 17: mod_base = OTHER; note = 2'-Omethylguanosine
  modified_base 73: mod_base = OTHER; note = 2'-Omethylguanosine

SEQ ID NO: 1298 - RNA, 76 nt, synthetic construct; identical to SEQ ID NO: 625
  source 1..76: mol_type = other RNA
  modified_base 1: mod_base = OTHER; note = 2'-Omethylguanosine
  modified_base 17: mod_base = OTHER; note = 2'-Omethylguanosine
  modified_base 18: mod_base = OTHER; note = 2'-Omethylguanosine
  modified_base 73: mod_base = OTHER; note = 2'-Omethylguanosine

SEQ ID NO: 1299 - RNA, 76 nt, synthetic construct; identical to SEQ ID NO: 625
  source 1..76: mol_type = other RNA
  modified_base 1: mod_base = OTHER; note = 2'-Omethylguanosine
  modified_base 16: mod_base = OTHER; note = 2'-Omethyluridine
  modified_base 18: mod_base = OTHER; note = 2'-Omethylguanosine
  modified_base 73: mod_base = OTHER; note = 2'-Omethylguanosine

SEQ ID NO: 1300 - skipped

SEQ ID NO: 1301 - RNA, 76 nt, synthetic construct; identical to SEQ ID NO: 625
  source 1..76: mol_type = other RNA
  modified_base 1: mod_base = OTHER; note = 2'-Omethylguanosine
  modified_base 16: mod_base = OTHER; note = 2'-Omethyluridine
  modified_base 17: mod_base = OTHER; note = 2'-Omethylguanosine
  modified_base 18: mod_base = OTHER; note = 2'-Omethylguanosine
  modified_base 73: mod_base = OTHER; note = 2'-Omethylguanosine

SEQ ID NO: 1302 - RNA, 76 nt, synthetic construct; identical to SEQ ID NO: 625
  source 1..76: mol_type = other RNA
  modified_base 1: mod_base = OTHER; note = 2'-Omethylguanosine
  modified_base 14: mod_base = OTHER; note = 2'-Omethyladenosine
  modified_base 16: mod_base = OTHER; note = 2'-Omethyluridine
  modified_base 20: mod_base = OTHER; note = 2'-Omethyluridine
  modified_base 73: mod_base = OTHER; note = 2'-Omethylguanosine

SEQ ID NO: 1303 - RNA, 76 nt, synthetic construct; identical to SEQ ID NO: 625
  source 1..76: mol_type = other RNA
  modified_base 1: mod_base = OTHER; note = 2'-Omethylguanosine
  modified_base 16: mod_base = OTHER; note = 2'-Omethyluridine
  modified_base 17: mod_base = OTHER; note = 2'-Omethylguanosine
  modified_base 20: mod_base = OTHER; note = 2'-Omethyluridine
  modified_base 73: mod_base = OTHER; note = 2'-Omethylguanosine

SEQ ID NO: 1304 - RNA, 76 nt, synthetic construct; identical to SEQ ID NO: 625
  source 1..76: mol_type = other RNA
  modified_base 1: mod_base = OTHER; note = 2'-Omethylguanosine
  modified_base 17: mod_base = OTHER; note = 2'-Omethylguanosine
  modified_base 18: mod_base = OTHER; note = 2'-Omethylguanosine
  modified_base 20: mod_base = OTHER; note = 2'-Omethyluridine
  modified_base 73: mod_base = OTHER; note = 2'-Omethylguanosine

SEQ ID NO: 1305 - RNA, 76 nt, synthetic construct; identical to SEQ ID NO: 625
  source 1..76: mol_type = other RNA
  modified_base 1: mod_base = OTHER; note = 2'-Omethylguanosine
  modified_base 16: mod_base = OTHER; note = 2'-Omethyluridine
  modified_base 17: mod_base = OTHER; note = 2'-Omethylguanosine
  modified_base 18: mod_base = OTHER; note = 2'-Omethylguanosine
  modified_base 20: mod_base = OTHER; note = 2'-Omethyluridine
  modified_base 73: mod_base = OTHER; note = 2'-Omethylguanosine

SEQ ID NO: 1306 - RNA, 76 nt, synthetic construct; identical to SEQ ID NO: 625
  source 1..76: mol_type = other RNA
  modified_base 1: mod_base = OTHER; note = 2'-Omethylguanosine
  modified_base 14: mod_base = OTHER; note = 2'-Omethyladenosine
  modified_base 16: mod_base = OTHER; note = 2'-Omethyluridine
  modified_base 17: mod_base = OTHER; note = 2'-Omethylguanosine
  modified_base 20: mod_base = OTHER; note = 2'-Omethyluridine
  modified_base 73: mod_base = OTHER; note = 2'-Omethylguanosine

SEQ ID NO: 1307 - RNA, 76 nt, synthetic construct; identical to SEQ ID NO: 625
  source 1..76: mol_type = other RNA
  modified_base 1: mod_base = OTHER; note = 2'-Omethylguanosine
  modified_base 14: mod_base = OTHER; note = 2'-Omethyladenosine
  modified_base 17: mod_base = OTHER; note = 2'-Omethylguanosine
  modified_base 18: mod_base = OTHER; note = 2'-Omethylguanosine
  modified_base 20: mod_base = OTHER; note = 2'-Omethyluridine
  modified_base 73: mod_base = OTHER; note = 2'-Omethylguanosine

SEQ ID NO: 1308 - RNA, 76 nt, synthetic construct; identical to SEQ ID NO: 625
  source 1..76: mol_type = other RNA
  modified_base 1: mod_base = OTHER; note = 2'-Omethylguanosine
  modified_base 14: mod_base = OTHER; note = 2'-Omethyladenosine
  modified_base 16: mod_base = OTHER; note = 2'-Omethyluridine
  modified_base 17: mod_base = OTHER; note = 2'-Omethylguanosine
  modified_base 18: mod_base = OTHER; note = 2'-Omethylguanosine
  modified_base 20: mod_base = OTHER; note = 2'-Omethyluridine
  modified_base 73: mod_base = OTHER; note = 2'-Omethylguanosine

SEQ ID NO: 1309 - RNA, 76 nt, synthetic construct; identical to SEQ ID NO: 625
  source 1..76: mol_type = other RNA
  modified_base 1: mod_base = OTHER; note = 2'-Omethylguanosine
  modified_base 14: mod_base = OTHER; note = 2'-Omethyladenosine
  modified_base 16: mod_base = OTHER; note = 2'-Omethyluridine
  modified_base 17: mod_base = OTHER; note = 2'-Omethylguanosine
  modified_base 18: mod_base = OTHER; note = 2'-Omethylguanosine
  modified_base 19: mod_base = OTHER; note = 2'-fluoroadenosine
  modified_base 20: mod_base = OTHER; note = 2'-Omethyluridine
  modified_base 73: mod_base = OTHER; note = 2'-Omethylguanosine

SEQ ID NO: 1310 - RNA, 76 nt, synthetic construct; identical to SEQ ID NO: 625
  source 1..76: mol_type = other RNA
  modified_base 1: mod_base = OTHER; note = 2'-Omethylguanosine
  modified_base 14: mod_base = OTHER; note = 2'-Omethyladenosine
  modified_base 16: mod_base = OTHER; note = 2'-Omethyluridine
  modified_base 17: mod_base = OTHER; note = 2'-Omethylguanosine
  modified_base 18: mod_base = OTHER; note = 2'-Omethylguanosine
  modified_base 20: mod_base = OTHER; note = 2'-Omethyluridine
  modified_base 21: mod_base = OTHER; note = 2'-fluoroadenosine
  modified_base 73: mod_base = OTHER; note = 2'-Omethylguanosine

SEQ ID NO: 1311 - RNA, 76 nt, synthetic construct; identical to SEQ ID NO: 625
  source 1..76: mol_type = other RNA
  modified_base 1: mod_base = OTHER; note = 2'-Omethylguanosine
  modified_base 14: mod_base = OTHER; note = 2'-Omethyladenosine
  modified_base 15: mod_base = OTHER; note = 2'-fluoroadenosine
  modified_base 16: mod_base = OTHER; note = 2'-Omethyluridine
  modified_base 17: mod_base = OTHER; note = 2'-Omethylguanosine
  modified_base 18: mod_base = OTHER; note = 2'-Omethylguanosine
  modified_base 20: mod_base = OTHER; note = 2'-Omethyluridine
  modified_base 73: mod_base = OTHER; note = 2'-Omethylguanosine

SEQ ID NO: 1312 - RNA, 76 nt, synthetic construct; identical to SEQ ID NO: 625
  source 1..76: mol_type = other RNA
  modified_base 1: mod_base = OTHER; note = 2'-Omethylguanosine
  modified_base 14: mod_base = OTHER; note = 2'-Omethyladenosine
  modified_base 15: mod_base = OTHER; note = 2'-fluoroadenosine
  modified_base 16: mod_base = OTHER; note = 2'-Omethyluridine
  modified_base 17: mod_base = OTHER; note = 2'-Omethylguanosine
  modified_base 18: mod_base = OTHER; note = 2'-Omethylguanosine
  modified_base 19: mod_base = OTHER; note = 2'-fluoroadenosine
  modified_base 20: mod_base = OTHER; note = 2'-Omethyluridine
  modified_base 73: mod_base = OTHER; note = 2'-Omethylguanosine

SEQ ID NO: 1313 - RNA, 76 nt, synthetic construct; identical to SEQ ID NO: 625
  source 1..76: mol_type = other RNA
  modified_base 1: mod_base = OTHER; note = 2'-Omethylguanosine
  modified_base 14: mod_base = OTHER; note = 2'-Omethyladenosine
  modified_base 15: mod_base = OTHER; note = 2'-fluoroadenosine
  modified_base 16: mod_base = OTHER; note = 2'-Omethyluridine phosphorothiorate
  modified_base 17: mod_base = OTHER; note = 2'-Omethylguanosine phosphorothiorate
  modified_base 18: mod_base = OTHER; note = 2'-Omethylguanosine
  modified_base 19: mod_base = OTHER; note = 2'-fluoroadenosine
  modified_base 20: mod_base = OTHER; note = 2'-Omethyluridine
  modified_base 73: mod_base = OTHER; note = 2'-Omethylguanosine

SEQ ID NO: 1314 - RNA, 76 nt, synthetic construct; identical to SEQ ID NO: 625
  source 1..76: mol_type = other RNA
  modified_base 1: mod_base = OTHER; note = 2'-Omethylguanosine
  modified_base 14: mod_base = OTHER; note = 2'-Omethyladenosine
  modified_base 15: mod_base = OTHER; note = 2'-fluoroadenosine
  modified_base 16: mod_base = OTHER; note = 2'-Omethyluridine
  modified_base 17: mod_base = OTHER; note = 2'-Omethylguanosine phosphorothiorate
  modified_base 18: mod_base = OTHER; note = 2'-Omethylguanosine phosphorothiorate
  modified_base 19: mod_base = OTHER; note = 2'-fluoroadenosine
  modified_base 20: mod_base = OTHER; note = 2'-Omethyluridine
  modified_base 73: mod_base = OTHER; note = 2'-Omethylguanosine

SEQ ID NO: 1315 - RNA, 76 nt, synthetic construct; identical to SEQ ID NO: 625
  source 1..76: mol_type = other RNA
  modified_base 1: mod_base = OTHER; note = 2'-Omethylguanosine
  modified_base 14: mod_base = OTHER; note = 2'-Omethyladenosine
  modified_base 15: mod_base = OTHER; note = 2'-fluoroadenosine
  modified_base 16: mod_base = OTHER; note = 2'-Omethyluridine
  modified_base 17: mod_base = OTHER; note = 2'-Omethylguanosine
  modified_base 18: mod_base = OTHER; note = 2'-Omethylguanosine phosphorothiorate
  modified_base 19: mod_base = OTHER; note = 2'-fluoroadenosine phosphorothiorate
  modified_base 20: mod_base = OTHER; note = 2'-Omethyluridine
  modified_base 73: mod_base = OTHER; note = 2'-Omethylguanosine

SEQ ID NO: 1316 - RNA, 76 nt, synthetic construct; identical to SEQ ID NO: 625
  source 1..76: mol_type = other RNA
  modified_base 1: mod_base = OTHER; note = 2'-Omethylguanosine
  modified_base 14: mod_base = OTHER; note = 2'-Omethyladenosine
  modified_base 15: mod_base = OTHER; note = 2'-fluoroadenosine
  modified_base 16: mod_base = OTHER; note = 2'-Omethyluridine
  modified_base 17: mod_base = OTHER; note = 2'-Omethylguanosine
  modified_base 18: mod_base = OTHER; note = 2'-Omethylguanosine
  modified_base 19: mod_base = OTHER; note = 2'-fluoroadenosine phosphorothiorate
  modified_base 20: mod_base = OTHER; note = 2'-Omethyluridine phosphorothiorate
  modified_base 73: mod_base = OTHER; note = 2'-Omethylguanosine

SEQ ID NO: 1317 - RNA, 76 nt, synthetic construct; identical to SEQ ID NO: 625
  source 1..76: mol_type = other RNA
  modified_base 1: mod_base = OTHER; note = 2'-Omethylguanosine
  modified_base 14: mod_base = OTHER; note = 2'-Omethyladenosine
  modified_base 15: mod_base = OTHER; note = 2'-fluoroadenosine
  modified_base 16: mod_base = OTHER; note = 2'-Omethyluridine phosphorothiorate
  modified_base 17: mod_base = OTHER; note = 2'-Omethylguanosine phosphorothiorate
  modified_base 18: mod_base = OTHER; note = 2'-Omethylguanosine phosphorothiorate
  modified_base 19: mod_base = OTHER; note = 2'-fluoroadenosine phosphorothiorate
  modified_base 20: mod_base = OTHER; note = 2'-Omethyluridine phosphorothiorate
  modified_base 73: mod_base = OTHER; note = 2'-Omethylguanosine

SEQ ID NO: 1318 - skipped

SEQ ID NO: 1319 - RNA, 76 nt, synthetic construct; identical to SEQ ID NO: 625
  source 1..76: mol_type = other RNA
  modified_base 1: mod_base = OTHER; note = 2'-Omethylguanosine phosphorothiorate
  modified_base 2: mod_base = OTHER; note = 2'-Omethylguanosine
  modified_base 3: mod_base = OTHER; note = 2'-Omethylcytosine
  modified_base 17: mod_base = OTHER; note = Guanosine phosphorothiorate
  modified_base 18: mod_base = OTHER; note = 2'-Omethylguanosine
  modified_base 19: mod_base = OTHER; note = Adenosine phosphorothiorate
  modified_base 20: mod_base = OTHER; note = 2'-Omethyluridine phosphorothiorate
  modified_base 25: mod_base = OTHER; note = 2'-Omethylcytosine
  modified_base 29: mod_base = OTHER; note = 2'-Omethylguanosine
  modified_base 35: mod_base = OTHER; note = Cytosine phosphorothiorate
  modified_base 37: mod_base = OTHER; note = Adenosine phosphorothiorate
  modified_base 38: mod_base = OTHER; note = Adenosine phosphorothiorate
  modified_base 46: mod_base = OTHER; note = Guanosine phosphorothiorate
  modified_base 50: mod_base = OTHER; note = 2'-Omethylcytosine
  modified_base 52: mod_base = OTHER; note = 2'-Omethylguanosine
  modified_base 54: mod_base = OTHER; note = Uridine phosphorothiorate
  modified_base 55: mod_base = OTHER; note = Uridine phosphorothiorate
  modified_base 56: mod_base = OTHER; note = 2'-Omethylcytosine
  modified_base 57: mod_base = OTHER; note = Guanosine phosphorothiorate
  modified_base 65: mod_base = OTHER; note = 2'-Omethylguanosine
  modified_base 71: mod_base = OTHER; note = 2'-Omethyluridine
  modified_base 73: mod_base = OTHER; note = 2'-Omethylguanosine

SEQ ID NO: 1320 - RNA, 85 nt, synthetic construct; identical to SEQ ID NO: 1132
  source 1..85: mol_type = other RNA
  modified_base 1: mod_base = OTHER; note = 2'-fluoroguanosine

SEQ ID NO: 1321 - RNA, 85 nt, synthetic construct; identical to SEQ ID NO: 1132
  source 1..85: mol_type = other RNA
  modified_base 2: mod_base = OTHER; note = 2'-fluoroadenosine

SEQ ID NO: 1322 - RNA, 85 nt, synthetic construct; identical to SEQ ID NO: 1132
  source 1..85: mol_type = other RNA
  modified_base 3: mod_base = OTHER; note = 2'-fluorocytosine

SEQ ID NO: 1323 - RNA, 85 nt, synthetic construct; identical to SEQ ID NO: 1132
  source 1..85: mol_type = other RNA
  modified_base 4: mod_base = OTHER; note = 2'-fluoroguanosine

SEQ ID NO: 1324 - RNA, 85 nt, synthetic construct; identical to SEQ ID NO: 1132
  source 1..85: mol_type = other RNA
  modified_base 5: mod_base = OTHER; note = 2'-fluoroadenosine

SEQ ID NO: 1325 - RNA, 85 nt, synthetic construct; identical to SEQ ID NO: 1132
  source 1..85: mol_type = other RNA
  modified_base 6: mod_base = OTHER; note = 2'-fluoroguanosine

SEQ ID NO: 1326 - RNA, 85 nt, synthetic construct; identical to SEQ ID NO: 1132
  source 1..85: mol_type = other RNA
  modified_base 7: mod_base = OTHER; note = 2'-fluoroguanosine

SEQ ID NO: 1327 - RNA, 85 nt, synthetic construct; identical to SEQ ID NO: 1132
  source 1..85: mol_type = other RNA
  modified_base 8: mod_base = OTHER; note = 2'-fluorouridine

SEQ ID NO: 1328 - RNA, 85 nt, synthetic construct; identical to SEQ ID NO: 1132
  source 1..85: mol_type = other RNA
  modified_base 9: mod_base = OTHER; note = 2'-fluoroguanosine

SEQ ID NO: 1329 - RNA, 85 nt, synthetic construct; identical to SEQ ID NO: 1132
  source 1..85: mol_type = other RNA
  modified_base 10: mod_base = OTHER; note = 2'-fluoroguanosine

SEQ ID NO: 1330 - RNA, 85 nt, synthetic construct; identical to SEQ ID NO: 1132
  source 1..85: mol_type = other RNA
  modified_base 11: mod_base = OTHER; note = 2'-fluorocytosine

SEQ ID NO: 1331 - RNA, 85 nt, synthetic construct; identical to SEQ ID NO: 1132
  source 1..85: mol_type = other RNA
  modified_base 12: mod_base = OTHER; note = 2'-fluorocytosine

SEQ ID NO: 1332 - RNA, 85 nt, synthetic construct; identical to SEQ ID NO: 1132
  source 1..85: mol_type = other RNA
  modified_base 13: mod_base = OTHER; note = 2'-fluoroguanosine

SEQ ID NO: 1333 - RNA, 85 nt, synthetic construct; identical to SEQ ID NO: 1132
  source 1..85: mol_type = other RNA
  modified_base 14: mod_base = OTHER; note = 2'-fluoroadenosine

SEQ ID NO: 1334 - RNA, 85 nt, synthetic construct; identical to SEQ ID NO: 1132
  source 1..85: mol_type = other RNA
  modified_base 15: mod_base = OTHER; note = 2'-fluoroguanosine

SEQ ID NO: 1335 - RNA, 85 nt, synthetic construct; identical to SEQ ID NO: 1132
  source 1..85: mol_type = other RNA
  modified_base 16: mod_base = OTHER; note = 2'-fluorouridine

SEQ ID NO: 1336 - RNA, 85 nt, synthetic construct; identical to SEQ ID NO: 1132
  source 1..85: mol_type = other RNA
  modified_base 17: mod_base = OTHER; note = 2'-fluoroguanosine

SEQ ID NO: 1337 - RNA, 85 nt, synthetic construct; identical to SEQ ID NO: 1132
  source 1..85: mol_type = other RNA
  modified_base 18: mod_base = OTHER; note = 2'-fluoroguanosine

SEQ ID NO: 1338 - RNA, 85 nt, synthetic construct; identical to SEQ ID NO: 1132
  source 1..85: mol_type = other RNA
  modified_base 19: mod_base = OTHER; note = 2'-fluorouridine

SEQ ID NO: 1339 - RNA, 85 nt, synthetic construct; identical to SEQ ID NO: 1132
  source 1..85: mol_type = other RNA
  modified_base 20: mod_base = OTHER; note = 2'-fluorouridine

SEQ ID NO: 1340 - RNA, 85 nt, synthetic construct; identical to SEQ ID NO: 1132
  source 1..85: mol_type = other RNA
  modified_base 21: mod_base = OTHER; note = 2'-fluoroadenosine

SEQ ID NO: 1341 - RNA, 85 nt, synthetic construct; identical to SEQ ID NO: 1132
  source 1..85: mol_type = other RNA
  modified_base 22: mod_base = OTHER; note = 2'-fluoroadenosine

SEQ ID NO: 1342 - RNA, 85 nt, synthetic construct; identical to SEQ ID NO: 1132
  source 1..85: mol_type = other RNA
  modified_base 23: mod_base = OTHER; note = 2'-fluoroguanosine

SEQ ID NO: 1343 - RNA, 85 nt, synthetic construct; identical to SEQ ID NO: 1132
  source 1..85: mol_type = other RNA
  modified_base 24: mod_base = OTHER; note = 2'-fluoroguanosine

SEQ ID NO: 1344 - RNA, 85 nt, synthetic construct; identical to SEQ ID NO: 1132
  source 1..85: mol_type = other RNA
  modified_base 25: mod_base = OTHER; note = 2'-fluorocytosine

SEQ ID NO: 1345 - RNA, 85 nt, synthetic construct; identical to SEQ ID NO: 1132
  source 1..85: mol_type = other RNA
  modified_base 26: mod_base = OTHER; note = 2'-fluoroguanosine

SEQ ID NO: 1346 - RNA, 85 nt, synthetic construct; identical to SEQ ID NO: 1132
  source 1..85: mol_type = other RNA
  modified_base 27: mod_base = OTHER; note = 2'-fluoroadenosine

SEQ ID NO: 1347 - RNA, 85 nt, synthetic construct; identical to SEQ ID NO: 1132
  source 1..85: mol_type = other RNA
  modified_base 28: mod_base = OTHER; note = 2'-fluorouridine

SEQ ID NO: 1348 - RNA, 85 nt, synthetic construct; identical to SEQ ID NO: 1132
  source 1..85: mol_type = other RNA
  modified_base 29: mod_base = OTHER; note = 2'-fluoroguanosine

SEQ ID NO: 1349 - RNA, 85 nt, synthetic construct; identical to SEQ ID NO: 1132
  source 1..85: mol_type = other RNA
  modified_base 30: mod_base = OTHER; note = 2'-fluoroguanosine

SEQ ID NO: 1350 - RNA, 85 nt, synthetic construct; identical to SEQ ID NO: 1132
  source 1..85: mol_type = other RNA
  modified_base 31: mod_base = OTHER; note = 2'-fluoroadenosine

SEQ ID NO: 1351 - RNA, 85 nt, synthetic construct; identical to SEQ ID NO: 1132
  source 1..85: mol_type = other RNA
  modified_base 32: mod_base = OTHER; note = 2'-fluorocytosine

SEQ ID NO: 1352 - RNA, 85 nt, synthetic construct; identical to SEQ ID NO: 1132
  source 1..85: mol_type = other RNA
  modified_base 34: mod_base = OTHER; note = 2'-fluorocytosine

SEQ ID NO: 1353 - RNA, 85 nt, synthetic construct; identical to SEQ ID NO: 1132
  source 1..85: mol_type = other RNA
  modified_base 35: mod_base = OTHER; note = 2'-fluorouridine

SEQ ID NO: 1354 - RNA, 85 nt, synthetic construct; identical to SEQ ID NO: 1132
  source 1..85: mol_type = other RNA
  modified_base 36: mod_base = OTHER; note = 2'-fluoroadenosine

SEQ ID NO: 1355 - RNA, 85 nt, synthetic construct; identical to SEQ ID NO: 1132
  source 1..85: mol_type = other RNA
  modified_base 37: mod_base = OTHER; note = 2'-fluoroadenosine

SEQ ID NO: 1356 - RNA, 85 nt, synthetic construct; identical to SEQ ID NO: 1132
  source 1..85: mol_type = other RNA
  modified_base 38: mod_base = OTHER; note = 2'-fluoroadenosine

SEQ ID NO: 1357 - RNA, 85 nt, synthetic construct; identical to SEQ ID NO: 1132
  source 1..85: mol_type = other RNA
  modified_base 39: mod_base = OTHER; note = 2'-fluorouridine

SEQ ID NO: 1358 - RNA, 85 nt, synthetic construct; identical to SEQ ID NO: 1132
  source 1..85: mol_type = other RNA
  modified_base 40: mod_base = OTHER; note = 2'-fluorocytosine

SEQ ID NO: 1359 - RNA, 85 nt, synthetic construct; identical to SEQ ID NO: 1132
  source 1..85: mol_type = other RNA
  modified_base 41: mod_base = OTHER; note = 2'-fluorocytosine

SEQ ID NO: 1360 - RNA, 85 nt, synthetic construct; identical to SEQ ID NO: 1132
  source 1..85: mol_type = other RNA
  modified_base 42: mod_base = OTHER; note = 2'-fluoroadenosine

SEQ ID NO: 1361 - RNA, 85 nt, synthetic construct; identical to SEQ ID NO: 1132
  source 1..85: mol_type = other RNA
  modified_base 43: mod_base = OTHER; note = 2'-fluorouridine

SEQ ID NO: 1362 - RNA, 85 nt, synthetic construct; identical to SEQ ID NO: 1132
  source 1..85: mol_type = other RNA
  modified_base 44: mod_base = OTHER; note = 2'-fluorouridine

SEQ ID NO: 1363 - RNA, 85 nt, synthetic construct; identical to SEQ ID NO: 1132
  source 1..85: mol_type = other RNA
  modified_base 45: mod_base = OTHER; note = 2'-fluoroguanosine

SEQ ID NO: 1364 - RNA, 85 nt, synthetic construct; identical to SEQ ID NO: 1132
  source 1..85: mol_type = other RNA
  modified_base 46: mod_base = OTHER; note = 2'-fluorouridine

SEQ ID NO: 1365 - RNA, 85 nt, synthetic construct; identical to SEQ ID NO: 1132
  source 1..85: mol_type = other RNA
  modified_base 47: mod_base = OTHER; note = 2'-fluoroguanosine

SEQ ID NO: 1366 - RNA, 85 nt, synthetic construct; identical to SEQ ID NO: 1132
  source 1..85: mol_type = other RNA
  modified_base 48: mod_base = OTHER; note = 2'-fluorocytosine

SEQ ID NO: 1367 - RNA, 85 nt, synthetic construct; identical to SEQ ID NO: 1132
  source 1..85: mol_type = other RNA
  modified_base 49: mod_base = OTHER; note = 2'-fluorouridine

SEQ ID NO: 1368 - RNA, 85 nt, synthetic construct; identical to SEQ ID NO: 1132
  source 1..85: mol_type = other RNA
  modified_base 50: mod_base = OTHER; note = 2'-fluorocytosine

SEQ ID NO: 1369 - RNA, 85 nt, synthetic construct; identical to SEQ ID NO: 1132
  source 1..85: mol_type = other RNA
  modified_base 51: mod_base = OTHER; note = 2'-fluorouridine

SEQ ID NO: 1370 - RNA, 85 nt, synthetic construct; identical to SEQ ID NO: 1132
  source 1..85: mol_type = other RNA
  modified_base 52: mod_base = OTHER; note = 2'-fluoroguanosine

SEQ ID NO: 1371 - RNA, 85 nt, synthetic construct; identical to SEQ ID NO: 1132
  source 1..85: mol_type = other RNA
  modified_base 53: mod_base = OTHER; note = 2'-fluorocytosine

SEQ ID NO: 1372 - RNA, 85 nt, synthetic construct; identical to SEQ ID NO: 1132
  source 1..85: mol_type = other RNA
  modified_base 54: mod_base = OTHER; note = 2'-fluoroadenosine

SEQ ID NO: 1373 - RNA, 85 nt, synthetic construct; identical to SEQ ID NO: 1132
  source 1..85: mol_type = other RNA
  modified_base 55: mod_base = OTHER; note = 2'-fluorocytosine

SEQ ID NO: 1374 - RNA, 85 nt, synthetic construct; identical to SEQ ID NO: 1132
  source 1..85: mol_type = other RNA
  modified_base 56: mod_base = OTHER; note = 2'-fluoroguanosine

SEQ ID NO: 1375 - RNA, 85 nt, synthetic construct; identical to SEQ ID NO: 1132
  source 1..85: mol_type = other RNA
  modified_base 57: mod_base = OTHER; note = 2'-fluorocytosine

SEQ ID NO: 1376 - RNA, 85 nt, synthetic construct; identical to SEQ ID NO: 1132
  source 1..85: mol_type = other RNA
  modified_base 58: mod_base = OTHER; note = 2'-fluoroguanosine

SEQ ID NO: 1377 - RNA, 85 nt, synthetic construct; identical to SEQ ID NO: 1132
  source 1..85: mol_type = other RNA
  modified_base 59: mod_base = OTHER; note = 2'-fluorouridine

SEQ ID NO: 1378 - RNA, 85 nt, synthetic construct; identical to SEQ ID NO: 1132
  source 1..85: mol_type = other RNA
  modified_base 60: mod_base = OTHER; note = 2'-fluoroguanosine

SEQ ID NO: 1379 - RNA, 85 nt, synthetic construct; identical to SEQ ID NO: 1132
  source 1..85: mol_type = other RNA
  modified_base 61: mod_base = OTHER; note = 2'-fluoroguanosine

SEQ ID NO: 1380 - RNA, 85 nt, synthetic construct; identical to SEQ ID NO: 1132
  source 1..85: mol_type = other RNA
  modified_base 62: mod_base = OTHER; note = 2'-fluoroguanosine

SEQ ID NO: 1381 - RNA, 85 nt, synthetic construct; identical to SEQ ID NO: 1132
  source 1..85: mol_type = other RNA
  modified_base 63: mod_base = OTHER; note = 2'-fluorouridine

SEQ ID NO: 1382 - RNA, 85 nt, synthetic construct; identical to SEQ ID NO: 1132
  source 1..85: mol_type = other RNA
  modified_base 64: mod_base = OTHER; note = 2'-fluorouridine

SEQ ID NO: 1383 - RNA, 85 nt, synthetic construct; identical to SEQ ID NO: 1132
  source 1..85: mol_type = other RNA
  modified_base 65: mod_base = OTHER; note = 2'-fluorocytosine

SEQ ID NO: 1384 - RNA, 85 nt, synthetic construct; identical to SEQ ID NO: 1132
  source 1..85: mol_type = other RNA
  modified_base 66: mod_base = OTHER; note = 2'-fluoroguanosine

SEQ ID NO: 1385 - RNA, 85 nt, synthetic construct; identical to SEQ ID NO: 1132
  source 1..85: mol_type = other RNA
  modified_base 67: mod_base = OTHER; note = 2'-fluoroadenosine

SEQ ID NO: 1386 - RNA, 85 nt, synthetic construct; identical to SEQ ID NO: 1132
  source 1..85: mol_type = other RNA
  modified_base 68: mod_base = OTHER; note = 2'-fluoroadenosine

SEQ ID NO: 1387 - RNA, 85 nt, synthetic construct; identical to SEQ ID NO: 1132
  source 1..85: mol_type = other RNA
  modified_base 69: mod_base = OTHER; note = 2'-fluorouridine

SEQ ID NO: 1388 - RNA, 85 nt, synthetic construct; identical to SEQ ID NO: 1132
  source 1..85: mol_type = other RNA
  modified_base 70: mod_base = OTHER; note = 2'-fluorocytosine

SEQ ID NO: 1389 - RNA, 85 nt, synthetic construct; identical to SEQ ID NO: 1132
  source 1..85: mol_type = other RNA
  modified_base 71: mod_base = OTHER; note = 2'-fluorocytosine

SEQ ID NO: 1390 - RNA, 85 nt, synthetic construct; identical to SEQ ID NO: 1132
  source 1..85: mol_type = other RNA
  modified_base 72: mod_base = OTHER; note = 2'-fluorocytosine

SEQ ID NO: 1391 - RNA, 85 nt, synthetic construct; identical to SEQ ID NO: 1132
  source 1..85: mol_type = other RNA
  modified_base 73: mod_base = OTHER; note = 2'-fluoroadenosine

SEQ ID NO: 1392 - RNA, 85 nt, synthetic construct; identical to SEQ ID NO: 1132
  source 1..85: mol_type = other RNA
  modified_base 74: mod_base = OTHER; note = 2'-fluorouridine

SEQ ID NO: 1393 - RNA, 85 nt, synthetic construct; identical to SEQ ID NO: 1132
  source 1..85: mol_type = other RNA
  modified_base 75: mod_base = OTHER; note = 2'-fluorocytosine

SEQ ID NO: 1394 - RNA, 85 nt, synthetic construct; identical to SEQ ID NO: 1132
  source 1..85: mol_type = other RNA
  modified_base 76: mod_base = OTHER; note = 2'-fluorocytosine

SEQ ID NO: 1395 - RNA, 85 nt, synthetic construct; identical to SEQ ID NO: 1132
  source 1..85: mol_type = other RNA
  modified_base 77: mod_base = OTHER; note = 2'-fluorouridine

SEQ ID NO: 1396 - RNA, 85 nt, synthetic construct; identical to SEQ ID NO: 1132
  source 1..85: mol_type = other RNA
  modified_base 78: mod_base = OTHER; note = 2'-fluorocytosine

SEQ ID NO: 1397 - RNA, 85 nt, synthetic construct; identical to SEQ ID NO: 1132
  source 1..85: mol_type = other RNA
  modified_base 79: mod_base = OTHER; note = 2'-fluoroguanosine

SEQ ID NO: 1398 - RNA, 85 nt, synthetic construct; identical to SEQ ID NO: 1132
  source 1..85: mol_type = other RNA
  modified_base 80: mod_base = OTHER; note = 2'-fluorouridine

SEQ ID NO: 1399 - RNA, 85 nt, synthetic construct; identical to SEQ ID NO: 1132
  source 1..85: mol_type = other RNA
  modified_base 81: mod_base = OTHER; note = 2'-fluorocytosine

SEQ ID NO: 1400 - RNA, 85 nt, synthetic construct; identical to SEQ ID NO: 1132
  source 1..85: mol_type = other RNA
  modified_base 83: mod_base = OTHER; note = 2'-fluorocytosine

SEQ ID NO: 1401 - RNA, 85 nt, synthetic construct; identical to SEQ ID NO: 1132
  source 1..85: mol_type = other RNA
  modified_base 84: mod_base = OTHER; note = 2'-fluorocytosine

SEQ ID NO: 1402 - RNA, 85 nt, synthetic construct; identical to SEQ ID NO: 1132
  source 1..85: mol_type = other RNA
  modified_base 85: mod_base = OTHER; note = 2'-fluoroadenosine

SEQ ID NO: 1403 - RNA, 85 nt, synthetic construct; identical to SEQ ID NO: 1132
  source 1..85: mol_type = other RNA
  modified_base 1: mod_base = OTHER; note = 2'-Omethylguanosine
  modified_base 17: mod_base = OTHER; note = 2'-Omethylguanosine
  modified_base 18: mod_base = OTHER; note = 2'-Omethylguanosine
  modified_base 59: mod_base = OTHER; note = 2'-Omethyluridine
  modified_base 61: mod_base = OTHER; note = 2'-Omethylguanosine
  modified_base 82: mod_base = OTHER; note = 2'-Omethylguanosine

SEQ ID NO: 1404 - RNA, 85 nt, synthetic construct; identical to SEQ ID NO: 1132
  source 1..85: mol_type = other RNA
  modified_base 1: mod_base = OTHER; note = 2'-Omethylguanosine phosphorothiorate
  modified_base 17: mod_base = OTHER; note = 2'-Omethylguanosine
  modified_base 18: mod_base = OTHER; note = 2'-Omethylguanosine
  modified_base 59: mod_base = OTHER; note = 2'-Omethyluridine
  modified_base 61: mod_base = OTHER; note = 2'-Omethylguanosine
  modified_base 82: mod_base = OTHER; note = 2'-Omethylguanosine

SEQ ID NO: 1405-1490 - skipped (86 entries)

SEQ ID NO: 1491 - RNA, 76 nt, synthetic construct; identical to SEQ ID NO: 625
  source 1..76: mol_type = other RNA
  modified_base 1: mod_base = OTHER; note = 2'-Omethylguanosine
  modified_base 17: mod_base = OTHER; note = 2'-Omethylguanosine
  modified_base 18: mod_base = OTHER; note = 2'-Omethylguanosine
  modified_base 34: mod_base = OTHER; note = 2'-Omethyluridine
  modified_base 50: mod_base = OTHER; note = 2'-Omethylcytosine
  modified_base 52: mod_base = OTHER; note = 2'-Omethylguanosine
  modified_base 73: mod_base = OTHER; note = 2'-Omethylguanosine

SEQ ID NO: 1492 - RNA, 76 nt, synthetic construct; identical to SEQ ID NO: 625
  source 1..76: mol_type = other RNA
  modified_base 1: mod_base = OTHER; note = 2'-Omethylguanosine
  modified_base 17: mod_base = OTHER; note = 2'-Omethylguanosine
  modified_base 18: mod_base = OTHER; note = 2'-Omethylguanosine
  modified_base 34: mod_base = OTHER; note = 2'-fluorouridine
  modified_base 50: mod_base = OTHER; note = 2'-Omethylcytosine
  modified_base 52: mod_base = OTHER; note = 2'-Omethylguanosine
  modified_base 73: mod_base = OTHER; note = 2'-Omethylguanosine

SEQ ID NO: 1493 - RNA, 76 nt, synthetic construct; identical to SEQ ID NO: 625
  source 1..76: mol_type = other RNA
  modified_base 1: mod_base = OTHER; note = 2'-Omethylguanosine
  modified_base 17: mod_base = OTHER; note = 2'-Omethylguanosine
  modified_base 18: mod_base = OTHER; note = 2'-Omethylguanosine
  modified_base 33: mod_base = OTHER; note = Uridine phosphorothiorate
  modified_base 34: mod_base = OTHER; note = 2'-Omethyluridine
  modified_base 35: mod_base = OTHER; note = Cytosine phosphorothiorate
  modified_base 37: mod_base = OTHER; note = Adenosine phosphorothiorate
  modified_base 38: mod_base = OTHER; note = Adenosine phosphorothiorate
  modified_base 50: mod_base = OTHER; note = 2'-Omethylcytosine
  modified_base 52: mod_base = OTHER; note = 2'-Omethylguanosine
  modified_base 73: mod_base = OTHER; note = 2'-Omethylguanosine

SEQ ID NO: 1494 - RNA, 76 nt, synthetic construct; identical to SEQ ID NO: 625
  source 1..76: mol_type = other RNA
  modified_base 1: mod_base = OTHER; note = 2'-Omethylguanosine
  modified_base 17: mod_base = OTHER; note = 2'-Omethylguanosine
  modified_base 18: mod_base = OTHER; note = 2'-Omethylguanosine
  modified_base 33: mod_base = OTHER; note = Uridine phosphorothiorate
  modified_base 34: mod_base = OTHER; note = 2'-Omethyluridine
  modified_base 35: mod_base = OTHER; note = Cytosine phosphorothiorate
  modified_base 37: mod_base = OTHER; note = Adenosine phosphorothiorate
  modified_base 38: mod_base = OTHER; note = 2'-Omethyladenosine phosphorothiorate
  modified_base 50: mod_base = OTHER; note = 2'-Omethylcytosine
  modified_base 52: mod_base = OTHER; note = 2'-Omethylguanosine
  modified_base 73: mod_base = OTHER; note = 2'-Omethylguanosine

SEQ ID NO: 1495 - RNA, 76 nt, synthetic construct; identical to SEQ ID NO: 625
  source 1..76: mol_type = other RNA
  modified_base 1: mod_base = OTHER; note = 2'-Omethylguanosine
  modified_base 17: mod_base = OTHER; note = 2'-Omethylguanosine
  modified_base 18: mod_base = OTHER; note = 2'-Omethylguanosine
  modified_base 33: mod_base = OTHER; note = Uridine phosphorothiorate
  modified_base 34: mod_base = OTHER; note = 2'-Omethyluridine
  modified_base 35: mod_base = OTHER; note = Cytosine phosphorothiorate
  modified_base 36: mod_base = OTHER; note = Adenosine phosphorothiorate
  modified_base 37: mod_base = OTHER; note = Adenosine phosphorothiorate
  modified_base 38: mod_base = OTHER; note = Adenosine phosphorothiorate
  modified_base 50: mod_base = OTHER; note = 2'-Omethylcytosine
  modified_base 52: mod_base = OTHER; note = 2'-Omethylguanosine
  modified_base 73: mod_base = OTHER; note = 2'-Omethylguanosine

SEQ ID NO: 1496 - RNA, 76 nt, synthetic construct; identical to SEQ ID NO: 625
  source 1..76: mol_type = other RNA
  modified_base 1: mod_base = OTHER; note = 2'-Omethylguanosine
  modified_base 17: mod_base = OTHER; note = 2'-Omethylguanosine
  modified_base 18: mod_base = OTHER; note = 2'-Omethylguanosine
  modified_base 33: mod_base = OTHER; note = 2'-fluorouridine
  modified_base 34: mod_base = OTHER; note = 2'-Omethyluridine
  modified_base 35: mod_base = OTHER; note = Cytosine phosphorothiorate
  modified_base 37: mod_base = OTHER; note = Adenosine phosphorothiorate
  modified_base 38: mod_base = OTHER; note = Adenosine phosphorothiorate
  modified_base 50: mod_base = OTHER; note = 2'-Omethylcytosine
  modified_base 52: mod_base = OTHER; note = 2'-Omethylguanosine
  modified_base 73: mod_base = OTHER; note = 2'-Omethylguanosine

SEQ ID NO: 1497 - RNA, 76 nt, synthetic construct; identical to SEQ ID NO: 625
  source 1..76: mol_type = other RNA
  modified_base 1: mod_base = OTHER; note = 2'-Omethylguanosine
  modified_base 14: mod_base = OTHER; note = 2'-Omethyladenosine
  modified_base 15: mod_base = OTHER; note = 2'-Omethyladenosine
  modified_base 16: mod_base = OTHER; note = 2'-Omethyluridine
  modified_base 17: mod_base = OTHER; note = 2'-Omethylguanosine
  modified_base 18: mod_base = OTHER; note = 2'-Omethylguanosine
  modified_base 20: mod_base = OTHER; note = 2'-Omethyluridine
  modified_base 50: mod_base = OTHER; note = 2'-Omethylcytosine
  modified_base 52: mod_base = OTHER; note = 2'-Omethylguanosine
  modified_base 73: mod_base = OTHER; note = 2'-Omethylguanosine

SEQ ID NO: 1498 - RNA, 76 nt, synthetic construct; identical to SEQ ID NO: 625
  source 1..76: mol_type = other RNA
  modified_base 1: mod_base = OTHER; note = 2'-Omethylguanosine
  modified_base 14: mod_base = OTHER; note = 2'-Omethyladenosine
  modified_base 15: mod_base = OTHER; note = 2'-Omethyladenosine
  modified_base 16: mod_base = OTHER; note = 2'-Omethyluridine
  modified_base 17: mod_base = OTHER; note = 2'-Omethylguanosine
  modified_base 18: mod_base = OTHER; note = 2'-Omethylguanosine
  modified_base 19: mod_base = OTHER; note = 2'-fluoroadenosine
  modified_base 20: mod_base = OTHER; note = 2'-Omethyluridine
  modified_base 50: mod_base = OTHER; note = 2'-Omethylcytosine
  modified_base 52: mod_base = OTHER; note = 2'-Omethylguanosine
  modified_base 73: mod_base = OTHER; note = 2'-Omethylguanosine

SEQ ID NO: 1499 - RNA, 76 nt, synthetic construct; identical to SEQ ID NO: 625
  source 1..76: mol_type = other RNA
  modified_base 1: mod_base = OTHER; note = 2'-Omethylguanosine
  modified_base 14: mod_base = OTHER; note = 2'-Omethyladenosine
  modified_base 15: mod_base = OTHER; note = 2'-Omethyladenosine
  modified_base 16: mod_base = OTHER; note = 2'-Omethyluridine
  modified_base 17: mod_base = OTHER; note = 2'-Omethylguanosine
  modified_base 18: mod_base = OTHER; note = 2'-Omethylguanosine
  modified_base 19: mod_base = OTHER; note = 2'-Omethyladenosine
  modified_base 20: mod_base = OTHER; note = 2'-Omethyluridine
  modified_base 50: mod_base = OTHER; note = 2'-Omethylcytosine
  modified_base 52: mod_base = OTHER; note = 2'-Omethylguanosine
  modified_base 73: mod_base = OTHER; note = 2'-Omethylguanosine

SEQ ID NO: 1500 - skipped

SEQ ID NO: 1501 - RNA, 76 nt, synthetic construct; identical to SEQ ID NO: 625
  source 1..76: mol_type = other RNA
  modified_base 1: mod_base = OTHER; note = 2'-Omethylguanosine
  modified_base 14: mod_base = OTHER; note = 2'-Omethyladenosine
  modified_base 15: mod_base = OTHER; note = 2'-Omethyladenosine
  modified_base 16: mod_base = OTHER; note = 2'-Omethyluridine
  modified_base 17: mod_base = OTHER; note = 2'-Omethylguanosine
  modified_base 18: mod_base = OTHER; note = 2'-Omethylguanosine
  modified_base 20: mod_base = OTHER; note = 2'-Omethyluridine
  modified_base 21: mod_base = OTHER; note = 2'-fluoroadenosine
  modified_base 50: mod_base = OTHER; note = 2'-Omethylcytosine
  modified_base 52: mod_base = OTHER; note = 2'-Omethylguanosine
  modified_base 73: mod_base = OTHER; note = 2'-Omethylguanosine

SEQ ID NO: 1502 - RNA, 76 nt, synthetic construct; identical to SEQ ID NO: 625
  source 1..76: mol_type = other RNA
  modified_base 1: mod_base = OTHER; note = 2'-Omethylguanosine
  modified_base 14: mod_base = OTHER; note = 2'-Omethyladenosine
  modified_base 15: mod_base = OTHER; note = 2'-Omethyladenosine
  modified_base 16: mod_base = OTHER; note = 2'-Omethyluridine
  modified_base 17: mod_base = OTHER; note = 2'-Omethylguanosine
  modified_base 18: mod_base = OTHER; note = 2'-Omethylguanosine
  modified_base 20: mod_base = OTHER; note = 2'-Omethyluridine
  modified_base 21: mod_base = OTHER; note = 2'-Omethyladenosine
  modified_base 50: mod_base = OTHER; note = 2'-Omethylcytosine
  modified_base 52: mod_base = OTHER; note = 2'-Omethylguanosine
  modified_base 73: mod_base = OTHER; note = 2'-Omethylguanosine

SEQ ID NO: 1503 - RNA, 76 nt, synthetic construct; identical to SEQ ID NO: 625
  source 1..76: mol_type = other RNA
  modified_base 1: mod_base = OTHER; note = 2'-Omethylguanosine
  modified_base 14: mod_base = OTHER; note = 2'-Omethyladenosine
  modified_base 15: mod_base = OTHER; note = 2'-Omethyladenosine
  modified_base 16: mod_base = OTHER; note = 2'-Omethyluridine
  modified_base 17: mod_base = OTHER; note = 2'-Omethylguanosine
  modified_base 18: mod_base = OTHER; note = 2'-Omethylguanosine
  modified_base 19: mod_base = OTHER; note = 2'-fluoroadenosine
  modified_base 20: mod_base = OTHER; note = 2'-Omethyluridine
  modified_base 21: mod_base = OTHER; note = 2'-Omethyladenosine
  modified_base 50: mod_base = OTHER; note = 2'-Omethylcytosine
  modified_base 52: mod_base = OTHER; note = 2'-Omethylguanosine
  modified_base 73: mod_base = OTHER; note = 2'-Omethylguanosine

SEQ ID NO: 1504 - RNA, 76 nt, synthetic construct; identical to SEQ ID NO: 625
  source 1..76: mol_type = other RNA
  modified_base 1: mod_base = OTHER; note = 2'-Omethylguanosine
  modified_base 14: mod_base = OTHER; note = 2'-Omethyladenosine
  modified_base 15: mod_base = OTHER; note = 2'-Omethyladenosine
  modified_base 16: mod_base = OTHER; note = 2'-Omethyluridine
  modified_base 17: mod_base = OTHER; note = 2'-Omethylguanosine
  modified_base 18: mod_base = OTHER; note = 2'-Omethylguanosine
  modified_base 19: mod_base = OTHER; note = 2'-fluoroadenosine
  modified_base 20: mod_base = OTHER; note = 2'-Omethyluridine
  modified_base 21: mod_base = OTHER; note = 2'-fluoroadenosine
  modified_base 50: mod_base = OTHER; note = 2'-Omethylcytosine
  modified_base 52: mod_base = OTHER; note = 2'-Omethylguanosine
  modified_base 73: mod_base = OTHER; note = 2'-Omethylguanosine

SEQ ID NO: 1505 - RNA, 76 nt, synthetic construct; identical to SEQ ID NO: 625
  source 1..76: mol_type = other RNA
  modified_base 1: mod_base = OTHER; note = 2'-Omethylguanosine
  modified_base 14: mod_base = OTHER; note = 2'-Omethyladenosine
  modified_base 15: mod_base = OTHER; note = 2'-Omethyladenosine
  modified_base 16: mod_base = OTHER; note = 2'-Omethyluridine
  modified_base 17: mod_base = OTHER; note = 2'-Omethylguanosine
  modified_base 18: mod_base = OTHER; note = 2'-Omethylguanosine
  modified_base 19: mod_base = OTHER; note = Adenosine phosphorothiorate
  modified_base 20: mod_base = OTHER; note = 2'-Omethyluridine
  modified_base 21: mod_base = OTHER; note = Adenosine phosphorothiorate
  modified_base 50: mod_base = OTHER; note = 2'-Omethylcytosine
  modified_base 52: mod_base = OTHER; note = 2'-Omethylguanosine
  modified_base 73: mod_base = OTHER; note = 2'-Omethylguanosine

SEQ ID NO: 1506 - RNA, 76 nt, synthetic construct; identical to SEQ ID NO: 625
  source 1..76: mol_type = other RNA
  modified_base 1: mod_base = OTHER; note = 2'-Omethylguanosine
  modified_base 14: mod_base = OTHER; note = 2'-Omethyladenosine phosphorothiorate
  modified_base 15: mod_base = OTHER; note = 2'-Omethyladenosine phosphorothiorate
  modified_base 16: mod_base = OTHER; note = 2'-Omethyluridine phosphorothiorate
  modified_base 17: mod_base = OTHER; note = 2'-Omethylguanosine phosphorothiorate
  modified_base 18: mod_base = OTHER; note = 2'-Omethylguanosine phosphorothiorate
  modified_base 19: mod_base = OTHER; note = Adenosine phosphorothiorate
  modified_base 20: mod_base = OTHER; note = 2'-Omethyluridine phosphorothiorate
  modified_base 21: mod_base = OTHER; note = Adenosine phosphorothiorate
  modified_base 50: mod_base = OTHER; note = 2'-Omethylcytosine
  modified_base 52: mod_base = OTHER; note = 2'-Omethylguanosine
  modified_base 73: mod_base = OTHER; note = 2'-Omethylguanosine

SEQ ID NO: 1507 - RNA, 76 nt, synthetic construct; identical to SEQ ID NO: 625
  source 1..76: mol_type = other RNA
  modified_base 1: mod_base = OTHER; note = 2'-Omethylguanosine
  modified_base 14: mod_base = OTHER; note = 2'-Omethyladenosine phosphorothiorate
  modified_base 15: mod_base = OTHER; note = 2'-Omethyladenosine phosphorothiorate
  modified_base 16: mod_base = OTHER; note = 2'-Omethyluridine phosphorothiorate
  modified_base 17: mod_base = OTHER; note = 2'-Omethylguanosine phosphorothiorate
  modified_base 18: mod_base = OTHER; note = 2'-Omethylguanosine phosphorothiorate
  modified_base 19: mod_base = OTHER; note = 2'-fluoroadenosine phosphorothiorate
  modified_base 20: mod_base = OTHER; note = 2'-Omethyluridine phosphorothiorate
  modified_base 21: mod_base = OTHER; note = 2'-fluoroadenosine phosphorothiorate
  modified_base 50: mod_base = OTHER; note = 2'-Omethylcytosine
  modified_base 52: mod_base = OTHER; note = 2'-Omethylguanosine
  modified_base 73: mod_base = OTHER; note = 2'-Omethylguanosine

SEQ ID NO: 1508 - RNA, 76 nt, synthetic construct; identical to SEQ ID NO: 625
  source 1..76: mol_type = other RNA
  modified_base 1: mod_base = OTHER; note = 2'-Omethylguanosine
  modified_base 17: mod_base = OTHER; note = 2'-Omethylguanosine
  modified_base 18: mod_base = OTHER; note = 2'-Omethylguanosine
  modified_base 41: mod_base = OTHER; note = 2'-Omethylcytosine
  modified_base 42: mod_base = OTHER; note = 2'-Omethyladenosine
  modified_base 43: mod_base = OTHER; note = 2'-Omethyladenosine
  modified_base 44: mod_base = OTHER; note = 2'-Omethyladenosine
  modified_base 50: mod_base = OTHER; note = 2'-Omethylcytosine
  modified_base 52: mod_base = OTHER; note = 2'-Omethylguanosine
  modified_base 73: mod_base = OTHER; note = 2'-Omethylguanosine

SEQ ID NO: 1509 - RNA, 76 nt, synthetic construct; identical to SEQ ID NO: 625
  source 1..76: mol_type = other RNA
  modified_base 1: mod_base = OTHER; note = 2'-Omethylguanosine
  modified_base 17: mod_base = OTHER; note = 2'-Omethylguanosine
  modified_base 18: mod_base = OTHER; note = 2'-Omethylguanosine
  modified_base 41: mod_base = OTHER; note = 2'-Omethylcytosine
  modified_base 42: mod_base = OTHER; note = 2'-Omethyladenosine
  modified_base 43: mod_base = OTHER; note = 2'-Omethyladenosine
  modified_base 44: mod_base = OTHER; note = 2'-fluoroadenosine
  modified_base 50: mod_base = OTHER; note = 2'-Omethylcytosine
  modified_base 52: mod_base = OTHER; note = 2'-Omethylguanosine
  modified_base 73: mod_base = OTHER; note = 2'-Omethylguanosine

SEQ ID NO: 1510 - RNA, 76 nt, synthetic construct; identical to SEQ ID NO: 625
  source 1..76: mol_type = other RNA
  modified_base 1: mod_base = OTHER; note = 2'-Omethylguanosine
  modified_base 17: mod_base = OTHER; note = 2'-Omethylguanosine
  modified_base 18: mod_base = OTHER; note = 2'-Omethylguanosine
  modified_base 41: mod_base = OTHER; note = 2'-fluorocytosine
  modified_base 42: mod_base = OTHER; note = 2'-Omethyladenosine
  modified_base 43: mod_base = OTHER; note = 2'-Omethyladenosine
  modified_base 44: mod_base = OTHER; note = 2'-fluoroadenosine
  modified_base 50: mod_base = OTHER; note = 2'-Omethylcytosine
  modified_base 52: mod_base = OTHER; note = 2'-Omethylguanosine
  modified_base 73: mod_base = OTHER; note = 2'-Omethylguanosine

SEQ ID NO: 1511 - RNA, 76 nt, synthetic construct; identical to SEQ ID NO: 625
  source 1..76: mol_type = other RNA
  modified_base 1: mod_base = OTHER; note = 2'-Omethylguanosine
  modified_base 17: mod_base = OTHER; note = 2'-Omethylguanosine
  modified_base 18: mod_base = OTHER; note = 2'-Omethylguanosine
  modified_base 41: mod_base = OTHER; note = 2'-fluorocytosine
  modified_base 42: mod_base = OTHER; note = 2'-Omethyladenosine
  modified_base 43: mod_base = OTHER; note = 2'-Omethyladenosine
  modified_base 44: mod_base = OTHER; note = 2'-fluoroadenosine phosphorothiorate
  modified_base 50: mod_base = OTHER; note = 2'-Omethylcytosine
  modified_base 52: mod_base = OTHER; note = 2'-Omethylguanosine
  modified_base 73: mod_base = OTHER; note = 2'-Omethylguanosine

SEQ ID NO: 1512 - RNA, 76 nt, synthetic construct; identical to SEQ ID NO: 625
  source 1..76: mol_type = other RNA
  modified_base 1: mod_base = OTHER; note = 2'-Omethylguanosine
  modified_base 17: mod_base = OTHER; note = 2'-Omethylguanosine
  modified_base 18: mod_base = OTHER; note = 2'-Omethylguanosine
  modified_base 41: mod_base = OTHER; note = 2'-Omethylcytosine
  modified_base 42: mod_base = OTHER; note = 2'-Omethyladenosine
  modified_base 43: mod_base = OTHER; note = 2'-Omethyladenosine
  modified_base 44: mod_base = OTHER; note = 2'-fluoroadenosine phosphorothiorate
  modified_base 50: mod_base = OTHER; note = 2'-Omethylcytosine
  modified_base 52: mod_base = OTHER; note = 2'-Omethylguanosine
  modified_base 73: mod_base = OTHER; note = 2'-Omethylguanosine

SEQ ID NO: 1513 - RNA, 76 nt, synthetic construct; identical to SEQ ID NO: 625
  source 1..76: mol_type = other RNA
  modified_base 1: mod_base = OTHER; note = 2'-Omethylguanosine
  modified_base 17: mod_base = OTHER; note = 2'-Omethylguanosine
  modified_base 18: mod_base = OTHER; note = 2'-Omethylguanosine
  modified_base 41: mod_base = OTHER; note = 2'-Omethylcytosine phosphorothiorate
  modified_base 42: mod_base = OTHER; note = 2'-Omethyladenosine
  modified_base 43: mod_base = OTHER; note = 2'-Omethyladenosine
  modified_base 44: mod_base = OTHER; note = 2'-Omethyladenosine
  modified_base 50: mod_base = OTHER; note = 2'-Omethylcytosine
  modified_base 52: mod_base = OTHER; note = 2'-Omethylguanosine
  modified_base 73: mod_base = OTHER; note = 2'-Omethylguanosine

SEQ ID NO: 1514 - RNA, 76 nt, synthetic construct; identical to SEQ ID NO: 625
  source 1..76: mol_type = other RNA
  modified_base 1: mod_base = OTHER; note = 2'-Omethylguanosine
  modified_base 14: mod_base = OTHER; note = 2'-Omethyladenosine
  modified_base 15: mod_base = OTHER; note = 2'-Omethyladenosine
  modified_base 16: mod_base = OTHER; note = 2'-Omethyluridine
  modified_base 17: mod_base = OTHER; note = 2'-Omethylguanosine
  modified_base 18: mod_base = OTHER; note = 2'-Omethylguanosine
  modified_base 19: mod_base = OTHER; note = Adenosine phosphorothiorate
  modified_base 20: mod_base = OTHER; note = 2'-Omethyluridine
  modified_base 21: mod_base = OTHER; note = Adenosine phosphorothiorate
  modified_base 41: mod_base = OTHER; note = 2'-Omethylcytosine
  modified_base 42: mod_base = OTHER; note = 2'-Omethyladenosine
  modified_base 43: mod_base = OTHER; note = 2'-Omethyladenosine
  modified_base 44: mod_base = OTHER; note = 2'-Omethyladenosine
  modified_base 50: mod_base = OTHER; note = 2'-Omethylcytosine
  modified_base 52: mod_base = OTHER; note = 2'-Omethylguanosine
  modified_base 73: mod_base = OTHER; note = 2'-Omethylguanosine

SEQ ID NO: 1515 - RNA, 76 nt, synthetic construct; identical to SEQ ID NO: 625
  source 1..76: mol_type = other RNA
  modified_base 1: mod_base = OTHER; note = 2'-Omethylguanosine
  modified_base 14: mod_base = OTHER; note = 2'-Omethyladenosine
  modified_base 15: mod_base = OTHER; note = 2'-Omethyladenosine
  modified_base 16: mod_base = OTHER; note = 2'-Omethyluridine
  modified_base 17: mod_base = OTHER; note = 2'-Omethylguanosine
  modified_base 18: mod_base = OTHER; note = 2'-Omethylguanosine
  modified_base 19: mod_base = OTHER; note = Adenosine phosphorothiorate
  modified_base 20: mod_base = OTHER; note = 2'-Omethyluridine
  modified_base 21: mod_base = OTHER; note = Adenosine phosphorothiorate
  modified_base 41: mod_base = OTHER; note = 2'-fluorocytosine
  modified_base 42: mod_base = OTHER; note = 2'-Omethyladenosine
  modified_base 43: mod_base = OTHER; note = 2'-Omethyladenosine
  modified_base 44: mod_base = OTHER; note = 2'-fluoroadenosine
  modified_base 50: mod_base = OTHER; note = 2'-Omethylcytosine
  modified_base 52: mod_base = OTHER; note = 2'-Omethylguanosine
  modified_base 73: mod_base = OTHER; note = 2'-Omethylguanosine

SEQ ID NO: 1516 - RNA, 76 nt, synthetic construct; identical to SEQ ID NO: 625
  source 1..76: mol_type = other RNA
  modified_base 1: mod_base = OTHER; note = 2'-Omethylguanosine
  modified_base 17: mod_base = OTHER; note = 2'-Omethylguanosine
  modified_base 18: mod_base = OTHER; note = 2'-Omethylguanosine
  modified_base 33: mod_base = OTHER; note = Uridine phosphorothiorate
  modified_base 34: mod_base = OTHER; note = 2'-Omethyluridine
  modified_base 35: mod_base = OTHER; note = Cytosine phosphorothiorate
  modified_base 37: mod_base = OTHER; note = Adenosine phosphorothiorate
  modified_base 38: mod_base = OTHER; note = Adenosine phosphorothiorate
  modified_base 41: mod_base = OTHER; note = 2'-Omethylcytosine
  modified_base 42: mod_base = OTHER; note = 2'-Omethyladenosine
  modified_base 43: mod_base = OTHER; note = 2'-Omethyladenosine
  modified_base 44: mod_base = OTHER; note = 2'-Omethyladenosine
  modified_base 50: mod_base = OTHER; note = 2'-Omethylcytosine
  modified_base 52: mod_base = OTHER; note = 2'-Omethylguanosine
  modified_base 73: mod_base = OTHER; note = 2'-Omethylguanosine

SEQ ID NO: 1517 - RNA, 76 nt, synthetic construct; identical to SEQ ID NO: 625
  source 1..76: mol_type = other RNA
  modified_base 1: mod_base = OTHER; note = 2'-Omethylguanosine
  modified_base 17: mod_base = OTHER; note = 2'-Omethylguanosine
  modified_base 18: mod_base = OTHER; note = 2'-Omethylguanosine
  modified_base 33: mod_base = OTHER; note = Uridine phosphorothiorate
  modified_base 34: mod_base = OTHER; note = 2'-Omethyluridine
  modified_base 35: mod_base = OTHER; note = Cytosine phosphorothiorate
  modified_base 37: mod_base = OTHER; note = Adenosine phosphorothiorate
  modified_base 38: mod_base = OTHER; note = Adenosine phosphorothiorate
  modified_base 41: mod_base = OTHER; note = 2'-fluorocytosine
  modified_base 42: mod_base = OTHER; note = 2'-Omethyladenosine
  modified_base 43: mod_base = OTHER; note = 2'-Omethyladenosine
  modified_base 44: mod_base = OTHER; note = 2'-fluoroadenosine
  modified_base 50: mod_base = OTHER; note = 2'-Omethylcytosine
  modified_base 52: mod_base = OTHER; note = 2'-Omethylguanosine
  modified_base 73: mod_base = OTHER; note = 2'-Omethylguanosine

SEQ ID NO: 1518 - RNA, 76 nt, synthetic construct; identical to SEQ ID NO: 625
  source 1..76: mol_type = other RNA
  modified_base 1: mod_base = OTHER; note = 2'-Omethylguanosine
  modified_base 17: mod_base = OTHER; note = 2'-Omethylguanosine
  modified_base 18: mod_base = OTHER; note = 2'-Omethylguanosine
  modified_base 33: mod_base = OTHER; note = 2'-fluorouridine
  modified_base 34: mod_base = OTHER; note = 2'-Omethyluridine
  modified_base 35: mod_base = OTHER; note = Cytosine phosphorothiorate
  modified_base 37: mod_base = OTHER; note = Adenosine phosphorothiorate
  modified_base 38: mod_base = OTHER; note = Adenosine phosphorothiorate
  modified_base 41: mod_base = OTHER; note = 2'-Omethylcytosine
  modified_base 42: mod_base = OTHER; note = 2'-Omethyladenosine
  modified_base 43: mod_base = OTHER; note = 2'-Omethyladenosine
  modified_base 44: mod_base = OTHER; note = 2'-Omethyladenosine
  modified_base 50: mod_base = OTHER; note = 2'-Omethylcytosine
  modified_base 52: mod_base = OTHER; note = 2'-Omethylguanosine
  modified_base 73: mod_base = OTHER; note = 2'-Omethylguanosine

SEQ ID NO: 1519 - RNA, 76 nt, synthetic construct; identical to SEQ ID NO: 625
  source 1..76: mol_type = other RNA
  modified_base 1: mod_base = OTHER; note = 2'-Omethylguanosine
  modified_base 17: mod_base = OTHER; note = 2'-Omethylguanosine
  modified_base 18: mod_base = OTHER; note = 2'-Omethylguanosine
  modified_base 33: mod_base = OTHER; note = 2'-fluorouridine
  modified_base 34: mod_base = OTHER; note = 2'-Omethyluridine
  modified_base 35: mod_base = OTHER; note = Cytosine phosphorothiorate
  modified_base 37: mod_base = OTHER; note = Adenosine phosphorothiorate
  modified_base 38: mod_base = OTHER; note = Adenosine phosphorothiorate
  modified_base 41: mod_base = OTHER; note = 2'-fluorocytosine
  modified_base 42: mod_base = OTHER; note = 2'-Omethyladenosine
  modified_base 43: mod_base = OTHER; note = 2'-Omethyladenosine
  modified_base 44: mod_base = OTHER; note = 2'-fluoroadenosine
  modified_base 50: mod_base = OTHER; note = 2'-Omethylcytosine
  modified_base 52: mod_base = OTHER; note = 2'-Omethylguanosine
  modified_base 73: mod_base = OTHER; note = 2'-Omethylguanosine

SEQ ID NO: 1520 - RNA, 76 nt, synthetic construct; identical to SEQ ID NO: 625
  source 1..76: mol_type = other RNA
  modified_base 1: mod_base = OTHER; note = 2'-Omethylguanosine
  modified_base 14: mod_base = OTHER; note = 2'-Omethyladenosine
  modified_base 15: mod_base = OTHER; note = 2'-Omethyladenosine
  modified_base 16: mod_base = OTHER; note = 2'-Omethyluridine
  modified_base 17: mod_base = OTHER; note = 2'-Omethylguanosine
  modified_base 18: mod_base = OTHER; note = 2'-Omethylguanosine
  modified_base 19: mod_base = OTHER; note = Adenosine phosphorothiorate
  modified_base 20: mod_base = OTHER; note = 2'-Omethyluridine
  modified_base 21: mod_base = OTHER; note = Adenosine phosphorothiorate
  modified_base 33: mod_base = OTHER; note = Uridine phosphorothiorate
  modified_base 34: mod_base = OTHER; note = 2'-Omethyluridine
  modified_base 35: mod_base = OTHER; note = Cytosine phosphorothiorate
  modified_base 37: mod_base = OTHER; note = Adenosine phosphorothiorate
  modified_base 38: mod_base = OTHER; note = Adenosine phosphorothiorate
  modified_base 50: mod_base = OTHER; note = 2'-Omethylcytosine
  modified_base 52: mod_base = OTHER; note = 2'-Omethylguanosine
  modified_base 73: mod_base = OTHER; note = 2'-Omethylguanosine

SEQ ID NO: 1521 - RNA, 76 nt, synthetic construct; identical to SEQ ID NO: 625
  source 1..76: mol_type = other RNA
  modified_base 1: mod_base = OTHER; note = 2'-Omethylguanosine
  modified_base 14: mod_base = OTHER; note = 2'-Omethyladenosine
  modified_base 15: mod_base = OTHER; note = 2'-Omethyladenosine
  modified_base 16: mod_base = OTHER; note = 2'-Omethyluridine
  modified_base 17: mod_base = OTHER; note = 2'-Omethylguanosine
  modified_base 18: mod_base = OTHER; note = 2'-Omethylguanosine
  modified_base 19: mod_base = OTHER; note = Adenosine phosphorothiorate
  modified_base 20: mod_base = OTHER; note = 2'-Omethyluridine
  modified_base 21: mod_base = OTHER; note = Adenosine phosphorothiorate
  modified_base 33: mod_base = OTHER; note = 2'-fluorouridine
  modified_base 34: mod_base = OTHER; note = 2'-Omethyluridine
  modified_base 35: mod_base = OTHER; note = Cytosine phosphorothiorate
  modified_base 37: mod_base = OTHER; note = Adenosine phosphorothiorate
  modified_base 38: mod_base = OTHER; note = Adenosine phosphorothiorate
  modified_base 50: mod_base = OTHER; note = 2'-Omethylcytosine
  modified_base 52: mod_base = OTHER; note = 2'-Omethylguanosine
  modified_base 73: mod_base = OTHER; note = 2'-Omethylguanosine

SEQ ID NO: 1522 - RNA, 76 nt, synthetic construct; identical to SEQ ID NO: 625
  source 1..76: mol_type = other RNA
  modified_base 1: mod_base = OTHER; note = 2'-Omethylguanosine
  modified_base 14: mod_base = OTHER; note = 2'-Omethyladenosine
  modified_base 15: mod_base = OTHER; note = 2'-Omethyladenosine
  modified_base 16: mod_base = OTHER; note = 2'-Omethyluridine
  modified_base 17: mod_base = OTHER; note = 2'-Omethylguanosine
  modified_base 18: mod_base = OTHER; note = 2'-Omethylguanosine
  modified_base 19: mod_base = OTHER; note = Adenosine phosphorothiorate
  modified_base 20: mod_base = OTHER; note = 2'-Omethyluridine
  modified_base 21: mod_base = OTHER; note = Adenosine phosphorothiorate
  modified_base 33: mod_base = OTHER; note = Uridine phosphorothiorate
  modified_base 34: mod_base = OTHER; note = 2'-Omethyluridine
  modified_base 35: mod_base = OTHER; note = Cytosine phosphorothiorate
  modified_base 37: mod_base = OTHER; note = Adenosine phosphorothiorate
  modified_base 38: mod_base = OTHER; note = Adenosine phosphorothiorate
  modified_base 41: mod_base = OTHER; note = 2'-Omethylcytosine
  modified_base 42: mod_base = OTHER; note = 2'-Omethyladenosine
  modified_base 43: mod_base = OTHER; note = 2'-Omethyladenosine
  modified_base 44: mod_base = OTHER; note = 2'-Omethyladenosine
  modified_base 50: mod_base = OTHER; note = 2'-Omethylcytosine
  modified_base 52: mod_base = OTHER; note = 2'-Omethylguanosine
  modified_base 73: mod_base = OTHER; note = 2'-Omethylguanosine

SEQ ID NO: 1523 - RNA, 76 nt, synthetic construct; identical to SEQ ID NO: 625
  source 1..76: mol_type = other RNA
  modified_base 1: mod_base = OTHER; note = 2'-Omethylguanosine
  modified_base 14: mod_base = OTHER; note = 2'-Omethyladenosine
  modified_base 15: mod_base = OTHER; note = 2'-Omethyladenosine
  modified_base 16: mod_base = OTHER; note = 2'-Omethyluridine
  modified_base 17: mod_base = OTHER; note = 2'-Omethylguanosine
  modified_base 18: mod_base = OTHER; note = 2'-Omethylguanosine
  modified_base 19: mod_base = OTHER; note = Adenosine phosphorothiorate
  modified_base 20: mod_base = OTHER; note = 2'-Omethyluridine
  modified_base 21: mod_base = OTHER; note = Adenosine phosphorothiorate
  modified_base 33: mod_base = OTHER; note = Uridine phosphorothiorate
  modified_base 34: mod_base = OTHER; note = 2'-Omethyluridine
  modified_base 35: mod_base = OTHER; note = Cytosine phosphorothiorate
  modified_base 37: mod_base = OTHER; note = Adenosine phosphorothiorate
  modified_base 38: mod_base = OTHER; note = Adenosine phosphorothiorate
  modified_base 41: mod_base = OTHER; note = 2'-fluorocytosine
  modified_base 42: mod_base = OTHER; note = 2'-Omethyladenosine
  modified_base 43: mod_base = OTHER; note = 2'-Omethyladenosine
  modified_base 44: mod_base = OTHER; note = 2'-fluoroadenosine
  modified_base 50: mod_base = OTHER; note = 2'-Omethylcytosine
  modified_base 52: mod_base = OTHER; note = 2'-Omethylguanosine
  modified_base 73: mod_base = OTHER; note = 2'-Omethylguanosine

SEQ ID NO: 1524 - RNA, 76 nt, synthetic construct; identical to SEQ ID NO: 625
  source 1..76: mol_type = other RNA
  modified_base 1: mod_base = OTHER; note = 2'-Omethylguanosine
  modified_base 14: mod_base = OTHER; note = 2'-Omethyladenosine
  modified_base 15: mod_base = OTHER; note = 2'-Omethyladenosine
  modified_base 16: mod_base = OTHER; note = 2'-Omethyluridine
  modified_base 17: mod_base = OTHER; note = 2'-Omethylguanosine
  modified_base 18: mod_base = OTHER; note = 2'-Omethylguanosine
  modified_base 19: mod_base = OTHER; note = Adenosine phosphorothiorate
  modified_base 20: mod_base = OTHER; note = 2'-Omethyluridine
  modified_base 21: mod_base = OTHER; note = Adenosine phosphorothiorate
  modified_base 33: mod_base = OTHER; note = 2'-fluorouridine
  modified_base 34: mod_base = OTHER; note = 2'-Omethyluridine
  modified_base 35: mod_base = OTHER; note = Cytosine phosphorothiorate
  modified_base 37: mod_base = OTHER; note = Adenosine phosphorothiorate
  modified_base 38: mod_base = OTHER; note = Adenosine phosphorothiorate
  modified_base 41: mod_base = OTHER; note = 2'-Omethylcytosine
  modified_base 42: mod_base = OTHER; note = 2'-Omethyladenosine
  modified_base 43: mod_base = OTHER; note = 2'-Omethyladenosine
  modified_base 44: mod_base = OTHER; note = 2'-Omethyladenosine
  modified_base 50: mod_base = OTHER; note = 2'-Omethylcytosine
  modified_base 52: mod_base = OTHER; note = 2'-Omethylguanosine
  modified_base 73: mod_base = OTHER; note = 2'-Omethylguanosine

SEQ ID NO: 1525 - RNA, 76 nt, synthetic construct; identical to SEQ ID NO: 625
  source 1..76: mol_type = other RNA
  modified_base 1: mod_base = OTHER; note = 2'-Omethylguanosine
  modified_base 14: mod_base = OTHER; note = 2'-Omethyladenosine
  modified_base 15: mod_base = OTHER; note = 2'-Omethyladenosine
  modified_base 16: mod_base = OTHER; note = 2'-Omethyluridine
  modified_base 17: mod_base = OTHER; note = 2'-Omethylguanosine
  modified_base 18: mod_base = OTHER; note = 2'-Omethylguanosine
  modified_base 19: mod_base = OTHER; note = Adenosine phosphorothiorate
  modified_base 20: mod_base = OTHER; note = 2'-Omethyluridine
  modified_base 21: mod_base = OTHER; note = Adenosine phosphorothiorate
  modified_base 33: mod_base = OTHER; note = 2'-fluorouridine
  modified_base 34: mod_base = OTHER; note = 2'-Omethyluridine
  modified_base 35: mod_base = OTHER; note = Cytosine phosphorothiorate
  modified_base 37: mod_base = OTHER; note = Adenosine phosphorothiorate
  modified_base 38: mod_base = OTHER; note = Adenosine phosphorothiorate
  modified_base 41: mod_base = OTHER; note = 2'-fluorocytosine
  modified_base 42: mod_base = OTHER; note = 2'-Omethyladenosine
  modified_base 43: mod_base = OTHER; note = 2'-Omethyladenosine
  modified_base 44: mod_base = OTHER; note = 2'-fluoroadenosine
  modified_base 50: mod_base = OTHER; note = 2'-Omethylcytosine
  modified_base 52: mod_base = OTHER; note = 2'-Omethylguanosine
  modified_base 73: mod_base = OTHER; note = 2'-Omethylguanosine

SEQ ID NO: 1526 - RNA, 76 nt, synthetic construct; identical to SEQ ID NO: 625
  source 1..76: mol_type = other RNA
  modified_base 1: mod_base = OTHER; note = 2'-Omethylguanosine
  modified_base 13: mod_base = OTHER; note = 2'-Omethylcytosine
  modified_base 14: mod_base = OTHER; note = 2'-Omethyladenosine
  modified_base 15: mod_base = OTHER; note = 2'-Omethyladenosine
  modified_base 16: mod_base = OTHER; note = 2'-Omethyluridine
  modified_base 17: mod_base = OTHER; note = 2'-Omethylguanosine
  modified_base 18: mod_base = OTHER; note = 2'-Omethylguanosine
  modified_base 19: mod_base = OTHER; note = Adenosine phosphorothiorate
  modified_base 20: mod_base = OTHER; note = 2'-Omethyluridine
  modified_base 21: mod_base = OTHER; note = Adenosine phosphorothiorate
  modified_base 25: mod_base = OTHER; note = 2'-Omethylcytosine
  modified_base 41: mod_base = OTHER; note = 2'-Omethylcytosine
  modified_base 42: mod_base = OTHER; note = 2'-Omethyladenosine
  modified_base 43: mod_base = OTHER; note = 2'-Omethyladenosine
  modified_base 44: mod_base = OTHER; note = 2'-Omethyladenosine
  modified_base 49: mod_base = OTHER; note = 2'-Omethylcytosine
  modified_base 50: mod_base = OTHER; note = 2'-Omethylcytosine
  modified_base 52: mod_base = OTHER; note = 2'-Omethylguanosine
  modified_base 54: mod_base = OTHER; note = Uridine phosphorothiorate
  modified_base 55: mod_base = OTHER; note = Uridine phosphorothiorate
  modified_base 61: mod_base = OTHER; note = 2'-Omethylcytosine
  modified_base 65: mod_base = OTHER; note = 2'-Omethylguanosine
  modified_base 73: mod_base = OTHER; note = 2'-Omethylguanosine

SEQ ID NO: 1527 - RNA, 76 nt, synthetic construct; identical to SEQ ID NO: 625
  source 1..76: mol_type = other RNA
  modified_base 1: mod_base = OTHER; note = 2'-Omethylguanosine
  modified_base 13: mod_base = OTHER; note = 2'-Omethylcytosine
  modified_base 14: mod_base = OTHER; note = 2'-Omethyladenosine
  modified_base 15: mod_base = OTHER; note = 2'-Omethyladenosine
  modified_base 16: mod_base = OTHER; note = 2'-Omethyluridine
  modified_base 17: mod_base = OTHER; note = 2'-Omethylguanosine
  modified_base 18: mod_base = OTHER; note = 2'-Omethylguanosine
  modified_base 19: mod_base = OTHER; note = Adenosine phosphorothiorate
  modified_base 20: mod_base = OTHER; note = 2'-Omethyluridine
  modified_base 21: mod_base = OTHER; note = Adenosine phosphorothiorate
  modified_base 25: mod_base = OTHER; note = 2'-Omethylcytosine
  modified_base 41: mod_base = OTHER; note = 2'-fluorocytosine
  modified_base 42: mod_base = OTHER; note = 2'-Omethyladenosine
  modified_base 43: mod_base = OTHER; note = 2'-Omethyladenosine
  modified_base 44: mod_base = OTHER; note = 2'-fluoroadenosine
  modified_base 49: mod_base = OTHER; note = 2'-Omethylcytosine
  modified_base 50: mod_base = OTHER; note = 2'-Omethylcytosine
  modified_base 52: mod_base = OTHER; note = 2'-Omethylguanosine
  modified_base 54: mod_base = OTHER; note = Uridine phosphorothiorate
  modified_base 55: mod_base = OTHER; note = Uridine phosphorothiorate
  modified_base 61: mod_base = OTHER; note = 2'-Omethylcytosine
  modified_base 65: mod_base = OTHER; note = 2'-Omethylguanosine
  modified_base 73: mod_base = OTHER; note = 2'-Omethylguanosine

SEQ ID NO: 1528 - RNA, 76 nt, synthetic construct; identical to SEQ ID NO: 625
  source 1..76: mol_type = other RNA
  modified_base 1: mod_base = OTHER; note = 2'-Omethylguanosine
  modified_base 13: mod_base = OTHER; note = 2'-Omethylcytosine
  modified_base 17: mod_base = OTHER; note = 2'-Omethylguanosine
  modified_base 18: mod_base = OTHER; note = 2'-Omethylguanosine
  modified_base 25: mod_base = OTHER; note = 2'-Omethylcytosine
  modified_base 33: mod_base = OTHER; note = Uridine phosphorothiorate
  modified_base 34: mod_base = OTHER; note = 2'-Omethyluridine
  modified_base 35: mod_base = OTHER; note = Cytosine phosphorothiorate
  modified_base 37: mod_base = OTHER; note = Adenosine phosphorothiorate
  modified_base 38: mod_base = OTHER; note = Adenosine phosphorothiorate
  modified_base 41: mod_base = OTHER; note = 2'-Omethylcytosine
  modified_base 42: mod_base = OTHER; note = 2'-Omethyladenosine
  modified_base 43: mod_base = OTHER; note = 2'-Omethyladenosine
  modified_base 44: mod_base = OTHER; note = 2'-Omethyladenosine
  modified_base 49: mod_base = OTHER; note = 2'-Omethylcytosine
  modified_base 50: mod_base = OTHER; note = 2'-Omethylcytosine
  modified_base 52: mod_base = OTHER; note = 2'-Omethylguanosine
  modified_base 54: mod_base = OTHER; note = Uridine phosphorothiorate
  modified_base 55: mod_base = OTHER; note = Uridine phosphorothiorate
  modified_base 61: mod_base = OTHER; note = 2'-Omethylcytosine
  modified_base 65: mod_base = OTHER; note = 2'-Omethylguanosine
  modified_base 73: mod_base = OTHER; note = 2'-Omethylguanosine

SEQ ID NO: 1529 - RNA, 76 nt, synthetic construct; identical to SEQ ID NO: 625
  source 1..76: mol_type = other RNA
  modified_base 1: mod_base = OTHER; note = 2'-Omethylguanosine
  modified_base 13: mod_base = OTHER; note = 2'-Omethylcytosine
  modified_base 17: mod_base = OTHER; note = 2'-Omethylguanosine
  modified_base 18: mod_base = OTHER; note = 2'-Omethylguanosine
  modified_base 25: mod_base = OTHER; note = 2'-Omethylcytosine
  modified_base 33: mod_base = OTHER; note = Uridine phosphorothiorate
  modified_base 34: mod_base = OTHER; note = 2'-Omethyluridine
  modified_base 35: mod_base = OTHER; note = Cytosine phosphorothiorate
  modified_base 37: mod_base = OTHER; note = Adenosine phosphorothiorate
  modified_base 38: mod_base = OTHER; note = Adenosine phosphorothiorate
  modified_base 41: mod_base = OTHER; note = 2'-fluorocytosine
  modified_base 42: mod_base = OTHER; note = 2'-Omethyladenosine
  modified_base 43: mod_base = OTHER; note = 2'-Omethyladenosine
  modified_base 44: mod_base = OTHER; note = 2'-fluoroadenosine
  modified_base 49: mod_base = OTHER; note = 2'-Omethylcytosine
  modified_base 50: mod_base = OTHER; note = 2'-Omethylcytosine
  modified_base 52: mod_base = OTHER; note = 2'-Omethylguanosine
  modified_base 54: mod_base = OTHER; note = Uridine phosphorothiorate
  modified_base 55: mod_base = OTHER; note = Uridine phosphorothiorate
  modified_base 61: mod_base = OTHER; note = 2'-Omethylcytosine
  modified_base 65: mod_base = OTHER; note = 2'-Omethylguanosine
  modified_base 73: mod_base = OTHER; note = 2'-Omethylguanosine

SEQ ID NO: 1530 - RNA, 76 nt, synthetic construct; identical to SEQ ID NO: 625
  source 1..76: mol_type = other RNA
  modified_base 1: mod_base = OTHER; note = 2'-Omethylguanosine
  modified_base 13: mod_base = OTHER; note = 2'-Omethylcytosine
  modified_base 17: mod_base = OTHER; note = 2'-Omethylguanosine
  modified_base 18: mod_base = OTHER; note = 2'-Omethylguanosine
  modified_base 25: mod_base = OTHER; note = 2'-Omethylcytosine
  modified_base 33: mod_base = OTHER; note = 2'-fluorouridine
  modified_base 34: mod_base = OTHER; note = 2'-Omethyluridine
  modified_base 35: mod_base = OTHER; note = Cytosine phosphorothiorate
  modified_base 37: mod_base = OTHER; note = Adenosine phosphorothiorate
  modified_base 38: mod_base = OTHER; note = Adenosine phosphorothiorate
  modified_base 41: mod_base = OTHER; note = 2'-Omethylcytosine
  modified_base 42: mod_base = OTHER; note = 2'-Omethyladenosine
  modified_base 43: mod_base = OTHER; note = 2'-Omethyladenosine
  modified_base 44: mod_base = OTHER; note = 2'-Omethyladenosine
  modified_base 49: mod_base = OTHER; note = 2'-Omethylcytosine
  modified_base 50: mod_base = OTHER; note = 2'-Omethylcytosine
  modified_base 52: mod_base = OTHER; note = 2'-Omethylguanosine
  modified_base 54: mod_base = OTHER; note = Uridine phosphorothiorate
  modified_base 55: mod_base = OTHER; note = Uridine phosphorothiorate
  modified_base 61: mod_base = OTHER; note = 2'-Omethylcytosine
  modified_base 65: mod_base = OTHER; note = 2'-Omethylguanosine
  modified_base 73: mod_base = OTHER; note = 2'-Omethylguanosine

SEQ ID NO: 1531 - RNA, 76 nt, synthetic construct; identical to SEQ ID NO: 625
  source 1..76: mol_type = other RNA
  modified_base 1: mod_base = OTHER; note = 2'-Omethylguanosine
  modified_base 13: mod_base = OTHER; note = 2'-Omethylcytosine
  modified_base 17: mod_base = OTHER; note = 2'-Omethylguanosine
  modified_base 18: mod_base = OTHER; note = 2'-Omethylguanosine
  modified_base 25: mod_base = OTHER; note = 2'-Omethylcytosine
  modified_base 33: mod_base = OTHER; note = 2'-fluorouridine
  modified_base 34: mod_base = OTHER; note = 2'-Omethyluridine
  modified_base 35: mod_base = OTHER; note = Cytosine phosphorothiorate
  modified_base 37: mod_base = OTHER; note = Adenosine phosphorothiorate
  modified_base 38: mod_base = OTHER; note = Adenosine phosphorothiorate
  modified_base 41: mod_base = OTHER; note = 2'-fluorocytosine
  modified_base 42: mod_base = OTHER; note = 2'-Omethyladenosine
  modified_base 43: mod_base = OTHER; note = 2'-Omethyladenosine
  modified_base 44: mod_base = OTHER; note = 2'-fluoroadenosine
  modified_base 49: mod_base = OTHER; note = 2'-Omethylcytosine
  modified_base 50: mod_base = OTHER; note = 2'-Omethylcytosine
  modified_base 52: mod_base = OTHER; note = 2'-Omethylguanosine
  modified_base 54: mod_base = OTHER; note = Uridine phosphorothiorate
  modified_base 55: mod_base = OTHER; note = Uridine phosphorothiorate
  modified_base 61: mod_base = OTHER; note = 2'-Omethylcytosine
  modified_base 65: mod_base = OTHER; note = 2'-Omethylguanosine
  modified_base 73: mod_base = OTHER; note = 2'-Omethylguanosine

SEQ ID NO: 1532 - RNA, 76 nt, synthetic construct; identical to SEQ ID NO: 625
  source 1..76: mol_type = other RNA
  modified_base 1: mod_base = OTHER; note = 2'-Omethylguanosine
  modified_base 13: mod_base = OTHER; note = 2'-Omethylcytosine
  modified_base 14: mod_base = OTHER; note = 2'-Omethyladenosine
  modified_base 15: mod_base = OTHER; note = 2'-Omethyladenosine
  modified_base 16: mod_base = OTHER; note = 2'-Omethyluridine
  modified_base 17: mod_base = OTHER; note = 2'-Omethylguanosine
  modified_base 18: mod_base = OTHER; note = 2'-Omethylguanosine
  modified_base 19: mod_base = OTHER; note = Adenosine phosphorothiorate
  modified_base 20: mod_base = OTHER; note = 2'-Omethyluridine
  modified_base 21: mod_base = OTHER; note = Adenosine phosphorothiorate
  modified_base 25: mod_base = OTHER; note = 2'-Omethylcytosine
  modified_base 33: mod_base = OTHER; note = Uridine phosphorothiorate
  modified_base 34: mod_base = OTHER; note = 2'-Omethyluridine
  modified_base 35: mod_base = OTHER; note = Cytosine phosphorothiorate
  modified_base 37: mod_base = OTHER; note = Adenosine phosphorothiorate
  modified_base 38: mod_base = OTHER; note = Adenosine phosphorothiorate
  modified_base 49: mod_base = OTHER; note = 2'-Omethylcytosine
  modified_base 50: mod_base = OTHER; note = 2'-Omethylcytosine
  modified_base 52: mod_base = OTHER; note = 2'-Omethylguanosine
  modified_base 54: mod_base = OTHER; note = Uridine phosphorothiorate
  modified_base 55: mod_base = OTHER; note = Uridine phosphorothiorate
  modified_base 61: mod_base = OTHER; note = 2'-Omethylcytosine
  modified_base 65: mod_base = OTHER; note = 2'-Omethylguanosine
  modified_base 73: mod_base = OTHER; note = 2'-Omethylguanosine

SEQ ID NO: 1533 - RNA, 76 nt, synthetic construct; identical to SEQ ID NO: 625
  source 1..76: mol_type = other RNA
  modified_base 1: mod_base = OTHER; note = 2'-Omethylguanosine
  modified_base 13: mod_base = OTHER; note = 2'-Omethylcytosine
  modified_base 14: mod_base = OTHER; note = 2'-Omethyladenosine
  modified_base 15: mod_base = OTHER; note = 2'-Omethyladenosine
  modified_base 16: mod_base = OTHER; note = 2'-Omethyluridine
  modified_base 17: mod_base = OTHER; note = 2'-Omethylguanosine
  modified_base 18: mod_base = OTHER; note = 2'-Omethylguanosine
  modified_base 19: mod_base = OTHER; note = Adenosine phosphorothiorate
  modified_base 20: mod_base = OTHER; note = 2'-Omethyluridine
  modified_base 21: mod_base = OTHER; note = Adenosine phosphorothiorate
  modified_base 25: mod_base = OTHER; note = 2'-Omethylcytosine
  modified_base 33: mod_base = OTHER; note = 2'-fluorouridine
  modified_base 34: mod_base = OTHER; note = 2'-Omethyluridine
  modified_base 35: mod_base = OTHER; note = Cytosine phosphorothiorate
  modified_base 37: mod_base = OTHER; note = Adenosine phosphorothiorate
  modified_base 38: mod_base = OTHER; note = Adenosine phosphorothiorate
  modified_base 49: mod_base = OTHER; note = 2'-Omethylcytosine
  modified_base 50: mod_base = OTHER; note = 2'-Omethylcytosine
  modified_base 52: mod_base = OTHER; note = 2'-Omethylguanosine
  modified_base 54: mod_base = OTHER; note = Uridine phosphorothiorate
  modified_base 55: mod_base = OTHER; note = Uridine phosphorothiorate
  modified_base 61: mod_base = OTHER; note = 2'-Omethylcytosine
  modified_base 65: mod_base = OTHER; note = 2'-Omethylguanosine
  modified_base 73: mod_base = OTHER; note = 2'-Omethylguanosine

SEQ ID NO: 1534 - RNA, 76 nt, synthetic construct; identical to SEQ ID NO: 625
  source 1..76: mol_type = other RNA
  modified_base 1: mod_base = OTHER; note = 2'-Omethylguanosine
  modified_base 13: mod_base = OTHER; note = 2'-Omethylcytosine
  modified_base 14: mod_base = OTHER; note = 2'-Omethyladenosine
  modified_base 15: mod_base = OTHER; note = 2'-Omethyladenosine
  modified_base 16: mod_base = OTHER; note = 2'-Omethyluridine
  modified_base 17: mod_base = OTHER; note = 2'-Omethylguanosine
  modified_base 18: mod_base = OTHER; note = 2'-Omethylguanosine
  modified_base 19: mod_base = OTHER; note = Adenosine phosphorothiorate
  modified_base 20: mod_base = OTHER; note = 2'-Omethyluridine
  modified_base 21: mod_base = OTHER; note = Adenosine phosphorothiorate
  modified_base 25: mod_base = OTHER; note = 2'-Omethylcytosine
  modified_base 33: mod_base = OTHER; note = Uridine phosphorothiorate
  modified_base 34: mod_base = OTHER; note = 2'-Omethyluridine
  modified_base 35: mod_base = OTHER; note = Cytosine phosphorothiorate
  modified_base 37: mod_base = OTHER; note = Adenosine phosphorothiorate
  modified_base 38: mod_base = OTHER; note = Adenosine phosphorothiorate
  modified_base 41: mod_base = OTHER; note = 2'-Omethylcytosine
  modified_base 42: mod_base = OTHER; note = 2'-Omethyladenosine
  modified_base 43: mod_base = OTHER; note = 2'-Omethyladenosine
  modified_base 44: mod_base = OTHER; note = 2'-Omethyladenosine
  modified_base 49: mod_base = OTHER; note = 2'-Omethylcytosine
  modified_base 50: mod_base = OTHER; note = 2'-Omethylcytosine
  modified_base 52: mod_base = OTHER; note = 2'-Omethylguanosine
  modified_base 54: mod_base = OTHER; note = Uridine phosphorothiorate
  modified_base 55: mod_base = OTHER; note = Uridine phosphorothiorate
  modified_base 61: mod_base = OTHER; note = 2'-Omethylcytosine
  modified_base 65: mod_base = OTHER; note = 2'-Omethylguanosine
  modified_base 73: mod_base = OTHER; note = 2'-Omethylguanosine

SEQ ID NO: 1535 - RNA, 76 nt, synthetic construct; identical to SEQ ID NO: 625
  source 1..76: mol_type = other RNA
  modified_base 1: mod_base = OTHER; note = 2'-Omethylguanosine
  modified_base 13: mod_base = OTHER; note = 2'-Omethylcytosine
  modified_base 14: mod_base = OTHER; note = 2'-Omethyladenosine
  modified_base 15: mod_base = OTHER; note = 2'-Omethyladenosine
  modified_base 16: mod_base = OTHER; note = 2'-Omethyluridine
  modified_base 17: mod_base = OTHER; note = 2'-Omethylguanosine
  modified_base 18: mod_base = OTHER; note = 2'-Omethylguanosine
  modified_base 19: mod_base = OTHER; note = Adenosine phosphorothiorate
  modified_base 20: mod_base = OTHER; note = 2'-Omethyluridine
  modified_base 21: mod_base = OTHER; note = Adenosine phosphorothiorate
  modified_base 25: mod_base = OTHER; note = 2'-Omethylcytosine
  modified_base 33: mod_base = OTHER; note = Uridine phosphorothiorate
  modified_base 34: mod_base = OTHER; note = 2'-Omethyluridine
  modified_base 35: mod_base = OTHER; note = Cytosine phosphorothiorate
  modified_base 37: mod_base = OTHER; note = Adenosine phosphorothiorate
  modified_base 38: mod_base = OTHER; note = Adenosine phosphorothiorate
  modified_base 41: mod_base = OTHER; note = 2'-fluorocytosine
  modified_base 42: mod_base = OTHER; note = 2'-Omethyladenosine
  modified_base 43: mod_base = OTHER; note = 2'-Omethyladenosine
  modified_base 44: mod_base = OTHER; note = 2'-fluoroadenosine
  modified_base 49: mod_base = OTHER; note = 2'-Omethylcytosine
  modified_base 50: mod_base = OTHER; note = 2'-Omethylcytosine
  modified_base 52: mod_base = OTHER; note = 2'-Omethylguanosine
  modified_base 54: mod_base = OTHER; note = Uridine phosphorothiorate
  modified_base 55: mod_base = OTHER; note = Uridine phosphorothiorate
  modified_base 61: mod_base = OTHER; note = 2'-Omethylcytosine
  modified_base 65: mod_base = OTHER; note = 2'-Omethylguanosine
  modified_base 73: mod_base = OTHER; note = 2'-Omethylguanosine

SEQ ID NO: 1536 - RNA, 76 nt, synthetic construct; identical to SEQ ID NO: 625
  source 1..76: mol_type = other RNA
  modified_base 1: mod_base = OTHER; note = 2'-Omethylguanosine
  modified_base 13: mod_base = OTHER; note = 2'-Omethylcytosine
  modified_base 14: mod_base = OTHER; note = 2'-Omethyladenosine
  modified_base 15: mod_base = OTHER; note = 2'-Omethyladenosine
  modified_base 16: mod_base = OTHER; note = 2'-Omethyluridine
  modified_base 17: mod_base = OTHER; note = 2'-Omethylguanosine
  modified_base 18: mod_base = OTHER; note = 2'-Omethylguanosine
  modified_base 19: mod_base = OTHER; note = Adenosine phosphorothiorate
  modified_base 20: mod_base = OTHER; note = 2'-Omethyluridine
  modified_base 21: mod_base = OTHER; note = Adenosine phosphorothiorate
  modified_base 25: mod_base = OTHER; note = 2'-Omethylcytosine
  modified_base 33: mod_base = OTHER; note = 2'-fluorouridine
  modified_base 34: mod_base = OTHER; note = 2'-Omethyluridine
  modified_base 35: mod_base = OTHER; note = Cytosine phosphorothiorate
  modified_base 37: mod_base = OTHER; note = Adenosine phosphorothiorate
  modified_base 38: mod_base = OTHER; note = Adenosine phosphorothiorate
  modified_base 41: mod_base = OTHER; note = 2'-Omethylcytosine
  modified_base 42: mod_base = OTHER; note = 2'-Omethyladenosine
  modified_base 43: mod_base = OTHER; note = 2'-Omethyladenosine
  modified_base 44: mod_base = OTHER; note = 2'-Omethyladenosine
  modified_base 49: mod_base = OTHER; note = 2'-Omethylcytosine
  modified_base 50: mod_base = OTHER; note = 2'-Omethylcytosine
  modified_base 52: mod_base = OTHER; note = 2'-Omethylguanosine
  modified_base 54: mod_base = OTHER; note = Uridine phosphorothiorate
  modified_base 55: mod_base = OTHER; note = Uridine phosphorothiorate
  modified_base 61: mod_base = OTHER; note = 2'-Omethylcytosine
  modified_base 65: mod_base = OTHER; note = 2'-Omethylguanosine
  modified_base 73: mod_base = OTHER; note = 2'-Omethylguanosine

SEQ ID NO: 1537 - RNA, 76 nt, synthetic construct; identical to SEQ ID NO: 625
  source 1..76: mol_type = other RNA
  modified_base 1: mod_base = OTHER; note = 2'-Omethylguanosine
  modified_base 13: mod_base = OTHER; note = 2'-Omethylcytosine
  modified_base 14: mod_base = OTHER; note = 2'-Omethyladenosine
  modified_base 15: mod_base = OTHER; note = 2'-Omethyladenosine
  modified_base 16: mod_base = OTHER; note = 2'-Omethyluridine
  modified_base 17: mod_base = OTHER; note = 2'-Omethylguanosine
  modified_base 18: mod_base = OTHER; note = 2'-Omethylguanosine
  modified_base 19: mod_base = OTHER; note = Adenosine phosphorothiorate
  modified_base 20: mod_base = OTHER; note = 2'-Omethyluridine
  modified_base 21: mod_base = OTHER; note = Adenosine phosphorothiorate
  modified_base 25: mod_base = OTHER; note = 2'-Omethylcytosine
  modified_base 33: mod_base = OTHER; note = 2'-fluorouridine
  modified_base 34: mod_base = OTHER; note = 2'-Omethyluridine
  modified_base 35: mod_base = OTHER; note = Cytosine phosphorothiorate
  modified_base 37: mod_base = OTHER; note = Adenosine phosphorothiorate
  modified_base 38: mod_base = OTHER; note = Adenosine phosphorothiorate
  modified_base 41: mod_base = OTHER; note = 2'-fluorocytosine
  modified_base 42: mod_base = OTHER; note = 2'-Omethyladenosine
  modified_base 43: mod_base = OTHER; note = 2'-Omethyladenosine
  modified_base 44: mod_base = OTHER; note = 2'-fluoroadenosine
  modified_base 49: mod_base = OTHER; note = 2'-Omethylcytosine
  modified_base 50: mod_base = OTHER; note = 2'-Omethylcytosine
  modified_base 52: mod_base = OTHER; note = 2'-Omethylguanosine
  modified_base 54: mod_base = OTHER; note = Uridine phosphorothiorate
  modified_base 55: mod_base = OTHER; note = Uridine phosphorothiorate
  modified_base 61: mod_base = OTHER; note = 2'-Omethylcytosine
  modified_base 65: mod_base = OTHER; note = 2'-Omethylguanosine
  modified_base 73: mod_base = OTHER; note = 2'-Omethylguanosine

SEQ ID NO: 1538 - RNA, 76 nt, synthetic construct; identical to SEQ ID NO: 625
  source 1..76: mol_type = other RNA
  modified_base 1: mod_base = OTHER; note = 2'-Omethylguanosine
  modified_base 13: mod_base = OTHER; note = 2'-Omethylcytosine
  modified_base 14: mod_base = OTHER; note = 2'-Omethyladenosine
  modified_base 15: mod_base = OTHER; note = 2'-Omethyladenosine
  modified_base 16: mod_base = OTHER; note = 2'-Omethyluridine
  modified_base 17: mod_base = OTHER; note = 2'-Omethylguanosine
  modified_base 18: mod_base = OTHER; note = 2'-Omethylguanosine
  modified_base 19: mod_base = OTHER; note = Adenosine phosphorothiorate
  modified_base 20: mod_base = OTHER; note = 2'-Omethyluridine
  modified_base 21: mod_base = OTHER; note = Adenosine phosphorothiorate
  modified_base 25: mod_base = OTHER; note = 2'-Omethylcytosine
  modified_base 41: mod_base = OTHER; note = 2'-Omethylcytosine
  modified_base 42: mod_base = OTHER; note = 2'-Omethyladenosine
  modified_base 43: mod_base = OTHER; note = 2'-Omethyladenosine
  modified_base 44: mod_base = OTHER; note = 2'-Omethyladenosine
  modified_base 49: mod_base = OTHER; note = 2'-Omethylcytosine
  modified_base 50: mod_base = OTHER; note = 2'-Omethylcytosine
  modified_base 52: mod_base = OTHER; note = 2'-Omethylguanosine
  modified_base 54: mod_base = OTHER; note = Uridine phosphorothiorate
  modified_base 55: mod_base = OTHER; note = Uridine phosphorothiorate
  modified_base 56: mod_base = OTHER; note = 2'-Omethylcytosine
  modified_base 57: mod_base = OTHER; note = Guanosine phosphorothiorate
  modified_base 58: mod_base = OTHER; note = Adenosine phosphorothiorate
  modified_base 59: mod_base = OTHER; note = 2'-Omethylguanosine
  modified_base 61: mod_base = OTHER; note = 2'-Omethylcytosine
  modified_base 65: mod_base = OTHER; note = 2'-Omethylguanosine
  modified_base 73: mod_base = OTHER; note = 2'-Omethylguanosine

SEQ ID NO: 1539 - RNA, 76 nt, synthetic construct; identical to SEQ ID NO: 625
  source 1..76: mol_type = other RNA
  modified_base 1: mod_base = OTHER; note = 2'-Omethylguanosine
  modified_base 13: mod_base = OTHER; note = 2'-Omethylcytosine
  modified_base 14: mod_base = OTHER; note = 2'-Omethyladenosine
  modified_base 15: mod_base = OTHER; note = 2'-Omethyladenosine
  modified_base 16: mod_base = OTHER; note = 2'-Omethyluridine
  modified_base 17: mod_base = OTHER; note = 2'-Omethylguanosine
  modified_base 18: mod_base = OTHER; note = 2'-Omethylguanosine
  modified_base 19: mod_base = OTHER; note = Adenosine phosphorothiorate
  modified_base 20: mod_base = OTHER; note = 2'-Omethyluridine
  modified_base 21: mod_base = OTHER; note = Adenosine phosphorothiorate
  modified_base 25: mod_base = OTHER; note = 2'-Omethylcytosine
  modified_base 41: mod_base = OTHER; note = 2'-fluorocytosine
  modified_base 42: mod_base = OTHER; note = 2'-Omethyladenosine
  modified_base 43: mod_base = OTHER; note = 2'-Omethyladenosine
  modified_base 44: mod_base = OTHER; note = 2'-fluoroadenosine
  modified_base 49: mod_base = OTHER; note = 2'-Omethylcytosine
  modified_base 50: mod_base = OTHER; note = 2'-Omethylcytosine
  modified_base 52: mod_base = OTHER; note = 2'-Omethylguanosine
  modified_base 54: mod_base = OTHER; note = Uridine phosphorothiorate
  modified_base 55: mod_base = OTHER; note = Uridine phosphorothiorate
  modified_base 56: mod_base = OTHER; note = 2'-Omethylcytosine
  modified_base 57: mod_base = OTHER; note = Guanosine phosphorothiorate
  modified_base 58: mod_base = OTHER; note = Adenosine phosphorothiorate
  modified_base 59: mod_base = OTHER; note = 2'-Omethylguanosine
  modified_base 61: mod_base = OTHER; note = 2'-Omethylcytosine
  modified_base 65: mod_base = OTHER; note = 2'-Omethylguanosine
  modified_base 73: mod_base = OTHER; note = 2'-Omethylguanosine

SEQ ID NO: 1540 - RNA, 76 nt, synthetic construct; identical to SEQ ID NO: 625
  source 1..76: mol_type = other RNA
  modified_base 1: mod_base = OTHER; note = 2'-Omethylguanosine
  modified_base 13: mod_base = OTHER; note = 2'-Omethylcytosine
  modified_base 17: mod_base = OTHER; note = 2'-Omethylguanosine
  modified_base 18: mod_base = OTHER; note = 2'-Omethylguanosine
  modified_base 25: mod_base = OTHER; note = 2'-Omethylcytosine
  modified_base 33: mod_base = OTHER; note = Uridine phosphorothiorate
  modified_base 34: mod_base = OTHER; note = 2'-Omethyluridine
  modified_base 35: mod_base = OTHER; note = Cytosine phosphorothiorate
  modified_base 37: mod_base = OTHER; note = Adenosine phosphorothiorate
  modified_base 38: mod_base = OTHER; note = Adenosine phosphorothiorate
  modified_base 41: mod_base = OTHER; note = 2'-Omethylcytosine
  modified_base 42: mod_base = OTHER; note = 2'-Omethyladenosine
  modified_base 43: mod_base = OTHER; note = 2'-Omethyladenosine
  modified_base 44: mod_base = OTHER; note = 2'-Omethyladenosine
  modified_base 49: mod_base = OTHER; note = 2'-Omethylcytosine
  modified_base 50: mod_base = OTHER; note = 2'-Omethylcytosine
  modified_base 52: mod_base = OTHER; note = 2'-Omethylguanosine
  modified_base 54: mod_base = OTHER; note = Uridine phosphorothiorate
  modified_base 55: mod_base = OTHER; note = Uridine phosphorothiorate
  modified_base 56: mod_base = OTHER; note = 2'-Omethylcytosine
  modified_base 57: mod_base = OTHER; note = Guanosine phosphorothiorate
  modified_base 58: mod_base = OTHER; note = Adenosine phosphorothiorate
  modified_base 59: mod_base = OTHER; note = 2'-Omethylguanosine
  modified_base 61: mod_base = OTHER; note = 2'-Omethylcytosine
  modified_base 65: mod_base = OTHER; note = 2'-Omethylguanosine
  modified_base 73: mod_base = OTHER; note = 2'-Omethylguanosine

SEQ ID NO: 1541 - RNA, 76 nt, synthetic construct; identical to SEQ ID NO: 625
  source 1..76: mol_type = other RNA
  modified_base 1: mod_base = OTHER; note = 2'-Omethylguanosine
  modified_base 13: mod_base = OTHER; note = 2'-Omethylcytosine
  modified_base 17: mod_base = OTHER; note = 2'-Omethylguanosine
  modified_base 18: mod_base = OTHER; note = 2'-Omethylguanosine
  modified_base 25: mod_base = OTHER; note = 2'-Omethylcytosine
  modified_base 33: mod_base = OTHER; note = Uridine phosphorothiorate
  modified_base 34: mod_base = OTHER; note = 2'-Omethyluridine
  modified_base 35: mod_base = OTHER; note = Cytosine phosphorothiorate
  modified_base 37: mod_base = OTHER; note = Adenosine phosphorothiorate
  modified_base 38: mod_base = OTHER; note = Adenosine phosphorothiorate
  modified_base 41: mod_base = OTHER; note = 2'-fluorocytosine
  modified_base 42: mod_base = OTHER; note = 2'-Omethyladenosine
  modified_base 43: mod_base = OTHER; note = 2'-Omethyladenosine
  modified_base 44: mod_base = OTHER; note = 2'-fluoroadenosine
  modified_base 49: mod_base = OTHER; note = 2'-Omethylcytosine
  modified_base 50: mod_base = OTHER; note = 2'-Omethylcytosine
  modified_base 52: mod_base = OTHER; note = 2'-Omethylguanosine
  modified_base 54: mod_base = OTHER; note = Uridine phosphorothiorate
  modified_base 55: mod_base = OTHER; note = Uridine phosphorothiorate
  modified_base 56: mod_base = OTHER; note = 2'-Omethylcytosine
  modified_base 57: mod_base = OTHER; note = Guanosine phosphorothiorate
  modified_base 58: mod_base = OTHER; note = Adenosine phosphorothiorate
  modified_base 59: mod_base = OTHER; note = 2'-Omethylguanosine
  modified_base 61: mod_base = OTHER; note = 2'-Omethylcytosine
  modified_base 65: mod_base = OTHER; note = 2'-Omethylguanosine
  modified_base 73: mod_base = OTHER; note = 2'-Omethylguanosine

SEQ ID NO: 1542 - RNA, 76 nt, synthetic construct; identical to SEQ ID NO: 625
  source 1..76: mol_type = other RNA
  modified_base 1: mod_base = OTHER; note = 2'-Omethylguanosine
  modified_base 13: mod_base = OTHER; note = 2'-Omethylcytosine
  modified_base 17: mod_base = OTHER; note = 2'-Omethylguanosine
  modified_base 18: mod_base = OTHER; note = 2'-Omethylguanosine
  modified_base 25: mod_base = OTHER; note = 2'-Omethylcytosine
  modified_base 33: mod_base = OTHER; note = 2'-fluorouridine
  modified_base 34: mod_base = OTHER; note = 2'-Omethyluridine
  modified_base 35: mod_base = OTHER; note = Cytosine phosphorothiorate
  modified_base 37: mod_base = OTHER; note = Adenosine phosphorothiorate
  modified_base 38: mod_base = OTHER; note = Adenosine phosphorothiorate
  modified_base 41: mod_base = OTHER; note = 2'-Omethylcytosine
  modified_base 42: mod_base = OTHER; note = 2'-Omethyladenosine
  modified_base 43: mod_base = OTHER; note = 2'-Omethyladenosine
  modified_base 44: mod_base = OTHER; note = 2'-Omethyladenosine
  modified_base 49: mod_base = OTHER; note = 2'-Omethylcytosine
  modified_base 50: mod_base = OTHER; note = 2'-Omethylcytosine
  modified_base 52: mod_base = OTHER; note = 2'-Omethylguanosine
  modified_base 54: mod_base = OTHER; note = Uridine phosphorothiorate
  modified_base 55: mod_base = OTHER; note = Uridine phosphorothiorate
  modified_base 56: mod_base = OTHER; note = 2'-Omethylcytosine
  modified_base 57: mod_base = OTHER; note = Guanosine phosphorothiorate
  modified_base 58: mod_base = OTHER; note = Adenosine phosphorothiorate
  modified_base 59: mod_base = OTHER; note = 2'-Omethylguanosine
  modified_base 61: mod_base = OTHER; note = 2'-Omethylcytosine
  modified_base 65: mod_base = OTHER; note = 2'-Omethylguanosine
  modified_base 73: mod_base = OTHER; note = 2'-Omethylguanosine

SEQ ID NO: 1543 - RNA, 76 nt, synthetic construct; identical to SEQ ID NO: 625
  source 1..76: mol_type = other RNA
  modified_base 1: mod_base = OTHER; note = 2'-Omethylguanosine
  modified_base 13: mod_base = OTHER; note = 2'-Omethylcytosine
  modified_base 17: mod_base = OTHER; note = 2'-Omethylguanosine
  modified_base 18: mod_base = OTHER; note = 2'-Omethylguanosine
  modified_base 25: mod_base = OTHER; note = 2'-Omethylcytosine
  modified_base 33: mod_base = OTHER; note = 2'-fluorouridine
  modified_base 34: mod_base = OTHER; note = 2'-Omethyluridine
  modified_base 35: mod_base = OTHER; note = Cytosine phosphorothiorate
  modified_base 37: mod_base = OTHER; note = Adenosine phosphorothiorate
  modified_base 38: mod_base = OTHER; note = Adenosine phosphorothiorate
  modified_base 41: mod_base = OTHER; note = 2'-fluorocytosine
  modified_base 42: mod_base = OTHER; note = 2'-Omethyladenosine
  modified_base 43: mod_base = OTHER; note = 2'-Omethyladenosine
  modified_base 44: mod_base = OTHER; note = 2'-fluoroadenosine
  modified_base 49: mod_base = OTHER; note = 2'-Omethylcytosine
  modified_base 50: mod_base = OTHER; note = 2'-Omethylcytosine
  modified_base 52: mod_base = OTHER; note = 2'-Omethylguanosine
  modified_base 54: mod_base = OTHER; note = Uridine phosphorothiorate
  modified_base 55: mod_base = OTHER; note = Uridine phosphorothiorate
  modified_base 56: mod_base = OTHER; note = 2'-Omethylcytosine
  modified_base 57: mod_base = OTHER; note = Guanosine phosphorothiorate
  modified_base 58: mod_base = OTHER; note = Adenosine phosphorothiorate
  modified_base 59: mod_base = OTHER; note = 2'-Omethylguanosine
  modified_base 61: mod_base = OTHER; note = 2'-Omethylcytosine
  modified_base 65: mod_base = OTHER; note = 2'-Omethylguanosine
  modified_base 73: mod_base = OTHER; note = 2'-Omethylguanosine

SEQ ID NO: 1544 - RNA, 76 nt, synthetic construct; identical to SEQ ID NO: 625
  source 1..76: mol_type = other RNA
  modified_base 1: mod_base = OTHER; note = 2'-Omethylguanosine
  modified_base 13: mod_base = OTHER; note = 2'-Omethylcytosine
  modified_base 14: mod_base = OTHER; note = 2'-Omethyladenosine
  modified_base 15: mod_base = OTHER; note = 2'-Omethyladenosine
  modified_base 16: mod_base = OTHER; note = 2'-Omethyluridine
  modified_base 17: mod_base = OTHER; note = 2'-Omethylguanosine
  modified_base 18: mod_base = OTHER; note = 2'-Omethylguanosine
  modified_base 19: mod_base = OTHER; note = Adenosine phosphorothiorate
  modified_base 20: mod_base = OTHER; note = 2'-Omethyluridine
  modified_base 21: mod_base = OTHER; note = Adenosine phosphorothiorate
  modified_base 25: mod_base = OTHER; note = 2'-Omethylcytosine
  modified_base 33: mod_base = OTHER; note = Uridine phosphorothiorate
  modified_base 34: mod_base = OTHER; note = 2'-Omethyluridine
  modified_base 35: mod_base = OTHER; note = Cytosine phosphorothiorate
  modified_base 37: mod_base = OTHER; note = Adenosine phosphorothiorate
  modified_base 38: mod_base = OTHER; note = Adenosine phosphorothiorate
  modified_base 49: mod_base = OTHER; note = 2'-Omethylcytosine
  modified_base 50: mod_base = OTHER; note = 2'-Omethylcytosine
  modified_base 52: mod_base = OTHER; note = 2'-Omethylguanosine
  modified_base 54: mod_base = OTHER; note = Uridine phosphorothiorate
  modified_base 55: mod_base = OTHER; note = Uridine phosphorothiorate
  modified_base 56: mod_base = OTHER; note = 2'-Omethylcytosine
  modified_base 57: mod_base = OTHER; note = Guanosine phosphorothiorate
  modified_base 58: mod_base = OTHER; note = Adenosine phosphorothiorate
  modified_base 59: mod_base = OTHER; note = 2'-Omethylguanosine
  modified_base 61: mod_base = OTHER; note = 2'-Omethylcytosine
  modified_base 65: mod_base = OTHER; note = 2'-Omethylguanosine
  modified_base 73: mod_base = OTHER; note = 2'-Omethylguanosine

SEQ ID NO: 1545 - RNA, 76 nt, synthetic construct; identical to SEQ ID NO: 625
  source 1..76: mol_type = other RNA
  modified_base 1: mod_base = OTHER; note = 2'-Omethylguanosine
  modified_base 13: mod_base = OTHER; note = 2'-Omethylcytosine
  modified_base 14: mod_base = OTHER; note = 2'-Omethyladenosine
  modified_base 15: mod_base = OTHER; note = 2'-Omethyladenosine
  modified_base 16: mod_base = OTHER; note = 2'-Omethyluridine
  modified_base 17: mod_base = OTHER; note = 2'-Omethylguanosine
  modified_base 18: mod_base = OTHER; note = 2'-Omethylguanosine
  modified_base 19: mod_base = OTHER; note = Adenosine phosphorothiorate
  modified_base 20: mod_base = OTHER; note = 2'-Omethyluridine
  modified_base 21: mod_base = OTHER; note = Adenosine phosphorothiorate
  modified_base 25: mod_base = OTHER; note = 2'-Omethylcytosine
  modified_base 33: mod_base = OTHER; note = 2'-fluorouridine
  modified_base 34: mod_base = OTHER; note = 2'-Omethyluridine
  modified_base 35: mod_base = OTHER; note = Cytosine phosphorothiorate
  modified_base 37: mod_base = OTHER; note = Adenosine phosphorothiorate
  modified_base 38: mod_base = OTHER; note = Adenosine phosphorothiorate
  modified_base 49: mod_base = OTHER; note = 2'-Omethylcytosine
  modified_base 50: mod_base = OTHER; note = 2'-Omethylcytosine
  modified_base 52: mod_base = OTHER; note = 2'-Omethylguanosine
  modified_base 54: mod_base = OTHER; note = Uridine phosphorothiorate
  modified_base 55: mod_base = OTHER; note = Uridine phosphorothiorate
  modified_base 56: mod_base = OTHER; note = 2'-Omethylcytosine
  modified_base 57: mod_base = OTHER; note = Guanosine phosphorothiorate
  modified_base 58: mod_base = OTHER; note = Adenosine phosphorothiorate
  modified_base 59: mod_base = OTHER; note = 2'-Omethylguanosine
  modified_base 61: mod_base = OTHER; note = 2'-Omethylcytosine
  modified_base 65: mod_base = OTHER; note = 2'-Omethylguanosine
  modified_base 73: mod_base = OTHER; note = 2'-Omethylguanosine

SEQ ID NO: 1546 - RNA, 76 nt, synthetic construct; identical to SEQ ID NO: 625
  source 1..76: mol_type = other RNA
  modified_base 1: mod_base = OTHER; note = 2'-Omethylguanosine
  modified_base 13: mod_base = OTHER; note = 2'-Omethylcytosine
  modified_base 14: mod_base = OTHER; note = 2'-Omethyladenosine
  modified_base 15: mod_base = OTHER; note = 2'-Omethyladenosine
  modified_base 16: mod_base = OTHER; note = 2'-Omethyluridine
  modified_base 17: mod_base = OTHER; note = 2'-Omethylguanosine
  modified_base 18: mod_base = OTHER; note = 2'-Omethylguanosine
  modified_base 19: mod_base = OTHER; note = Adenosine phosphorothiorate
  modified_base 20: mod_base = OTHER; note = 2'-Omethyluridine
  modified_base 21: mod_base = OTHER; note = Adenosine phosphorothiorate
  modified_base 25: mod_base = OTHER; note = 2'-Omethylcytosine
  modified_base 33: mod_base = OTHER; note = Uridine phosphorothiorate
  modified_base 34: mod_base = OTHER; note = 2'-Omethyluridine
  modified_base 35: mod_base = OTHER; note = Cytosine phosphorothiorate
  modified_base 37: mod_base = OTHER; note = Adenosine phosphorothiorate
  modified_base 38: mod_base = OTHER; note = Adenosine phosphorothiorate
  modified_base 41: mod_base = OTHER; note = 2'-Omethylcytosine
  modified_base 42: mod_base = OTHER; note = 2'-Omethyladenosine
  modified_base 43: mod_base = OTHER; note = 2'-Omethyladenosine
  modified_base 44: mod_base = OTHER; note = 2'-Omethyladenosine
  modified_base 49: mod_base = OTHER; note = 2'-Omethylcytosine
  modified_base 50: mod_base = OTHER; note = 2'-Omethylcytosine
  modified_base 52: mod_base = OTHER; note = 2'-Omethylguanosine
  modified_base 54: mod_base = OTHER; note = Uridine phosphorothiorate
  modified_base 55: mod_base = OTHER; note = Uridine phosphorothiorate
  modified_base 56: mod_base = OTHER; note = 2'-Omethylcytosine
  modified_base 57: mod_base = OTHER; note = Guanosine phosphorothiorate
  modified_base 58: mod_base = OTHER; note = Adenosine phosphorothiorate
  modified_base 59: mod_base = OTHER; note = 2'-Omethylguanosine
  modified_base 61: mod_base = OTHER; note = 2'-Omethylcytosine
  modified_base 65: mod_base = OTHER; note = 2'-Omethylguanosine
  modified_base 73: mod_base = OTHER; note = 2'-Omethylguanosine

SEQ ID NO: 1547 - RNA, 76 nt, synthetic construct; identical to SEQ ID NO: 625
  source 1..76: mol_type = other RNA
  modified_base 1: mod_base = OTHER; note = 2'-Omethylguanosine
  modified_base 13: mod_base = OTHER; note = 2'-Omethylcytosine
  modified_base 14: mod_base = OTHER; note = 2'-Omethyladenosine
  modified_base 15: mod_base = OTHER; note = 2'-Omethyladenosine
  modified_base 16: mod_base = OTHER; note = 2'-Omethyluridine
  modified_base 17: mod_base = OTHER; note = 2'-Omethylguanosine
  modified_base 18: mod_base = OTHER; note = 2'-Omethylguanosine
  modified_base 19: mod_base = OTHER; note = Adenosine phosphorothiorate
  modified_base 20: mod_base = OTHER; note = 2'-Omethyluridine
  modified_base 21: mod_base = OTHER; note = Adenosine phosphorothiorate
  modified_base 25: mod_base = OTHER; note = 2'-Omethylcytosine
  modified_base 33: mod_base = OTHER; note = Uridine phosphorothiorate
  modified_base 34: mod_base = OTHER; note = 2'-Omethyluridine
  modified_base 35: mod_base = OTHER; note = Cytosine phosphorothiorate
  modified_base 37: mod_base = OTHER; note = Adenosine phosphorothiorate
  modified_base 38: mod_base = OTHER; note = Adenosine phosphorothiorate
  modified_base 41: mod_base = OTHER; note = 2'-fluorocytosine
  modified_base 42: mod_base = OTHER; note = 2'-Omethyladenosine
  modified_base 43: mod_base = OTHER; note = 2'-Omethyladenosine
  modified_base 44: mod_base = OTHER; note = 2'-fluoroadenosine
  modified_base 49: mod_base = OTHER; note = 2'-Omethylcytosine
  modified_base 50: mod_base = OTHER; note = 2'-Omethylcytosine
  modified_base 52: mod_base = OTHER; note = 2'-Omethylguanosine
  modified_base 54: mod_base = OTHER; note = Uridine phosphorothiorate
  modified_base 55: mod_base = OTHER; note = Uridine phosphorothiorate
  modified_base 56: mod_base = OTHER; note = 2'-Omethylcytosine
  modified_base 57: mod_base = OTHER; note = Guanosine phosphorothiorate
  modified_base 58: mod_base = OTHER; note = Adenosine phosphorothiorate
  modified_base 59: mod_base = OTHER; note = 2'-Omethylguanosine
  modified_base 61: mod_base = OTHER; note = 2'-Omethylcytosine
  modified_base 65: mod_base = OTHER; note = 2'-Omethylguanosine
  modified_base 73: mod_base = OTHER; note = 2'-Omethylguanosine

SEQ ID NO: 1548 - RNA, 76 nt, synthetic construct; identical to SEQ ID NO: 625
  source 1..76: mol_type = other RNA
  modified_base 1: mod_base = OTHER; note = 2'-Omethylguanosine
  modified_base 13: mod_base = OTHER; note = 2'-Omethylcytosine
  modified_base 14: mod_base = OTHER; note = 2'-Omethyladenosine
  modified_base 15: mod_base = OTHER; note = 2'-Omethyladenosine
  modified_base 16: mod_base = OTHER; note = 2'-Omethyluridine
  modified_base 17: mod_base = OTHER; note = 2'-Omethylguanosine
  modified_base 18: mod_base = OTHER; note = 2'-Omethylguanosine
  modified_base 19: mod_base = OTHER; note = Adenosine phosphorothiorate
  modified_base 20: mod_base = OTHER; note = 2'-Omethyluridine
  modified_base 21: mod_base = OTHER; note = Adenosine phosphorothiorate
  modified_base 25: mod_base = OTHER; note = 2'-Omethylcytosine
  modified_base 33: mod_base = OTHER; note = 2'-fluorouridine
  modified_base 34: mod_base = OTHER; note = 2'-Omethyluridine
  modified_base 35: mod_base = OTHER; note = Cytosine phosphorothiorate
  modified_base 37: mod_base = OTHER; note = Adenosine phosphorothiorate
  modified_base 38: mod_base = OTHER; note = Adenosine phosphorothiorate
  modified_base 41: mod_base = OTHER; note = 2'-Omethylcytosine
  modified_base 42: mod_base = OTHER; note = 2'-Omethyladenosine
  modified_base 43: mod_base = OTHER; note = 2'-Omethyladenosine
  modified_base 44: mod_base = OTHER; note = 2'-Omethyladenosine
  modified_base 49: mod_base = OTHER; note = 2'-Omethylcytosine
  modified_base 50: mod_base = OTHER; note = 2'-Omethylcytosine
  modified_base 52: mod_base = OTHER; note = 2'-Omethylguanosine
  modified_base 54: mod_base = OTHER; note = Uridine phosphorothiorate
  modified_base 55: mod_base = OTHER; note = Uridine phosphorothiorate
  modified_base 56: mod_base = OTHER; note = 2'-Omethylcytosine
  modified_base 57: mod_base = OTHER; note = Guanosine phosphorothiorate
  modified_base 58: mod_base = OTHER; note = Adenosine phosphorothiorate
  modified_base 59: mod_base = OTHER; note = 2'-Omethylguanosine
  modified_base 61: mod_base = OTHER; note = 2'-Omethylcytosine
  modified_base 65: mod_base = OTHER; note = 2'-Omethylguanosine
  modified_base 73: mod_base = OTHER; note = 2'-Omethylguanosine

SEQ ID NO: 1549 - RNA, 76 nt, synthetic construct; identical to SEQ ID NO: 625
  source 1..76: mol_type = other RNA
  modified_base 1: mod_base = OTHER; note = 2'-Omethylguanosine
  modified_base 13: mod_base = OTHER; note = 2'-Omethylcytosine
  modified_base 14: mod_base = OTHER; note = 2'-Omethyladenosine
  modified_base 15: mod_base = OTHER; note = 2'-Omethyladenosine
  modified_base 16: mod_base = OTHER; note = 2'-Omethyluridine
  modified_base 17: mod_base = OTHER; note = 2'-Omethylguanosine
  modified_base 18: mod_base = OTHER; note = 2'-Omethylguanosine
  modified_base 19: mod_base = OTHER; note = Adenosine phosphorothiorate
  modified_base 20: mod_base = OTHER; note = 2'-Omethyluridine
  modified_base 21: mod_base = OTHER; note = Adenosine phosphorothiorate
  modified_base 25: mod_base = OTHER; note = 2'-Omethylcytosine
  modified_base 33: mod_base = OTHER; note = 2'-fluorouridine
  modified_base 34: mod_base = OTHER; note = 2'-Omethyluridine
  modified_base 35: mod_base = OTHER; note = Cytosine phosphorothiorate
  modified_base 37: mod_base = OTHER; note = Adenosine phosphorothiorate
  modified_base 38: mod_base = OTHER; note = Adenosine phosphorothiorate
  modified_base 41: mod_base = OTHER; note = 2'-fluorocytosine
  modified_base 42: mod_base = OTHER; note = 2'-Omethyladenosine
  modified_base 43: mod_base = OTHER; note = 2'-Omethyladenosine
  modified_base 44: mod_base = OTHER; note = 2'-fluoroadenosine
  modified_base 49: mod_base = OTHER; note = 2'-Omethylcytosine
  modified_base 50: mod_base = OTHER; note = 2'-Omethylcytosine
  modified_base 52: mod_base = OTHER; note = 2'-Omethylguanosine
  modified_base 54: mod_base = OTHER; note = Uridine phosphorothiorate
  modified_base 55: mod_base = OTHER; note = Uridine phosphorothiorate
  modified_base 56: mod_base = OTHER; note = 2'-Omethylcytosine
  modified_base 57: mod_base = OTHER; note = Guanosine phosphorothiorate
  modified_base 58: mod_base = OTHER; note = Adenosine phosphorothiorate
  modified_base 59: mod_base = OTHER; note = 2'-Omethylguanosine
  modified_base 61: mod_base = OTHER; note = 2'-Omethylcytosine
  modified_base 65: mod_base = OTHER; note = 2'-Omethylguanosine
  modified_base 73: mod_base = OTHER; note = 2'-Omethylguanosine

SEQ ID NO: 1550 - RNA, 76 nt, synthetic construct; identical to SEQ ID NO: 625
  source 1..76: mol_type = other RNA
  modified_base 1: mod_base = OTHER; note = 2'-Omethylguanosine
  modified_base 2: mod_base = OTHER; note = 2'-Omethylguanosine
  modified_base 3: mod_base = OTHER; note = 2'-Omethylcytosine
  modified_base 4: mod_base = OTHER; note = 2'-Omethyluridine
  modified_base 5: mod_base = OTHER; note = 2'-Omethylcytosine
  modified_base 6: mod_base = OTHER; note = 2'-Omethylcytosine
  modified_base 13: mod_base = OTHER; note = 2'-Omethylcytosine
  modified_base 14: mod_base = OTHER; note = 2'-Omethyladenosine
  modified_base 15: mod_base = OTHER; note = 2'-Omethyladenosine
  modified_base 16: mod_base = OTHER; note = 2'-Omethyluridine
  modified_base 17: mod_base = OTHER; note = 2'-Omethylguanosine
  modified_base 18: mod_base = OTHER; note = 2'-Omethylguanosine
  modified_base 19: mod_base = OTHER; note = Adenosine phosphorothiorate
  modified_base 20: mod_base = OTHER; note = 2'-Omethyluridine
  modified_base 21: mod_base = OTHER; note = Adenosine phosphorothiorate
  modified_base 25: mod_base = OTHER; note = 2'-Omethylcytosine
  modified_base 41: mod_base = OTHER; note = 2'-Omethylcytosine
  modified_base 42: mod_base = OTHER; note = 2'-Omethyladenosine
  modified_base 43: mod_base = OTHER; note = 2'-Omethyladenosine
  modified_base 44: mod_base = OTHER; note = 2'-Omethyladenosine
  modified_base 49: mod_base = OTHER; note = 2'-Omethylcytosine
  modified_base 50: mod_base = OTHER; note = 2'-Omethylcytosine
  modified_base 52: mod_base = OTHER; note = 2'-Omethylguanosine
  modified_base 54: mod_base = OTHER; note = Uridine phosphorothiorate
  modified_base 55: mod_base = OTHER; note = Uridine phosphorothiorate
  modified_base 61: mod_base = OTHER; note = 2'-Omethylcytosine
  modified_base 65: mod_base = OTHER; note = 2'-Omethylguanosine
  modified_base 73: mod_base = OTHER; note = 2'-Omethylguanosine

SEQ ID NO: 1551 - RNA, 76 nt, synthetic construct; identical to SEQ ID NO: 625
  source 1..76: mol_type = other RNA
  modified_base 1: mod_base = OTHER; note = 2'-Omethylguanosine
  modified_base 2: mod_base = OTHER; note = 2'-Omethylguanosine
  modified_base 3: mod_base = OTHER; note = 2'-Omethylcytosine
  modified_base 4: mod_base = OTHER; note = 2'-Omethyluridine
  modified_base 5: mod_base = OTHER; note = 2'-Omethylcytosine
  modified_base 6: mod_base = OTHER; note = 2'-Omethylcytosine
  modified_base 13: mod_base = OTHER; note = 2'-Omethylcytosine
  modified_base 14: mod_base = OTHER; note = 2'-Omethyladenosine
  modified_base 15: mod_base = OTHER; note = 2'-Omethyladenosine
  modified_base 16: mod_base = OTHER; note = 2'-Omethyluridine
  modified_base 17: mod_base = OTHER; note = 2'-Omethylguanosine
  modified_base 18: mod_base = OTHER; note = 2'-Omethylguanosine
  modified_base 19: mod_base = OTHER; note = Adenosine phosphorothiorate
  modified_base 20: mod_base = OTHER; note = 2'-Omethyluridine
  modified_base 21: mod_base = OTHER; note = Adenosine phosphorothiorate
  modified_base 25: mod_base = OTHER; note = 2'-Omethylcytosine
  modified_base 41: mod_base = OTHER; note = 2'-fluorocytosine
  modified_base 42: mod_base = OTHER; note = 2'-Omethyladenosine
  modified_base 43: mod_base = OTHER; note = 2'-Omethyladenosine
  modified_base 44: mod_base = OTHER; note = 2'-fluoroadenosine
  modified_base 49: mod_base = OTHER; note = 2'-Omethylcytosine
  modified_base 50: mod_base = OTHER; note = 2'-Omethylcytosine
  modified_base 52: mod_base = OTHER; note = 2'-Omethylguanosine
  modified_base 54: mod_base = OTHER; note = Uridine phosphorothiorate
  modified_base 55: mod_base = OTHER; note = Uridine phosphorothiorate
  modified_base 61: mod_base = OTHER; note = 2'-Omethylcytosine
  modified_base 65: mod_base = OTHER; note = 2'-Omethylguanosine
  modified_base 73: mod_base = OTHER; note = 2'-Omethylguanosine

SEQ ID NO: 1552 - RNA, 76 nt, synthetic construct; identical to SEQ ID NO: 625
  source 1..76: mol_type = other RNA
  modified_base 1: mod_base = OTHER; note = 2'-Omethylguanosine
  modified_base 2: mod_base = OTHER; note = 2'-Omethylguanosine
  modified_base 3: mod_base = OTHER; note = 2'-Omethylcytosine
  modified_base 4: mod_base = OTHER; note = 2'-Omethyluridine
  modified_base 5: mod_base = OTHER; note = 2'-Omethylcytosine
  modified_base 6: mod_base = OTHER; note = 2'-Omethylcytosine
  modified_base 13: mod_base = OTHER; note = 2'-Omethylcytosine
  modified_base 17: mod_base = OTHER; note = 2'-Omethylguanosine
  modified_base 18: mod_base = OTHER; note = 2'-Omethylguanosine
  modified_base 25: mod_base = OTHER; note = 2'-Omethylcytosine
  modified_base 33: mod_base = OTHER; note = Uridine phosphorothiorate
  modified_base 34: mod_base = OTHER; note = 2'-Omethyluridine
  modified_base 35: mod_base = OTHER; note = Cytosine phosphorothiorate
  modified_base 37: mod_base = OTHER; note = Adenosine phosphorothiorate
  modified_base 38: mod_base = OTHER; note = Adenosine phosphorothiorate
  modified_base 41: mod_base = OTHER; note = 2'-Omethylcytosine
  modified_base 42: mod_base = OTHER; note = 2'-Omethyladenosine
  modified_base 43: mod_base = OTHER; note = 2'-Omethyladenosine
  modified_base 44: mod_base = OTHER; note = 2'-Omethyladenosine
  modified_base 49: mod_base = OTHER; note = 2'-Omethylcytosine
  modified_base 50: mod_base = OTHER; note = 2'-Omethylcytosine
  modified_base 52: mod_base = OTHER; note = 2'-Omethylguanosine
  modified_base 54: mod_base = OTHER; note = Uridine phosphorothiorate
  modified_base 55: mod_base = OTHER; note = Uridine phosphorothiorate
  modified_base 61: mod_base = OTHER; note = 2'-Omethylcytosine
  modified_base 65: mod_base = OTHER; note = 2'-Omethylguanosine
  modified_base 73: mod_base = OTHER; note = 2'-Omethylguanosine

SEQ ID NO: 1553 - RNA, 76 nt, synthetic construct; identical to SEQ ID NO: 625
  source 1..76: mol_type = other RNA
  modified_base 1: mod_base = OTHER; note = 2'-Omethylguanosine
  modified_base 2: mod_base = OTHER; note = 2'-Omethylguanosine
  modified_base 3: mod_base = OTHER; note = 2'-Omethylcytosine
  modified_base 4: mod_base = OTHER; note = 2'-Omethyluridine
  modified_base 5: mod_base = OTHER; note = 2'-Omethylcytosine
  modified_base 6: mod_base = OTHER; note = 2'-Omethylcytosine
  modified_base 13: mod_base = OTHER; note = 2'-Omethylcytosine
  modified_base 17: mod_base = OTHER; note = 2'-Omethylguanosine
  modified_base 18: mod_base = OTHER; note = 2'-Omethylguanosine
  modified_base 25: mod_base = OTHER; note = 2'-Omethylcytosine
  modified_base 33: mod_base = OTHER; note = Uridine phosphorothiorate
  modified_base 34: mod_base = OTHER; note = 2'-Omethyluridine
  modified_base 35: mod_base = OTHER; note = Cytosine phosphorothiorate
  modified_base 37: mod_base = OTHER; note = Adenosine phosphorothiorate
  modified_base 38: mod_base = OTHER; note = Adenosine phosphorothiorate
  modified_base 41: mod_base = OTHER; note = 2'-fluorocytosine
  modified_base 42: mod_base = OTHER; note = 2'-Omethyladenosine
  modified_base 43: mod_base = OTHER; note = 2'-Omethyladenosine
  modified_base 44: mod_base = OTHER; note = 2'-fluoroadenosine
  modified_base 49: mod_base = OTHER; note = 2'-Omethylcytosine
  modified_base 50: mod_base = OTHER; note = 2'-Omethylcytosine
  modified_base 52: mod_base = OTHER; note = 2'-Omethylguanosine
  modified_base 54: mod_base = OTHER; note = Uridine phosphorothiorate
  modified_base 55: mod_base = OTHER; note = Uridine phosphorothiorate
  modified_base 61: mod_base = OTHER; note = 2'-Omethylcytosine
  modified_base 65: mod_base = OTHER; note = 2'-Omethylguanosine
  modified_base 73: mod_base = OTHER; note = 2'-Omethylguanosine

SEQ ID NO: 1554 - RNA, 76 nt, synthetic construct; identical to SEQ ID NO: 625
  source 1..76: mol_type = other RNA
  modified_base 1: mod_base = OTHER; note = 2'-Omethylguanosine
  modified_base 2: mod_base = OTHER; note = 2'-Omethylguanosine
  modified_base 3: mod_base = OTHER; note = 2'-Omethylcytosine
  modified_base 4: mod_base = OTHER; note = 2'-Omethyluridine
  modified_base 5: mod_base = OTHER; note = 2'-Omethylcytosine
  modified_base 6: mod_base = OTHER; note = 2'-Omethylcytosine
  modified_base 13: mod_base = OTHER; note = 2'-Omethylcytosine
  modified_base 17: mod_base = OTHER; note = 2'-Omethylguanosine
  modified_base 18: mod_base = OTHER; note = 2'-Omethylguanosine
  modified_base 25: mod_base = OTHER; note = 2'-Omethylcytosine
  modified_base 33: mod_base = OTHER; note = 2'-fluorouridine
  modified_base 34: mod_base = OTHER; note = 2'-Omethyluridine
  modified_base 35: mod_base = OTHER; note = Cytosine phosphorothiorate
  modified_base 37: mod_base = OTHER; note = Adenosine phosphorothiorate
  modified_base 38: mod_base = OTHER; note = Adenosine phosphorothiorate
  modified_base 41: mod_base = OTHER; note = 2'-Omethylcytosine
  modified_base 42: mod_base = OTHER; note = 2'-Omethyladenosine
  modified_base 43: mod_base = OTHER; note = 2'-Omethyladenosine
  modified_base 44: mod_base = OTHER; note = 2'-Omethyladenosine
  modified_base 49: mod_base = OTHER; note = 2'-Omethylcytosine
  modified_base 50: mod_base = OTHER; note = 2'-Omethylcytosine
  modified_base 52: mod_base = OTHER; note = 2'-Omethylguanosine
  modified_base 54: mod_base = OTHER; note = Uridine phosphorothiorate
  modified_base 55: mod_base = OTHER; note = Uridine phosphorothiorate
  modified_base 61: mod_base = OTHER; note = 2'-Omethylcytosine
  modified_base 65: mod_base = OTHER; note = 2'-Omethylguanosine
  modified_base 73: mod_base = OTHER; note = 2'-Omethylguanosine

SEQ ID NO: 1555 - RNA, 76 nt, synthetic construct; identical to SEQ ID NO: 625
  source 1..76: mol_type = other RNA
  modified_base 1: mod_base = OTHER; note = 2'-Omethylguanosine
  modified_base 2: mod_base = OTHER; note = 2'-Omethylguanosine
  modified_base 3: mod_base = OTHER; note = 2'-Omethylcytosine
  modified_base 4: mod_base = OTHER; note = 2'-Omethyluridine
  modified_base 5: mod_base = OTHER; note = 2'-Omethylcytosine
  modified_base 6: mod_base = OTHER; note = 2'-Omethylcytosine
  modified_base 13: mod_base = OTHER; note = 2'-Omethylcytosine
  modified_base 17: mod_base = OTHER; note = 2'-Omethylguanosine
  modified_base 18: mod_base = OTHER; note = 2'-Omethylguanosine
  modified_base 25: mod_base = OTHER; note = 2'-Omethylcytosine
  modified_base 33: mod_base = OTHER; note = 2'-fluorouridine
  modified_base 34: mod_base = OTHER; note = 2'-Omethyluridine
  modified_base 35: mod_base = OTHER; note = Cytosine phosphorothiorate
  modified_base 37: mod_base = OTHER; note = Adenosine phosphorothiorate
  modified_base 38: mod_base = OTHER; note = Adenosine phosphorothiorate
  modified_base 41: mod_base = OTHER; note = 2'-fluorocytosine
  modified_base 42: mod_base = OTHER; note = 2'-Omethyladenosine
  modified_base 43: mod_base = OTHER; note = 2'-Omethyladenosine
  modified_base 44: mod_base = OTHER; note = 2'-fluoroadenosine
  modified_base 49: mod_base = OTHER; note = 2'-Omethylcytosine
  modified_base 50: mod_base = OTHER; note = 2'-Omethylcytosine
  modified_base 52: mod_base = OTHER; note = 2'-Omethylguanosine
  modified_base 54: mod_base = OTHER; note = Uridine phosphorothiorate
  modified_base 55: mod_base = OTHER; note = Uridine phosphorothiorate
  modified_base 61: mod_base = OTHER; note = 2'-Omethylcytosine
  modified_base 65: mod_base = OTHER; note = 2'-Omethylguanosine
  modified_base 73: mod_base = OTHER; note = 2'-Omethylguanosine

SEQ ID NO: 1556 - RNA, 76 nt, synthetic construct; identical to SEQ ID NO: 625
  source 1..76: mol_type = other RNA
  modified_base 1: mod_base = OTHER; note = 2'-Omethylguanosine
  modified_base 2: mod_base = OTHER; note = 2'-Omethylguanosine
  modified_base 3: mod_base = OTHER; note = 2'-Omethylcytosine
  modified_base 4: mod_base = OTHER; note = 2'-Omethyluridine
  modified_base 5: mod_base = OTHER; note = 2'-Omethylcytosine
  modified_base 6: mod_base = OTHER; note = 2'-Omethylcytosine
  modified_base 13: mod_base = OTHER; note = 2'-Omethylcytosine
  modified_base 14: mod_base = OTHER; note = 2'-Omethyladenosine
  modified_base 15: mod_base = OTHER; note = 2'-Omethyladenosine
  modified_base 16: mod_base = OTHER; note = 2'-Omethyluridine
  modified_base 17: mod_base = OTHER; note = 2'-Omethylguanosine
  modified_base 18: mod_base = OTHER; note = 2'-Omethylguanosine
  modified_base 19: mod_base = OTHER; note = Adenosine phosphorothiorate
  modified_base 20: mod_base = OTHER; note = 2'-Omethyluridine
  modified_base 21: mod_base = OTHER; note = Adenosine phosphorothiorate
  modified_base 25: mod_base = OTHER; note = 2'-Omethylcytosine
  modified_base 33: mod_base = OTHER; note = Uridine phosphorothiorate
  modified_base 34: mod_base = OTHER; note = 2'-Omethyluridine
  modified_base 35: mod_base = OTHER; note = Cytosine phosphorothiorate
  modified_base 37: mod_base = OTHER; note = Adenosine phosphorothiorate
  modified_base 38: mod_base = OTHER; note = Adenosine phosphorothiorate
  modified_base 49: mod_base = OTHER; note = 2'-Omethylcytosine
  modified_base 50: mod_base = OTHER; note = 2'-Omethylcytosine
  modified_base 52: mod_base = OTHER; note = 2'-Omethylguanosine
  modified_base 54: mod_base = OTHER; note = Uridine phosphorothiorate
  modified_base 55: mod_base = OTHER; note = Uridine phosphorothiorate
  modified_base 61: mod_base = OTHER; note = 2'-Omethylcytosine
  modified_base 65: mod_base = OTHER; note = 2'-Omethylguanosine
  modified_base 73: mod_base = OTHER; note = 2'-Omethylguanosine

SEQ ID NO: 1557 - RNA, 76 nt, synthetic construct; identical to SEQ ID NO: 625
  source 1..76: mol_type = other RNA
  modified_base 1: mod_base = OTHER; note = 2'-Omethylguanosine
  modified_base 2: mod_base = OTHER; note = 2'-Omethylguanosine
  modified_base 3: mod_base = OTHER; note = 2'-Omethylcytosine
  modified_base 4: mod_base = OTHER; note = 2'-Omethyluridine
  modified_base 5: mod_base = OTHER; note = 2'-Omethylcytosine
  modified_base 6: mod_base = OTHER; note = 2'-Omethylcytosine
  modified_base 13: mod_base = OTHER; note = 2'-Omethylcytosine
  modified_base 14: mod_base = OTHER; note = 2'-Omethyladenosine
  modified_base 15: mod_base = OTHER; note = 2'-Omethyladenosine
  modified_base 16: mod_base = OTHER; note = 2'-Omethyluridine
  modified_base 17: mod_base = OTHER; note = 2'-Omethylguanosine
  modified_base 18: mod_base = OTHER; note = 2'-Omethylguanosine
  modified_base 19: mod_base = OTHER; note = Adenosine phosphorothiorate
  modified_base 20: mod_base = OTHER; note = 2'-Omethyluridine
  modified_base 21: mod_base = OTHER; note = Adenosine phosphorothiorate
  modified_base 25: mod_base = OTHER; note = 2'-Omethylcytosine
  modified_base 33: mod_base = OTHER; note = 2'-fluorouridine
  modified_base 34: mod_base = OTHER; note = 2'-Omethyluridine
  modified_base 35: mod_base = OTHER; note = Cytosine phosphorothiorate
  modified_base 37: mod_base = OTHER; note = Adenosine phosphorothiorate
  modified_base 38: mod_base = OTHER; note = Adenosine phosphorothiorate
  modified_base 49: mod_base = OTHER; note = 2'-Omethylcytosine
  modified_base 50: mod_base = OTHER; note = 2'-Omethylcytosine
  modified_base 52: mod_base = OTHER; note = 2'-Omethylguanosine
  modified_base 54: mod_base = OTHER; note = Uridine phosphorothiorate
  modified_base 55: mod_base = OTHER; note = Uridine phosphorothiorate
  modified_base 61: mod_base = OTHER; note = 2'-Omethylcytosine
  modified_base 65: mod_base = OTHER; note = 2'-Omethylguanosine
  modified_base 73: mod_base = OTHER; note = 2'-Omethylguanosine

SEQ ID NO: 1558 - RNA, 76 nt, synthetic construct; identical to SEQ ID NO: 625
  source 1..76: mol_type = other RNA
  modified_base 1: mod_base = OTHER; note = 2'-Omethylguanosine
  modified_base 2: mod_base = OTHER; note = 2'-Omethylguanosine
  modified_base 3: mod_base = OTHER; note = 2'-Omethylcytosine
  modified_base 4: mod_base = OTHER; note = 2'-Omethyluridine
  modified_base 5: mod_base = OTHER; note = 2'-Omethylcytosine
  modified_base 6: mod_base = OTHER; note = 2'-Omethylcytosine
  modified_base 13: mod_base = OTHER; note = 2'-Omethylcytosine
  modified_base 14: mod_base = OTHER; note = 2'-Omethyladenosine
  modified_base 15: mod_base = OTHER; note = 2'-Omethyladenosine
  modified_base 16: mod_base = OTHER; note = 2'-Omethyluridine
  modified_base 17: mod_base = OTHER; note = 2'-Omethylguanosine
  modified_base 18: mod_base = OTHER; note = 2'-Omethylguanosine
  modified_base 19: mod_base = OTHER; note = Adenosine phosphorothiorate
  modified_base 20: mod_base = OTHER; note = 2'-Omethyluridine
  modified_base 21: mod_base = OTHER; note = Adenosine phosphorothiorate
  modified_base 25: mod_base = OTHER; note = 2'-Omethylcytosine
  modified_base 33: mod_base = OTHER; note = Uridine phosphorothiorate
  modified_base 34: mod_base = OTHER; note = 2'-Omethyluridine
  modified_base 35: mod_base = OTHER; note = Cytosine phosphorothiorate
  modified_base 37: mod_base = OTHER; note = Adenosine phosphorothiorate
  modified_base 38: mod_base = OTHER; note = Adenosine phosphorothiorate
  modified_base 41: mod_base = OTHER; note = 2'-Omethylcytosine
  modified_base 42: mod_base = OTHER; note = 2'-Omethyladenosine
  modified_base 43: mod_base = OTHER; note = 2'-Omethyladenosine
  modified_base 44: mod_base = OTHER; note = 2'-Omethyladenosine
  modified_base 49: mod_base = OTHER; note = 2'-Omethylcytosine
  modified_base 50: mod_base = OTHER; note = 2'-Omethylcytosine
  modified_base 52: mod_base = OTHER; note = 2'-Omethylguanosine
  modified_base 54: mod_base = OTHER; note = Uridine phosphorothiorate
  modified_base 55: mod_base = OTHER; note = Uridine phosphorothiorate
  modified_base 61: mod_base = OTHER; note = 2'-Omethylcytosine
  modified_base 65: mod_base = OTHER; note = 2'-Omethylguanosine
  modified_base 73: mod_base = OTHER; note = 2'-Omethylguanosine

SEQ ID NO: 1559 - RNA, 76 nt, synthetic construct; identical to SEQ ID NO: 625
  source 1..76: mol_type = other RNA
  modified_base 1: mod_base = OTHER; note = 2'-Omethylguanosine
  modified_base 2: mod_base = OTHER; note = 2'-Omethylguanosine
  modified_base 3: mod_base = OTHER; note = 2'-Omethylcytosine
  modified_base 4: mod_base = OTHER; note = 2'-Omethyluridine
  modified_base 5: mod_base = OTHER; note = 2'-Omethylcytosine
  modified_base 6: mod_base = OTHER; note = 2'-Omethylcytosine
  modified_base 13: mod_base = OTHER; note = 2'-Omethylcytosine
  modified_base 14: mod_base = OTHER; note = 2'-Omethyladenosine
  modified_base 15: mod_base = OTHER; note = 2'-Omethyladenosine
  modified_base 16: mod_base = OTHER; note = 2'-Omethyluridine
  modified_base 17: mod_base = OTHER; note = 2'-Omethylguanosine
  modified_base 18: mod_base = OTHER; note = 2'-Omethylguanosine
  modified_base 19: mod_base = OTHER; note = Adenosine phosphorothiorate
  modified_base 20: mod_base = OTHER; note = 2'-Omethyluridine
  modified_base 21: mod_base = OTHER; note = Adenosine phosphorothiorate
  modified_base 25: mod_base = OTHER; note = 2'-Omethylcytosine
  modified_base 33: mod_base = OTHER; note = Uridine phosphorothiorate
  modified_base 34: mod_base = OTHER; note = 2'-Omethyluridine
  modified_base 35: mod_base = OTHER; note = Cytosine phosphorothiorate
  modified_base 37: mod_base = OTHER; note = Adenosine phosphorothiorate
  modified_base 38: mod_base = OTHER; note = Adenosine phosphorothiorate
  modified_base 41: mod_base = OTHER; note = 2'-fluorocytosine
  modified_base 42: mod_base = OTHER; note = 2'-Omethyladenosine
  modified_base 43: mod_base = OTHER; note = 2'-Omethyladenosine
  modified_base 44: mod_base = OTHER; note = 2'-fluoroadenosine
  modified_base 49: mod_base = OTHER; note = 2'-Omethylcytosine
  modified_base 50: mod_base = OTHER; note = 2'-Omethylcytosine
  modified_base 52: mod_base = OTHER; note = 2'-Omethylguanosine
  modified_base 54: mod_base = OTHER; note = Uridine phosphorothiorate
  modified_base 55: mod_base = OTHER; note = Uridine phosphorothiorate
  modified_base 61: mod_base = OTHER; note = 2'-Omethylcytosine
  modified_base 65: mod_base = OTHER; note = 2'-Omethylguanosine
  modified_base 73: mod_base = OTHER; note = 2'-Omethylguanosine

SEQ ID NO: 1560 - RNA, 76 nt, synthetic construct; identical to SEQ ID NO: 625
  source 1..76: mol_type = other RNA
  modified_base 1: mod_base = OTHER; note = 2'-Omethylguanosine
  modified_base 2: mod_base = OTHER; note = 2'-Omethylguanosine
  modified_base 3: mod_base = OTHER; note = 2'-Omethylcytosine
  modified_base 4: mod_base = OTHER; note = 2'-Omethyluridine
  modified_base 5: mod_base = OTHER; note = 2'-Omethylcytosine
  modified_base 6: mod_base = OTHER; note = 2'-Omethylcytosine
  modified_base 13: mod_base = OTHER; note = 2'-Omethylcytosine
  modified_base 14: mod_base = OTHER; note = 2'-Omethyladenosine
  modified_base 15: mod_base = OTHER; note = 2'-Omethyladenosine
  modified_base 16: mod_base = OTHER; note = 2'-Omethyluridine
  modified_base 17: mod_base = OTHER; note = 2'-Omethylguanosine
  modified_base 18: mod_base = OTHER; note = 2'-Omethylguanosine
  modified_base 19: mod_base = OTHER; note = Adenosine phosphorothiorate
  modified_base 20: mod_base = OTHER; note = 2'-Omethyluridine
  modified_base 21: mod_base = OTHER; note = Adenosine phosphorothiorate
  modified_base 25: mod_base = OTHER; note = 2'-Omethylcytosine
  modified_base 33: mod_base = OTHER; note = 2'-fluorouridine
  modified_base 34: mod_base = OTHER; note = 2'-Omethyluridine
  modified_base 35: mod_base = OTHER; note = Cytosine phosphorothiorate
  modified_base 37: mod_base = OTHER; note = Adenosine phosphorothiorate
  modified_base 38: mod_base = OTHER; note = Adenosine phosphorothiorate
  modified_base 41: mod_base = OTHER; note = 2'-Omethylcytosine
  modified_base 42: mod_base = OTHER; note = 2'-Omethyladenosine
  modified_base 43: mod_base = OTHER; note = 2'-Omethyladenosine
  modified_base 44: mod_base = OTHER; note = 2'-Omethyladenosine
  modified_base 49: mod_base = OTHER; note = 2'-Omethylcytosine
  modified_base 50: mod_base = OTHER; note = 2'-Omethylcytosine
  modified_base 52: mod_base = OTHER; note = 2'-Omethylguanosine
  modified_base 54: mod_base = OTHER; note = Uridine phosphorothiorate
  modified_base 55: mod_base = OTHER; note = Uridine phosphorothiorate
  modified_base 61: mod_base = OTHER; note = 2'-Omethylcytosine
  modified_base 65: mod_base = OTHER; note = 2'-Omethylguanosine
  modified_base 73: mod_base = OTHER; note = 2'-Omethylguanosine

SEQ ID NO: 1561 - RNA, 76 nt, synthetic construct; identical to SEQ ID NO: 625
  source 1..76: mol_type = other RNA
  modified_base 1: mod_base = OTHER; note = 2'-Omethylguanosine
  modified_base 2: mod_base = OTHER; note = 2'-Omethylguanosine
  modified_base 3: mod_base = OTHER; note = 2'-Omethylcytosine
  modified_base 4: mod_base = OTHER; note = 2'-Omethyluridine
  modified_base 5: mod_base = OTHER; note = 2'-Omethylcytosine
  modified_base 6: mod_base = OTHER; note = 2'-Omethylcytosine
  modified_base 13: mod_base = OTHER; note = 2'-Omethylcytosine
  modified_base 14: mod_base = OTHER; note = 2'-Omethyladenosine
  modified_base 15: mod_base = OTHER; note = 2'-Omethyladenosine
  modified_base 16: mod_base = OTHER; note = 2'-Omethyluridine
  modified_base 17: mod_base = OTHER; note = 2'-Omethylguanosine
  modified_base 18: mod_base = OTHER; note = 2'-Omethylguanosine
  modified_base 19: mod_base = OTHER; note = Adenosine phosphorothiorate
  modified_base 20: mod_base = OTHER; note = 2'-Omethyluridine
  modified_base 21: mod_base = OTHER; note = Adenosine phosphorothiorate
  modified_base 25: mod_base = OTHER; note = 2'-Omethylcytosine
  modified_base 33: mod_base = OTHER; note = 2'-fluorouridine
  modified_base 34: mod_base = OTHER; note = 2'-Omethyluridine
  modified_base 35: mod_base = OTHER; note = Cytosine phosphorothiorate
  modified_base 37: mod_base = OTHER; note = Adenosine phosphorothiorate
  modified_base 38: mod_base = OTHER; note = Adenosine phosphorothiorate
  modified_base 41: mod_base = OTHER; note = 2'-fluorocytosine
  modified_base 42: mod_base = OTHER; note = 2'-Omethyladenosine
  modified_base 43: mod_base = OTHER; note = 2'-Omethyladenosine
  modified_base 44: mod_base = OTHER; note = 2'-fluoroadenosine
  modified_base 49: mod_base = OTHER; note = 2'-Omethylcytosine
  modified_base 50: mod_base = OTHER; note = 2'-Omethylcytosine
  modified_base 52: mod_base = OTHER; note = 2'-Omethylguanosine
  modified_base 54: mod_base = OTHER; note = Uridine phosphorothiorate
  modified_base 55: mod_base = OTHER; note = Uridine phosphorothiorate
  modified_base 61: mod_base = OTHER; note = 2'-Omethylcytosine
  modified_base 65: mod_base = OTHER; note = 2'-Omethylguanosine
  modified_base 73: mod_base = OTHER; note = 2'-Omethylguanosine

SEQ ID NO: 1562 - RNA, 76 nt, synthetic construct; identical to SEQ ID NO: 625
  source 1..76: mol_type = other RNA
  modified_base 1: mod_base = OTHER; note = 2'-Omethylguanosine
  modified_base 13: mod_base = OTHER; note = 2'-Omethylcytosine
  modified_base 14: mod_base = OTHER; note = 2'-Omethyladenosine
  modified_base 15: mod_base = OTHER; note = 2'-Omethyladenosine
  modified_base 16: mod_base = OTHER; note = 2'-Omethyluridine
  modified_base 17: mod_base = OTHER; note = 2'-Omethylguanosine
  modified_base 18: mod_base = OTHER; note = 2'-Omethylguanosine
  modified_base 19: mod_base = OTHER; note = Adenosine phosphorothiorate
  modified_base 20: mod_base = OTHER; note = 2'-Omethyluridine
  modified_base 21: mod_base = OTHER; note = Adenosine phosphorothiorate
  modified_base 25: mod_base = OTHER; note = 2'-Omethylcytosine
  modified_base 41: mod_base = OTHER; note = 2'-Omethylcytosine
  modified_base 42: mod_base = OTHER; note = 2'-Omethyladenosine
  modified_base 43: mod_base = OTHER; note = 2'-Omethyladenosine
  modified_base 44: mod_base = OTHER; note = 2'-Omethyladenosine
  modified_base 49: mod_base = OTHER; note = 2'-Omethylcytosine
  modified_base 50: mod_base = OTHER; note = 2'-Omethylcytosine
  modified_base 51: mod_base = OTHER; note = 2'-Omethylguanosine
  modified_base 52: mod_base = OTHER; note = 2'-Omethylguanosine
  modified_base 53: mod_base = OTHER; note = 2'-Omethylguanosine
  modified_base 54: mod_base = OTHER; note = Uridine phosphorothiorate
  modified_base 55: mod_base = OTHER; note = Uridine phosphorothiorate
  modified_base 61: mod_base = OTHER; note = 2'-Omethylcytosine
  modified_base 65: mod_base = OTHER; note = 2'-Omethylguanosine
  modified_base 73: mod_base = OTHER; note = 2'-Omethylguanosine

SEQ ID NO: 1563 - RNA, 76 nt, synthetic construct; identical to SEQ ID NO: 625
  source 1..76: mol_type = other RNA
  modified_base 1: mod_base = OTHER; note = 2'-Omethylguanosine
  modified_base 13: mod_base = OTHER; note = 2'-Omethylcytosine
  modified_base 14: mod_base = OTHER; note = 2'-Omethyladenosine
  modified_base 15: mod_base = OTHER; note = 2'-Omethyladenosine
  modified_base 16: mod_base = OTHER; note = 2'-Omethyluridine
  modified_base 17: mod_base = OTHER; note = 2'-Omethylguanosine
  modified_base 18: mod_base = OTHER; note = 2'-Omethylguanosine
  modified_base 19: mod_base = OTHER; note = Adenosine phosphorothiorate
  modified_base 20: mod_base = OTHER; note = 2'-Omethyluridine
  modified_base 21: mod_base = OTHER; note = Adenosine phosphorothiorate
  modified_base 25: mod_base = OTHER; note = 2'-Omethylcytosine
  modified_base 41: mod_base = OTHER; note = 2'-fluorocytosine
  modified_base 42: mod_base = OTHER; note = 2'-Omethyladenosine
  modified_base 43: mod_base = OTHER; note = 2'-Omethyladenosine
  modified_base 44: mod_base = OTHER; note = 2'-fluoroadenosine
  modified_base 49: mod_base = OTHER; note = 2'-Omethylcytosine
  modified_base 50: mod_base = OTHER; note = 2'-Omethylcytosine
  modified_base 51: mod_base = OTHER; note = 2'-Omethylguanosine
  modified_base 52: mod_base = OTHER; note = 2'-Omethylguanosine
  modified_base 53: mod_base = OTHER; note = 2'-Omethylguanosine
  modified_base 54: mod_base = OTHER; note = Uridine phosphorothiorate
  modified_base 55: mod_base = OTHER; note = Uridine phosphorothiorate
  modified_base 61: mod_base = OTHER; note = 2'-Omethylcytosine
  modified_base 65: mod_base = OTHER; note = 2'-Omethylguanosine
  modified_base 73: mod_base = OTHER; note = 2'-Omethylguanosine

SEQ ID NO: 1564 - RNA, 76 nt, synthetic construct; identical to SEQ ID NO: 625
  source 1..76: mol_type = other RNA
  modified_base 1: mod_base = OTHER; note = 2'-Omethylguanosine
  modified_base 13: mod_base = OTHER; note = 2'-Omethylcytosine
  modified_base 17: mod_base = OTHER; note = 2'-Omethylguanosine
  modified_base 18: mod_base = OTHER; note = 2'-Omethylguanosine
  modified_base 25: mod_base = OTHER; note = 2'-Omethylcytosine
  modified_base 33: mod_base = OTHER; note = Uridine phosphorothiorate
  modified_base 34: mod_base = OTHER; note = 2'-Omethyluridine
  modified_base 35: mod_base = OTHER; note = Cytosine phosphorothiorate
  modified_base 37: mod_base = OTHER; note = Adenosine phosphorothiorate
  modified_base 38: mod_base = OTHER; note = Adenosine phosphorothiorate
  modified_base 41: mod_base = OTHER; note = 2'-Omethylcytosine
  modified_base 42: mod_base = OTHER; note = 2'-Omethyladenosine
  modified_base 43: mod_base = OTHER; note = 2'-Omethyladenosine
  modified_base 44: mod_base = OTHER; note = 2'-Omethyladenosine
  modified_base 49: mod_base = OTHER; note = 2'-Omethylcytosine
  modified_base 50: mod_base = OTHER; note = 2'-Omethylcytosine
  modified_base 51: mod_base = OTHER; note = 2'-Omethylguanosine
  modified_base 52: mod_base = OTHER; note = 2'-Omethylguanosine
  modified_base 53: mod_base = OTHER; note = 2'-Omethylguanosine
  modified_base 54: mod_base = OTHER; note = Uridine phosphorothiorate
  modified_base 55: mod_base = OTHER; note = Uridine phosphorothiorate
  modified_base 61: mod_base = OTHER; note = 2'-Omethylcytosine
  modified_base 65: mod_base = OTHER; note = 2'-Omethylguanosine
  modified_base 73: mod_base = OTHER; note = 2'-Omethylguanosine

SEQ ID NO: 1565 - RNA, 76 nt, synthetic construct; identical to SEQ ID NO: 625
  source 1..76: mol_type = other RNA
  modified_base 1: mod_base = OTHER; note = 2'-Omethylguanosine
  modified_base 13: mod_base = OTHER; note = 2'-Omethylcytosine
  modified_base 17: mod_base = OTHER; note = 2'-Omethylguanosine
  modified_base 18: mod_base = OTHER; note = 2'-Omethylguanosine
  modified_base 25: mod_base = OTHER; note = 2'-Omethylcytosine
  modified_base 33: mod_base = OTHER; note = Uridine phosphorothiorate
  modified_base 34: mod_base = OTHER; note = 2'-Omethyluridine
  modified_base 35: mod_base = OTHER; note = Cytosine phosphorothiorate
  modified_base 37: mod_base = OTHER; note = Adenosine phosphorothiorate
  modified_base 38: mod_base = OTHER; note = Adenosine phosphorothiorate
  modified_base 41: mod_base = OTHER; note = 2'-fluorocytosine
  modified_base 42: mod_base = OTHER; note = 2'-Omethyladenosine
  modified_base 43: mod_base = OTHER; note = 2'-Omethyladenosine
  modified_base 44: mod_base = OTHER; note = 2'-fluoroadenosine
  modified_base 49: mod_base = OTHER; note = 2'-Omethylcytosine
  modified_base 50: mod_base = OTHER; note = 2'-Omethylcytosine
  modified_base 51: mod_base = OTHER; note = 2'-Omethylguanosine
  modified_base 52: mod_base = OTHER; note = 2'-Omethylguanosine
  modified_base 53: mod_base = OTHER; note = 2'-Omethylguanosine
  modified_base 54: mod_base = OTHER; note = Uridine phosphorothiorate
  modified_base 55: mod_base = OTHER; note = Uridine phosphorothiorate
  modified_base 61: mod_base = OTHER; note = 2'-Omethylcytosine
  modified_base 65: mod_base = OTHER; note = 2'-Omethylguanosine
  modified_base 73: mod_base = OTHER; note = 2'-Omethylguanosine

SEQ ID NO: 1566 - RNA, 76 nt, synthetic construct; identical to SEQ ID NO: 625
  source 1..76: mol_type = other RNA
  modified_base 1: mod_base = OTHER; note = 2'-Omethylguanosine
  modified_base 13: mod_base = OTHER; note = 2'-Omethylcytosine
  modified_base 17: mod_base = OTHER; note = 2'-Omethylguanosine
  modified_base 18: mod_base = OTHER; note = 2'-Omethylguanosine
  modified_base 25: mod_base = OTHER; note = 2'-Omethylcytosine
  modified_base 33: mod_base = OTHER; note = 2'-fluorouridine
  modified_base 34: mod_base = OTHER; note = 2'-Omethyluridine
  modified_base 35: mod_base = OTHER; note = Cytosine phosphorothiorate
  modified_base 37: mod_base = OTHER; note = Adenosine phosphorothiorate
  modified_base 38: mod_base = OTHER; note = Adenosine phosphorothiorate
  modified_base 41: mod_base = OTHER; note = 2'-Omethylcytosine
  modified_base 42: mod_base = OTHER; note = 2'-Omethyladenosine
  modified_base 43: mod_base = OTHER; note = 2'-Omethyladenosine
  modified_base 44: mod_base = OTHER; note = 2'-Omethyladenosine
  modified_base 49: mod_base = OTHER; note = 2'-Omethylcytosine
  modified_base 50: mod_base = OTHER; note = 2'-Omethylcytosine
  modified_base 51: mod_base = OTHER; note = 2'-Omethylguanosine
  modified_base 52: mod_base = OTHER; note = 2'-Omethylguanosine
  modified_base 53: mod_base = OTHER; note = 2'-Omethylguanosine
  modified_base 54: mod_base = OTHER; note = Uridine phosphorothiorate
  modified_base 55: mod_base = OTHER; note = Uridine phosphorothiorate
  modified_base 61: mod_base = OTHER; note = 2'-Omethylcytosine
  modified_base 65: mod_base = OTHER; note = 2'-Omethylguanosine
  modified_base 73: mod_base = OTHER; note = 2'-Omethylguanosine

SEQ ID NO: 1567 - RNA, 76 nt, synthetic construct; identical to SEQ ID NO: 625
  source 1..76: mol_type = other RNA
  modified_base 1: mod_base = OTHER; note = 2'-Omethylguanosine
  modified_base 13: mod_base = OTHER; note = 2'-Omethylcytosine
  modified_base 17: mod_base = OTHER; note = 2'-Omethylguanosine
  modified_base 18: mod_base = OTHER; note = 2'-Omethylguanosine
  modified_base 25: mod_base = OTHER; note = 2'-Omethylcytosine
  modified_base 33: mod_base = OTHER; note = 2'-fluorouridine
  modified_base 34: mod_base = OTHER; note = 2'-Omethyluridine
  modified_base 35: mod_base = OTHER; note = Cytosine phosphorothiorate
  modified_base 37: mod_base = OTHER; note = Adenosine phosphorothiorate
  modified_base 38: mod_base = OTHER; note = Adenosine phosphorothiorate
  modified_base 41: mod_base = OTHER; note = 2'-fluorocytosine
  modified_base 42: mod_base = OTHER; note = 2'-Omethyladenosine
  modified_base 43: mod_base = OTHER; note = 2'-Omethyladenosine
  modified_base 44: mod_base = OTHER; note = 2'-fluoroadenosine
  modified_base 49: mod_base = OTHER; note = 2'-Omethylcytosine
  modified_base 50: mod_base = OTHER; note = 2'-Omethylcytosine
  modified_base 51: mod_base = OTHER; note = 2'-Omethylguanosine
  modified_base 52: mod_base = OTHER; note = 2'-Omethylguanosine
  modified_base 53: mod_base = OTHER; note = 2'-Omethylguanosine
  modified_base 54: mod_base = OTHER; note = Uridine phosphorothiorate
  modified_base 55: mod_base = OTHER; note = Uridine phosphorothiorate
  modified_base 61: mod_base = OTHER; note = 2'-Omethylcytosine
  modified_base 65: mod_base = OTHER; note = 2'-Omethylguanosine
  modified_base 73: mod_base = OTHER; note = 2'-Omethylguanosine

SEQ ID NO: 1568 - RNA, 76 nt, synthetic construct; identical to SEQ ID NO: 625
  source 1..76: mol_type = other RNA
  modified_base 1: mod_base = OTHER; note = 2'-Omethylguanosine
  modified_base 13: mod_base = OTHER; note = 2'-Omethylcytosine
  modified_base 14: mod_base = OTHER; note = 2'-Omethyladenosine
  modified_base 15: mod_base = OTHER; note = 2'-Omethyladenosine
  modified_base 16: mod_base = OTHER; note = 2'-Omethyluridine
  modified_base 17: mod_base = OTHER; note = 2'-Omethylguanosine
  modified_base 18: mod_base = OTHER; note = 2'-Omethylguanosine
  modified_base 19: mod_base = OTHER; note = Adenosine phosphorothiorate
  modified_base 20: mod_base = OTHER; note = 2'-Omethyluridine
  modified_base 21: mod_base = OTHER; note = Adenosine phosphorothiorate
  modified_base 25: mod_base = OTHER; note = 2'-Omethylcytosine
  modified_base 33: mod_base = OTHER; note = Uridine phosphorothiorate
  modified_base 34: mod_base = OTHER; note = 2'-Omethyluridine
  modified_base 35: mod_base = OTHER; note = Cytosine phosphorothiorate
  modified_base 37: mod_base = OTHER; note = Adenosine phosphorothiorate
  modified_base 38: mod_base = OTHER; note = Adenosine phosphorothiorate
  modified_base 49: mod_base = OTHER; note = 2'-Omethylcytosine
  modified_base 50: mod_base = OTHER; note = 2'-Omethylcytosine
  modified_base 51: mod_base = OTHER; note = 2'-Omethylguanosine
  modified_base 52: mod_base = OTHER; note = 2'-Omethylguanosine
  modified_base 53: mod_base = OTHER; note = 2'-Omethylguanosine
  modified_base 54: mod_base = OTHER; note = Uridine phosphorothiorate
  modified_base 55: mod_base = OTHER; note = Uridine phosphorothiorate
  modified_base 61: mod_base = OTHER; note = 2'-Omethylcytosine
  modified_base 65: mod_base = OTHER; note = 2'-Omethylguanosine
  modified_base 73: mod_base = OTHER; note = 2'-Omethylguanosine

SEQ ID NO: 1569 - RNA, 76 nt, synthetic construct; identical to SEQ ID NO: 625
  source 1..76: mol_type = other RNA
  modified_base 1: mod_base = OTHER; note = 2'-Omethylguanosine
  modified_base 13: mod_base = OTHER; note = 2'-Omethylcytosine
  modified_base 14: mod_base = OTHER; note = 2'-Omethyladenosine
  modified_base 15: mod_base = OTHER; note = 2'-Omethyladenosine
  modified_base 16: mod_base = OTHER; note = 2'-Omethyluridine
  modified_base 17: mod_base = OTHER; note = 2'-Omethylguanosine
  modified_base 18: mod_base = OTHER; note = 2'-Omethylguanosine
  modified_base 19: mod_base = OTHER; note = Adenosine phosphorothiorate
  modified_base 20: mod_base = OTHER; note = 2'-Omethyluridine
  modified_base 21: mod_base = OTHER; note = Adenosine phosphorothiorate
  modified_base 25: mod_base = OTHER; note = 2'-Omethylcytosine
  modified_base 33: mod_base = OTHER; note = 2'-fluorouridine
  modified_base 34: mod_base = OTHER; note = 2'-Omethyluridine
  modified_base 35: mod_base = OTHER; note = Cytosine phosphorothiorate
  modified_base 37: mod_base = OTHER; note = Adenosine phosphorothiorate
  modified_base 38: mod_base = OTHER; note = Adenosine phosphorothiorate
  modified_base 49: mod_base = OTHER; note = 2'-Omethylcytosine
  modified_base 50: mod_base = OTHER; note = 2'-Omethylcytosine
  modified_base 51: mod_base = OTHER; note = 2'-Omethylguanosine
  modified_base 52: mod_base = OTHER; note = 2'-Omethylguanosine
  modified_base 53: mod_base = OTHER; note = 2'-Omethylguanosine
  modified_base 54: mod_base = OTHER; note = Uridine phosphorothiorate
  modified_base 55: mod_base = OTHER; note = Uridine phosphorothiorate
  modified_base 61: mod_base = OTHER; note = 2'-Omethylcytosine
  modified_base 65: mod_base = OTHER; note = 2'-Omethylguanosine
  modified_base 73: mod_base = OTHER; note = 2'-Omethylguanosine

SEQ ID NO: 1570 - RNA, 76 nt, synthetic construct; identical to SEQ ID NO: 625
  source 1..76: mol_type = other RNA
  modified_base 1: mod_base = OTHER; note = 2'-Omethylguanosine
  modified_base 13: mod_base = OTHER; note = 2'-Omethylcytosine
  modified_base 14: mod_base = OTHER; note = 2'-Omethyladenosine
  modified_base 15: mod_base = OTHER; note = 2'-Omethyladenosine
  modified_base 16: mod_base = OTHER; note = 2'-Omethyluridine
  modified_base 17: mod_base = OTHER; note = 2'-Omethylguanosine
  modified_base 18: mod_base = OTHER; note = 2'-Omethylguanosine
  modified_base 19: mod_base = OTHER; note = Adenosine phosphorothiorate
  modified_base 20: mod_base = OTHER; note = 2'-Omethyluridine
  modified_base 21: mod_base = OTHER; note = Adenosine phosphorothiorate
  modified_base 25: mod_base = OTHER; note = 2'-Omethylcytosine
  modified_base 33: mod_base = OTHER; note = Uridine phosphorothiorate
  modified_base 34: mod_base = OTHER; note = 2'-Omethyluridine
  modified_base 35: mod_base = OTHER; note = Cytosine phosphorothiorate
  modified_base 37: mod_base = OTHER; note = Adenosine phosphorothiorate
  modified_base 38: mod_base = OTHER; note = Adenosine phosphorothiorate
  modified_base 41: mod_base = OTHER; note = 2'-Omethylcytosine
  modified_base 42: mod_base = OTHER; note = 2'-Omethyladenosine
  modified_base 43: mod_base = OTHER; note = 2'-Omethyladenosine
  modified_base 44: mod_base = OTHER; note = 2'-Omethyladenosine
  modified_base 49: mod_base = OTHER; note = 2'-Omethylcytosine
  modified_base 50: mod_base = OTHER; note = 2'-Omethylcytosine
  modified_base 51: mod_base = OTHER; note = 2'-Omethylguanosine
  modified_base 52: mod_base = OTHER; note = 2'-Omethylguanosine
  modified_base 53: mod_base = OTHER; note = 2'-Omethylguanosine
  modified_base 54: mod_base = OTHER; note = Uridine phosphorothiorate
  modified_base 55: mod_base = OTHER; note = Uridine phosphorothiorate
  modified_base 61: mod_base = OTHER; note = 2'-Omethylcytosine
  modified_base 65: mod_base = OTHER; note = 2'-Omethylguanosine
  modified_base 73: mod_base = OTHER; note = 2'-Omethylguanosine

SEQ ID NO: 1571 - RNA, 76 nt, synthetic construct; identical to SEQ ID NO: 625
  source 1..76: mol_type = other RNA
  modified_base 1: mod_base = OTHER; note = 2'-Omethylguanosine
  modified_base 13: mod_base = OTHER; note = 2'-Omethylcytosine
  modified_base 14: mod_base = OTHER; note = 2'-Omethyladenosine
  modified_base 15: mod_base = OTHER; note = 2'-Omethyladenosine
  modified_base 16: mod_base = OTHER; note = 2'-Omethyluridine
  modified_base 17: mod_base = OTHER; note = 2'-Omethylguanosine
  modified_base 18: mod_base = OTHER; note = 2'-Omethylguanosine
  modified_base 19: mod_base = OTHER; note = Adenosine phosphorothiorate
  modified_base 20: mod_base = OTHER; note = 2'-Omethyluridine
  modified_base 21: mod_base = OTHER; note = Adenosine phosphorothiorate
  modified_base 25: mod_base = OTHER; note = 2'-Omethylcytosine
  modified_base 33: mod_base = OTHER; note = Uridine phosphorothiorate
  modified_base 34: mod_base = OTHER; note = 2'-Omethyluridine
  modified_base 35: mod_base = OTHER; note = Cytosine phosphorothiorate
  modified_base 37: mod_base = OTHER; note = Adenosine phosphorothiorate
  modified_base 38: mod_base = OTHER; note = Adenosine phosphorothiorate
  modified_base 41: mod_base = OTHER; note = 2'-fluorocytosine
  modified_base 42: mod_base = OTHER; note = 2'-Omethyladenosine
  modified_base 43: mod_base = OTHER; note = 2'-Omethyladenosine
  modified_base 44: mod_base = OTHER; note = 2'-fluoroadenosine
  modified_base 49: mod_base = OTHER; note = 2'-Omethylcytosine
  modified_base 50: mod_base = OTHER; note = 2'-Omethylcytosine
  modified_base 51: mod_base = OTHER; note = 2'-Omethylguanosine
  modified_base 52: mod_base = OTHER; note = 2'-Omethylguanosine
  modified_base 53: mod_base = OTHER; note = 2'-Omethylguanosine
  modified_base 54: mod_base = OTHER; note = Uridine phosphorothiorate
  modified_base 55: mod_base = OTHER; note = Uridine phosphorothiorate
  modified_base 61: mod_base = OTHER; note = 2'-Omethylcytosine
  modified_base 65: mod_base = OTHER; note = 2'-Omethylguanosine
  modified_base 73: mod_base = OTHER; note = 2'-Omethylguanosine

SEQ ID NO: 1572 - RNA, 76 nt, synthetic construct; identical to SEQ ID NO: 625
  source 1..76: mol_type = other RNA
  modified_base 1: mod_base = OTHER; note = 2'-Omethylguanosine
  modified_base 13: mod_base = OTHER; note = 2'-Omethylcytosine
  modified_base 14: mod_base = OTHER; note = 2'-Omethyladenosine
  modified_base 15: mod_base = OTHER; note = 2'-Omethyladenosine
  modified_base 16: mod_base = OTHER; note = 2'-Omethyluridine
  modified_base 17: mod_base = OTHER; note = 2'-Omethylguanosine
  modified_base 18: mod_base = OTHER; note = 2'-Omethylguanosine
  modified_base 19: mod_base = OTHER; note = Adenosine phosphorothiorate
  modified_base 20: mod_base = OTHER; note = 2'-Omethyluridine
  modified_base 21: mod_base = OTHER; note = Adenosine phosphorothiorate
  modified_base 25: mod_base = OTHER; note = 2'-Omethylcytosine
  modified_base 33: mod_base = OTHER; note = 2'-fluorouridine
  modified_base 34: mod_base = OTHER; note = 2'-Omethyluridine
  modified_base 35: mod_base = OTHER; note = Cytosine phosphorothiorate
  modified_base 37: mod_base = OTHER; note = Adenosine phosphorothiorate
  modified_base 38: mod_base = OTHER; note = Adenosine phosphorothiorate
  modified_base 41: mod_base = OTHER; note = 2'-Omethylcytosine
  modified_base 42: mod_base = OTHER; note = 2'-Omethyladenosine
  modified_base 43: mod_base = OTHER; note = 2'-Omethyladenosine
  modified_base 44: mod_base = OTHER; note = 2'-Omethyladenosine
  modified_base 49: mod_base = OTHER; note = 2'-Omethylcytosine
  modified_base 50: mod_base = OTHER; note = 2'-Omethylcytosine
  modified_base 51: mod_base = OTHER; note = 2'-Omethylguanosine
  modified_base 52: mod_base = OTHER; note = 2'-Omethylguanosine
  modified_base 53: mod_base = OTHER; note = 2'-Omethylguanosine
  modified_base 54: mod_base = OTHER; note = Uridine phosphorothiorate
  modified_base 55: mod_base = OTHER; note = Uridine phosphorothiorate
  modified_base 61: mod_base = OTHER; note = 2'-Omethylcytosine
  modified_base 65: mod_base = OTHER; note = 2'-Omethylguanosine
  modified_base 73: mod_base = OTHER; note = 2'-Omethylguanosine

SEQ ID NO: 1573 - RNA, 76 nt, synthetic construct; identical to SEQ ID NO: 625
  source 1..76: mol_type = other RNA
  modified_base 1: mod_base = OTHER; note = 2'-Omethylguanosine
  modified_base 13: mod_base = OTHER; note = 2'-Omethylcytosine
  modified_base 14: mod_base = OTHER; note = 2'-Omethyladenosine
  modified_base 15: mod_base = OTHER; note = 2'-Omethyladenosine
  modified_base 16: mod_base = OTHER; note = 2'-Omethyluridine
  modified_base 17: mod_base = OTHER; note = 2'-Omethylguanosine
  modified_base 18: mod_base = OTHER; note = 2'-Omethylguanosine
  modified_base 19: mod_base = OTHER; note = Adenosine phosphorothiorate
  modified_base 20: mod_base = OTHER; note = 2'-Omethyluridine
  modified_base 21: mod_base = OTHER; note = Adenosine phosphorothiorate
  modified_base 25: mod_base = OTHER; note = 2'-Omethylcytosine
  modified_base 33: mod_base = OTHER; note = 2'-fluorouridine
  modified_base 34: mod_base = OTHER; note = 2'-Omethyluridine
  modified_base 35: mod_base = OTHER; note = Cytosine phosphorothiorate
  modified_base 37: mod_base = OTHER; note = Adenosine phosphorothiorate
  modified_base 38: mod_base = OTHER; note = Adenosine phosphorothiorate
  modified_base 41: mod_base = OTHER; note = 2'-fluorocytosine
  modified_base 42: mod_base = OTHER; note = 2'-Omethyladenosine
  modified_base 43: mod_base = OTHER; note = 2'-Omethyladenosine
  modified_base 44: mod_base = OTHER; note = 2'-fluoroadenosine
  modified_base 49: mod_base = OTHER; note = 2'-Omethylcytosine
  modified_base 50: mod_base = OTHER; note = 2'-Omethylcytosine
  modified_base 51: mod_base = OTHER; note = 2'-Omethylguanosine
  modified_base 52: mod_base = OTHER; note = 2'-Omethylguanosine
  modified_base 53: mod_base = OTHER; note = 2'-Omethylguanosine
  modified_base 54: mod_base = OTHER; note = Uridine phosphorothiorate
  modified_base 55: mod_base = OTHER; note = Uridine phosphorothiorate
  modified_base 61: mod_base = OTHER; note = 2'-Omethylcytosine
  modified_base 65: mod_base = OTHER; note = 2'-Omethylguanosine
  modified_base 73: mod_base = OTHER; note = 2'-Omethylguanosine

SEQ ID NO: 1574 - RNA, 76 nt, synthetic construct; identical to SEQ ID NO: 625
  source 1..76: mol_type = other RNA
  modified_base 1: mod_base = OTHER; note = 2'-Omethylguanosine
  modified_base 2: mod_base = OTHER; note = 2'-Omethylguanosine
  modified_base 3: mod_base = OTHER; note = 2'-Omethylcytosine
  modified_base 4: mod_base = OTHER; note = 2'-Omethyluridine
  modified_base 5: mod_base = OTHER; note = 2'-Omethylcytosine
  modified_base 6: mod_base = OTHER; note = 2'-Omethylcytosine
  modified_base 13: mod_base = OTHER; note = 2'-Omethylcytosine
  modified_base 14: mod_base = OTHER; note = 2'-Omethyladenosine
  modified_base 15: mod_base = OTHER; note = 2'-Omethyladenosine
  modified_base 16: mod_base = OTHER; note = 2'-Omethyluridine
  modified_base 17: mod_base = OTHER; note = 2'-Omethylguanosine
  modified_base 18: mod_base = OTHER; note = 2'-Omethylguanosine
  modified_base 19: mod_base = OTHER; note = Adenosine phosphorothiorate
  modified_base 20: mod_base = OTHER; note = 2'-Omethyluridine
  modified_base 21: mod_base = OTHER; note = Adenosine phosphorothiorate
  modified_base 25: mod_base = OTHER; note = 2'-Omethylcytosine
  modified_base 41: mod_base = OTHER; note = 2'-Omethylcytosine
  modified_base 42: mod_base = OTHER; note = 2'-Omethyladenosine
  modified_base 43: mod_base = OTHER; note = 2'-Omethyladenosine
  modified_base 44: mod_base = OTHER; note = 2'-Omethyladenosine
  modified_base 49: mod_base = OTHER; note = 2'-Omethylcytosine
  modified_base 50: mod_base = OTHER; note = 2'-Omethylcytosine
  modified_base 51: mod_base = OTHER; note = 2'-Omethylguanosine
  modified_base 52: mod_base = OTHER; note = 2'-Omethylguanosine
  modified_base 53: mod_base = OTHER; note = 2'-Omethylguanosine
  modified_base 54: mod_base = OTHER; note = Uridine phosphorothiorate
  modified_base 55: mod_base = OTHER; note = Uridine phosphorothiorate
  modified_base 61: mod_base = OTHER; note = 2'-Omethylcytosine
  modified_base 65: mod_base = OTHER; note = 2'-Omethylguanosine
  modified_base 73: mod_base = OTHER; note = 2'-Omethylguanosine

SEQ ID NO: 1575 - RNA, 76 nt, synthetic construct; identical to SEQ ID NO: 625
  source 1..76: mol_type = other RNA
  modified_base 1: mod_base = OTHER; note = 2'-Omethylguanosine
  modified_base 2: mod_base = OTHER; note = 2'-Omethylguanosine
  modified_base 3: mod_base = OTHER; note = 2'-Omethylcytosine
  modified_base 4: mod_base = OTHER; note = 2'-Omethyluridine
  modified_base 5: mod_base = OTHER; note = 2'-Omethylcytosine
  modified_base 6: mod_base = OTHER; note = 2'-Omethylcytosine
  modified_base 13: mod_base = OTHER; note = 2'-Omethylcytosine
  modified_base 14: mod_base = OTHER; note = 2'-Omethyladenosine
  modified_base 15: mod_base = OTHER; note = 2'-Omethyladenosine
  modified_base 16: mod_base = OTHER; note = 2'-Omethyluridine
  modified_base 17: mod_base = OTHER; note = 2'-Omethylguanosine
  modified_base 18: mod_base = OTHER; note = 2'-Omethylguanosine
  modified_base 19: mod_base = OTHER; note = Adenosine phosphorothiorate
  modified_base 20: mod_base = OTHER; note = 2'-Omethyluridine
  modified_base 21: mod_base = OTHER; note = Adenosine phosphorothiorate
  modified_base 25: mod_base = OTHER; note = 2'-Omethylcytosine
  modified_base 41: mod_base = OTHER; note = 2'-fluorocytosine
  modified_base 42: mod_base = OTHER; note = 2'-Omethyladenosine
  modified_base 43: mod_base = OTHER; note = 2'-Omethyladenosine
  modified_base 44: mod_base = OTHER; note = 2'-fluoroadenosine
  modified_base 49: mod_base = OTHER; note = 2'-Omethylcytosine
  modified_base 50: mod_base = OTHER; note = 2'-Omethylcytosine
  modified_base 51: mod_base = OTHER; note = 2'-Omethylguanosine
  modified_base 52: mod_base = OTHER; note = 2'-Omethylguanosine
  modified_base 53: mod_base = OTHER; note = 2'-Omethylguanosine
  modified_base 54: mod_base = OTHER; note = Uridine phosphorothiorate
  modified_base 55: mod_base = OTHER; note = Uridine phosphorothiorate
  modified_base 61: mod_base = OTHER; note = 2'-Omethylcytosine
  modified_base 65: mod_base = OTHER; note = 2'-Omethylguanosine
  modified_base 73: mod_base = OTHER; note = 2'-Omethylguanosine

SEQ ID NO: 1576 - RNA, 76 nt, synthetic construct; identical to SEQ ID NO: 625
  source 1..76: mol_type = other RNA
  modified_base 1: mod_base = OTHER; note = 2'-Omethylguanosine
  modified_base 2: mod_base = OTHER; note = 2'-Omethylguanosine
  modified_base 3: mod_base = OTHER; note = 2'-Omethylcytosine
  modified_base 4: mod_base = OTHER; note = 2'-Omethyluridine
  modified_base 5: mod_base = OTHER; note = 2'-Omethylcytosine
  modified_base 6: mod_base = OTHER; note = 2'-Omethylcytosine
  modified_base 13: mod_base = OTHER; note = 2'-Omethylcytosine
  modified_base 17: mod_base = OTHER; note = 2'-Omethylguanosine
  modified_base 18: mod_base = OTHER; note = 2'-Omethylguanosine
  modified_base 25: mod_base = OTHER; note = 2'-Omethylcytosine
  modified_base 33: mod_base = OTHER; note = Uridine phosphorothiorate
  modified_base 34: mod_base = OTHER; note = 2'-Omethyluridine
  modified_base 35: mod_base = OTHER; note = Cytosine phosphorothiorate
  modified_base 37: mod_base = OTHER; note = Adenosine phosphorothiorate
  modified_base 38: mod_base = OTHER; note = Adenosine phosphorothiorate
  modified_base 41: mod_base = OTHER; note = 2'-Omethylcytosine
  modified_base 42: mod_base = OTHER; note = 2'-Omethyladenosine
  modified_base 43: mod_base = OTHER; note = 2'-Omethyladenosine
  modified_base 44: mod_base = OTHER; note = 2'-Omethyladenosine
  modified_base 49: mod_base = OTHER; note = 2'-Omethylcytosine
  modified_base 50: mod_base = OTHER; note = 2'-Omethylcytosine
  modified_base 51: mod_base = OTHER; note = 2'-Omethylguanosine
  modified_base 52: mod_base = OTHER; note = 2'-Omethylguanosine
  modified_base 53: mod_base = OTHER; note = 2'-Omethylguanosine
  modified_base 54: mod_base = OTHER; note = Uridine phosphorothiorate
  modified_base 55: mod_base = OTHER; note = Uridine phosphorothiorate
  modified_base 61: mod_base = OTHER; note = 2'-Omethylcytosine
  modified_base 65: mod_base = OTHER; note = 2'-Omethylguanosine
  modified_base 73: mod_base = OTHER; note = 2'-Omethylguanosine

SEQ ID NO: 1577 - RNA, 76 nt, synthetic construct; identical to SEQ ID NO: 625
  source 1..76: mol_type = other RNA
  modified_base 1: mod_base = OTHER; note = 2'-Omethylguanosine
  modified_base 2: mod_base = OTHER; note = 2'-Omethylguanosine
  modified_base 3: mod_base = OTHER; note = 2'-Omethylcytosine
  modified_base 4: mod_base = OTHER; note = 2'-Omethyluridine
  modified_base 5: mod_base = OTHER; note = 2'-Omethylcytosine
  modified_base 6: mod_base = OTHER; note = 2'-Omethylcytosine
  modified_base 13: mod_base = OTHER; note = 2'-Omethylcytosine
  modified_base 17: mod_base = OTHER; note = 2'-Omethylguanosine
  modified_base 18: mod_base = OTHER; note = 2'-Omethylguanosine
  modified_base 25: mod_base = OTHER; note = 2'-Omethylcytosine
  modified_base 33: mod_base = OTHER; note = Uridine phosphorothiorate
  modified_base 34: mod_base = OTHER; note = 2'-Omethyluridine
  modified_base 35: mod_base = OTHER; note = Cytosine phosphorothiorate
  modified_base 37: mod_base = OTHER; note = Adenosine phosphorothiorate
  modified_base 38: mod_base = OTHER; note = Adenosine phosphorothiorate
  modified_base 41: mod_base = OTHER; note = 2'-fluorocytosine
  modified_base 42: mod_base = OTHER; note = 2'-Omethyladenosine
  modified_base 43: mod_base = OTHER; note = 2'-Omethyladenosine
  modified_base 44: mod_base = OTHER; note = 2'-fluoroadenosine
  modified_base 49: mod_base = OTHER; note = 2'-Omethylcytosine
  modified_base 50: mod_base = OTHER; note = 2'-Omethylcytosine
  modified_base 51: mod_base = OTHER; note = 2'-Omethylguanosine
  modified_base 52: mod_base = OTHER; note = 2'-Omethylguanosine
  modified_base 53: mod_base = OTHER; note = 2'-Omethylguanosine
  modified_base 54: mod_base = OTHER; note = Uridine phosphorothiorate
  modified_base 55: mod_base = OTHER; note = Uridine phosphorothiorate
  modified_base 61: mod_base = OTHER; note = 2'-Omethylcytosine
  modified_base 65: mod_base = OTHER; note = 2'-Omethylguanosine
  modified_base 73: mod_base = OTHER; note = 2'-Omethylguanosine

SEQ ID NO: 1578 - RNA, 76 nt, synthetic construct; identical to SEQ ID NO: 625
  source 1..76: mol_type = other RNA
  modified_base 1: mod_base = OTHER; note = 2'-Omethylguanosine
  modified_base 2: mod_base = OTHER; note = 2'-Omethylguanosine
  modified_base 3: mod_base = OTHER; note = 2'-Omethylcytosine
  modified_base 4: mod_base = OTHER; note = 2'-Omethyluridine
  modified_base 5: mod_base = OTHER; note = 2'-Omethylcytosine
  modified_base 6: mod_base = OTHER; note = 2'-Omethylcytosine
  modified_base 13: mod_base = OTHER; note = 2'-Omethylcytosine
  modified_base 17: mod_base = OTHER; note = 2'-Omethylguanosine
  modified_base 18: mod_base = OTHER; note = 2'-Omethylguanosine
  modified_base 25: mod_base = OTHER; note = 2'-Omethylcytosine
  modified_base 33: mod_base = OTHER; note = 2'-fluorouridine
  modified_base 34: mod_base = OTHER; note = 2'-Omethyluridine
  modified_base 35: mod_base = OTHER; note = Cytosine phosphorothiorate
  modified_base 37: mod_base = OTHER; note = Adenosine phosphorothiorate
  modified_base 38: mod_base = OTHER; note = Adenosine phosphorothiorate
  modified_base 41: mod_base = OTHER; note = 2'-Omethylcytosine
  modified_base 42: mod_base = OTHER; note = 2'-Omethyladenosine
  modified_base 43: mod_base = OTHER; note = 2'-Omethyladenosine
  modified_base 44: mod_base = OTHER; note = 2'-Omethyladenosine
  modified_base 49: mod_base = OTHER; note = 2'-Omethylcytosine
  modified_base 50: mod_base = OTHER; note = 2'-Omethylcytosine
  modified_base 51: mod_base = OTHER; note = 2'-Omethylguanosine
  modified_base 52: mod_base = OTHER; note = 2'-Omethylguanosine
  modified_base 53: mod_base = OTHER; note = 2'-Omethylguanosine
  modified_base 54: mod_base = OTHER; note = Uridine phosphorothiorate
  modified_base 55: mod_base = OTHER; note = Uridine phosphorothiorate
  modified_base 61: mod_base = OTHER; note = 2'-Omethylcytosine
  modified_base 65: mod_base = OTHER; note = 2'-Omethylguanosine
  modified_base 73: mod_base = OTHER; note = 2'-Omethylguanosine

SEQ ID NO: 1579-1581 - skipped (3 entries)

SEQ ID NO: 1582 - RNA, 75 nt, synthetic construct; identical to SEQ ID NO: 1045
  source 1..75: mol_type = other RNA
  modified_base 1: mod_base = OTHER; note = Guanosine phosphorothiorate

SEQ ID NO: 1583 - RNA, 75 nt, synthetic construct; identical to SEQ ID NO: 1045
  source 1..75: mol_type = other RNA
  modified_base 2: mod_base = OTHER; note = Guanosine phosphorothiorate

SEQ ID NO: 1584 - RNA, 75 nt, synthetic construct; identical to SEQ ID NO: 1045
  source 1..75: mol_type = other RNA
  modified_base 3: mod_base = OTHER; note = Uridine phosphorothiorate

SEQ ID NO: 1585 - RNA, 75 nt, synthetic construct; identical to SEQ ID NO: 1045
  source 1..75: mol_type = other RNA
  modified_base 4: mod_base = OTHER; note = Uridine phosphorothiorate

SEQ ID NO: 1586 - RNA, 75 nt, synthetic construct; identical to SEQ ID NO: 1045
  source 1..75: mol_type = other RNA
  modified_base 5: mod_base = OTHER; note = Cytosine phosphorothiorate

SEQ ID NO: 1587 - RNA, 75 nt, synthetic construct; identical to SEQ ID NO: 1045
  source 1..75: mol_type = other RNA
  modified_base 6: mod_base = OTHER; note = Cytosine phosphorothiorate

SEQ ID NO: 1588 - RNA, 75 nt, synthetic construct; identical to SEQ ID NO: 1045
  source 1..75: mol_type = other RNA
  modified_base 7: mod_base = OTHER; note = Adenosine phosphorothiorate

SEQ ID NO: 1589 - RNA, 75 nt, synthetic construct; identical to SEQ ID NO: 1045
  source 1..75: mol_type = other RNA
  modified_base 8: mod_base = OTHER; note = Uridine phosphorothiorate

SEQ ID NO: 1590 - RNA, 75 nt, synthetic construct; identical to SEQ ID NO: 1045
  source 1..75: mol_type = other RNA
  modified_base 9: mod_base = OTHER; note = Guanosine phosphorothiorate

SEQ ID NO: 1591 - RNA, 75 nt, synthetic construct; identical to SEQ ID NO: 1045
  source 1..75: mol_type = other RNA
  modified_base 10: mod_base = OTHER; note = Guanosine phosphorothiorate

SEQ ID NO: 1592 - RNA, 75 nt, synthetic construct; identical to SEQ ID NO: 1045
  source 1..75: mol_type = other RNA
  modified_base 11: mod_base = OTHER; note = Uridine phosphorothiorate

SEQ ID NO: 1593 - RNA, 75 nt, synthetic construct; identical to SEQ ID NO: 1045
  source 1..75: mol_type = other RNA
  modified_base 12: mod_base = OTHER; note = Guanosine phosphorothiorate

SEQ ID NO: 1594 - RNA, 75 nt, synthetic construct; identical to SEQ ID NO: 1045
  source 1..75: mol_type = other RNA
  modified_base 13: mod_base = OTHER; note = Uridine phosphorothiorate

SEQ ID NO: 1595 - RNA, 75 nt, synthetic construct; identical to SEQ ID NO: 1045
  source 1..75: mol_type = other RNA
  modified_base 14: mod_base = OTHER; note = Adenosine phosphorothiorate

SEQ ID NO: 1596 - RNA, 75 nt, synthetic construct; identical to SEQ ID NO: 1045
  source 1..75: mol_type = other RNA
  modified_base 15: mod_base = OTHER; note = Adenosine phosphorothiorate

SEQ ID NO: 1597 - RNA, 75 nt, synthetic construct; identical to SEQ ID NO: 1045
  source 1..75: mol_type = other RNA
  modified_base 16: mod_base = OTHER; note = Uridine phosphorothiorate

SEQ ID NO: 1598 - RNA, 75 nt, synthetic construct; identical to SEQ ID NO: 1045
  source 1..75: mol_type = other RNA
  modified_base 17: mod_base = OTHER; note = Guanosine phosphorothiorate

SEQ ID NO: 1599 - RNA, 75 nt, synthetic construct; identical to SEQ ID NO: 1045
  source 1..75: mol_type = other RNA
  modified_base 18: mod_base = OTHER; note = Guanosine phosphorothiorate

SEQ ID NO: 1600 - RNA, 75 nt, synthetic construct; identical to SEQ ID NO: 1045
  source 1..75: mol_type = other RNA
  modified_base 19: mod_base = OTHER; note = Uridine phosphorothiorate

SEQ ID NO: 1601 - RNA, 75 nt, synthetic construct; identical to SEQ ID NO: 1045
  source 1..75: mol_type = other RNA
  modified_base 20: mod_base = OTHER; note = Adenosine phosphorothiorate

SEQ ID NO: 1602 - RNA, 75 nt, synthetic construct; identical to SEQ ID NO: 1045
  source 1..75: mol_type = other RNA
  modified_base 21: mod_base = OTHER; note = Adenosine phosphorothiorate

SEQ ID NO: 1603 - RNA, 75 nt, synthetic construct; identical to SEQ ID NO: 1045
  source 1..75: mol_type = other RNA
  modified_base 22: mod_base = OTHER; note = Guanosine phosphorothiorate

SEQ ID NO: 1604 - RNA, 75 nt, synthetic construct; identical to SEQ ID NO: 1045
  source 1..75: mol_type = other RNA
  modified_base 23: mod_base = OTHER; note = Cytosine phosphorothiorate

SEQ ID NO: 1605 - RNA, 75 nt, synthetic construct; identical to SEQ ID NO: 1045
  source 1..75: mol_type = other RNA
  modified_base 24: mod_base = OTHER; note = Adenosine phosphorothiorate

SEQ ID NO: 1606 - RNA, 75 nt, synthetic construct; identical to SEQ ID NO: 1045
  source 1..75: mol_type = other RNA
  modified_base 25: mod_base = OTHER; note = Cytosine phosphorothiorate

SEQ ID NO: 1607 - RNA, 75 nt, synthetic construct; identical to SEQ ID NO: 1045
  source 1..75: mol_type = other RNA
  modified_base 26: mod_base = OTHER; note = Uridine phosphorothiorate

SEQ ID NO: 1608 - RNA, 75 nt, synthetic construct; identical to SEQ ID NO: 1045
  source 1..75: mol_type = other RNA
  modified_base 27: mod_base = OTHER; note = Cytosine phosphorothiorate

SEQ ID NO: 1609 - RNA, 75 nt, synthetic construct; identical to SEQ ID NO: 1045
  source 1..75: mol_type = other RNA
  modified_base 28: mod_base = OTHER; note = Uridine phosphorothiorate

SEQ ID NO: 1610 - RNA, 75 nt, synthetic construct; identical to SEQ ID NO: 1045
  source 1..75: mol_type = other RNA
  modified_base 29: mod_base = OTHER; note = Guanosine phosphorothiorate

SEQ ID NO: 1611 - RNA, 75 nt, synthetic construct; identical to SEQ ID NO: 1045
  source 1..75: mol_type = other RNA
  modified_base 30: mod_base = OTHER; note = Guanosine phosphorothiorate

SEQ ID NO: 1612 - RNA, 75 nt, synthetic construct; identical to SEQ ID NO: 1045
  source 1..75: mol_type = other RNA
  modified_base 31: mod_base = OTHER; note = Adenosine phosphorothiorate

SEQ ID NO: 1613 - RNA, 75 nt, synthetic construct; identical to SEQ ID NO: 1045
  source 1..75: mol_type = other RNA
  modified_base 32: mod_base = OTHER; note = Cytosine phosphorothiorate

SEQ ID NO: 1614 - RNA, 75 nt, synthetic construct; identical to SEQ ID NO: 1045
  source 1..75: mol_type = other RNA
  modified_base 33: mod_base = OTHER; note = Uridine phosphorothiorate

SEQ ID NO: 1615 - RNA, 75 nt, synthetic construct; identical to SEQ ID NO: 1045
  source 1..75: mol_type = other RNA
  modified_base 34: mod_base = OTHER; note = Uridine phosphorothiorate

SEQ ID NO: 1616 - RNA, 75 nt, synthetic construct; identical to SEQ ID NO: 1045
  source 1..75: mol_type = other RNA
  modified_base 35: mod_base = OTHER; note = Uridine phosphorothiorate

SEQ ID NO: 1617 - RNA, 75 nt, synthetic construct; identical to SEQ ID NO: 1045
  source 1..75: mol_type = other RNA
  modified_base 36: mod_base = OTHER; note = Adenosine phosphorothiorate

SEQ ID NO: 1618 - RNA, 75 nt, synthetic construct; identical to SEQ ID NO: 1045
  source 1..75: mol_type = other RNA
  modified_base 37: mod_base = OTHER; note = Adenosine phosphorothiorate

SEQ ID NO: 1619 - RNA, 75 nt, synthetic construct; identical to SEQ ID NO: 1045
  source 1..75: mol_type = other RNA
  modified_base 38: mod_base = OTHER; note = Adenosine phosphorothiorate

SEQ ID NO: 1620 - RNA, 75 nt, synthetic construct; identical to SEQ ID NO: 1045
  source 1..75: mol_type = other RNA
  modified_base 39: mod_base = OTHER; note = Uridine phosphorothiorate

SEQ ID NO: 1621 - RNA, 75 nt, synthetic construct; identical to SEQ ID NO: 1045
  source 1..75: mol_type = other RNA
  modified_base 40: mod_base = OTHER; note = Cytosine phosphorothiorate

SEQ ID NO: 1622 - RNA, 75 nt, synthetic construct; identical to SEQ ID NO: 1045
  source 1..75: mol_type = other RNA
  modified_base 41: mod_base = OTHER; note = Cytosine phosphorothiorate

SEQ ID NO: 1623 - RNA, 75 nt, synthetic construct; identical to SEQ ID NO: 1045
  source 1..75: mol_type = other RNA
  modified_base 42: mod_base = OTHER; note = Adenosine phosphorothiorate

SEQ ID NO: 1624 - RNA, 75 nt, synthetic construct; identical to SEQ ID NO: 1045
  source 1..75: mol_type = other RNA
  modified_base 43: mod_base = OTHER; note = Guanosine phosphorothiorate

SEQ ID NO: 1625 - RNA, 75 nt, synthetic construct; identical to SEQ ID NO: 1045
  source 1..75: mol_type = other RNA
  modified_base 44: mod_base = OTHER; note = Cytosine phosphorothiorate

SEQ ID NO: 1626 - RNA, 75 nt, synthetic construct; identical to SEQ ID NO: 1045
  source 1..75: mol_type = other RNA
  modified_base 45: mod_base = OTHER; note = Guanosine phosphorothiorate

SEQ ID NO: 1627 - RNA, 75 nt, synthetic construct; identical to SEQ ID NO: 1045
  source 1..75: mol_type = other RNA
  modified_base 46: mod_base = OTHER; note = Adenosine phosphorothiorate

SEQ ID NO: 1628 - RNA, 75 nt, synthetic construct; identical to SEQ ID NO: 1045
  source 1..75: mol_type = other RNA
  modified_base 47: mod_base = OTHER; note = Uridine phosphorothiorate

SEQ ID NO: 1629 - RNA, 75 nt, synthetic construct; identical to SEQ ID NO: 1045
  source 1..75: mol_type = other RNA
  modified_base 48: mod_base = OTHER; note = Cytosine phosphorothiorate

SEQ ID NO: 1630 - RNA, 75 nt, synthetic construct; identical to SEQ ID NO: 1045
  source 1..75: mol_type = other RNA
  modified_base 49: mod_base = OTHER; note = Cytosine phosphorothiorate

SEQ ID NO: 1631 - RNA, 75 nt, synthetic construct; identical to SEQ ID NO: 1045
  source 1..75: mol_type = other RNA
  modified_base 50: mod_base = OTHER; note = Guanosine phosphorothiorate

SEQ ID NO: 1632 - RNA, 75 nt, synthetic construct; identical to SEQ ID NO: 1045
  source 1..75: mol_type = other RNA
  modified_base 51: mod_base = OTHER; note = Adenosine phosphorothiorate

SEQ ID NO: 1633 - RNA, 75 nt, synthetic construct; identical to SEQ ID NO: 1045
  source 1..75: mol_type = other RNA
  modified_base 52: mod_base = OTHER; note = Guanosine phosphorothiorate

SEQ ID NO: 1634 - RNA, 75 nt, synthetic construct; identical to SEQ ID NO: 1045
  source 1..75: mol_type = other RNA
  modified_base 53: mod_base = OTHER; note = Uridine phosphorothiorate

SEQ ID NO: 1635 - RNA, 75 nt, synthetic construct; identical to SEQ ID NO: 1045
  source 1..75: mol_type = other RNA
  modified_base 54: mod_base = OTHER; note = Uridine phosphorothiorate

SEQ ID NO: 1636 - RNA, 75 nt, synthetic construct; identical to SEQ ID NO: 1045
  source 1..75: mol_type = other RNA
  modified_base 55: mod_base = OTHER; note = Cytosine phosphorothiorate

SEQ ID NO: 1637 - RNA, 75 nt, synthetic construct; identical to SEQ ID NO: 1045
  source 1..75: mol_type = other RNA
  modified_base 56: mod_base = OTHER; note = Guanosine phosphorothiorate

SEQ ID NO: 1638 - RNA, 75 nt, synthetic construct; identical to SEQ ID NO: 1045
  source 1..75: mol_type = other RNA
  modified_base 57: mod_base = OTHER; note = Adenosine phosphorothiorate

SEQ ID NO: 1639 - RNA, 75 nt, synthetic construct; identical to SEQ ID NO: 1045
  source 1..75: mol_type = other RNA
  modified_base 58: mod_base = OTHER; note = Guanosine phosphorothiorate

SEQ ID NO: 1640 - RNA, 75 nt, synthetic construct; identical to SEQ ID NO: 1045
  source 1..75: mol_type = other RNA
  modified_base 59: mod_base = OTHER; note = Uridine phosphorothiorate

SEQ ID NO: 1641 - RNA, 75 nt, synthetic construct; identical to SEQ ID NO: 1045
  source 1..75: mol_type = other RNA
  modified_base 60: mod_base = OTHER; note = Cytosine phosphorothiorate

SEQ ID NO: 1642 - RNA, 75 nt, synthetic construct; identical to SEQ ID NO: 1045
  source 1..75: mol_type = other RNA
  modified_base 61: mod_base = OTHER; note = Uridine phosphorothiorate

SEQ ID NO: 1643 - RNA, 75 nt, synthetic construct; identical to SEQ ID NO: 1045
  source 1..75: mol_type = other RNA
  modified_base 62: mod_base = OTHER; note = Cytosine phosphorothiorate

SEQ ID NO: 1644 - RNA, 75 nt, synthetic construct; identical to SEQ ID NO: 1045
  source 1..75: mol_type = other RNA
  modified_base 63: mod_base = OTHER; note = Guanosine phosphorothiorate

SEQ ID NO: 1645 - RNA, 75 nt, synthetic construct; identical to SEQ ID NO: 1045
  source 1..75: mol_type = other RNA
  modified_base 64: mod_base = OTHER; note = Guanosine phosphorothiorate

SEQ ID NO: 1646 - RNA, 75 nt, synthetic construct; identical to SEQ ID NO: 1045
  source 1..75: mol_type = other RNA
  modified_base 65: mod_base = OTHER; note = Uridine phosphorothiorate

SEQ ID NO: 1647 - RNA, 75 nt, synthetic construct; identical to SEQ ID NO: 1045
  source 1..75: mol_type = other RNA
  modified_base 66: mod_base = OTHER; note = Guanosine phosphorothiorate

SEQ ID NO: 1648 - RNA, 75 nt, synthetic construct; identical to SEQ ID NO: 1045
  source 1..75: mol_type = other RNA
  modified_base 67: mod_base = OTHER; note = Guanosine phosphorothiorate

SEQ ID NO: 1649 - RNA, 75 nt, synthetic construct; identical to SEQ ID NO: 1045
  source 1..75: mol_type = other RNA
  modified_base 68: mod_base = OTHER; note = Adenosine phosphorothiorate

SEQ ID NO: 1650 - RNA, 75 nt, synthetic construct; identical to SEQ ID NO: 1045
  source 1..75: mol_type = other RNA
  modified_base 69: mod_base = OTHER; note = Adenosine phosphorothiorate

SEQ ID NO: 1651 - RNA, 75 nt, synthetic construct; identical to SEQ ID NO: 1045
  source 1..75: mol_type = other RNA
  modified_base 70: mod_base = OTHER; note = Cytosine phosphorothiorate

SEQ ID NO: 1652 - RNA, 75 nt, synthetic construct; identical to SEQ ID NO: 1045
  source 1..75: mol_type = other RNA
  modified_base 71: mod_base = OTHER; note = Cytosine phosphorothiorate

SEQ ID NO: 1653 - RNA, 75 nt, synthetic construct; identical to SEQ ID NO: 1045
  source 1..75: mol_type = other RNA
  modified_base 72: mod_base = OTHER; note = Uridine phosphorothiorate

SEQ ID NO: 1654 - RNA, 75 nt, synthetic construct; identical to SEQ ID NO: 1045
  source 1..75: mol_type = other RNA
  modified_base 73: mod_base = OTHER; note = Cytosine phosphorothiorate

SEQ ID NO: 1655 - RNA, 75 nt, synthetic construct; identical to SEQ ID NO: 1045
  source 1..75: mol_type = other RNA
  modified_base 74: mod_base = OTHER; note = Cytosine phosphorothiorate

SEQ ID NO: 1656 - RNA, 75 nt, synthetic construct; identical to SEQ ID NO: 1045
  source 1..75: mol_type = other RNA
  modified_base 1: mod_base = OTHER; note = 2'-Omethylguanosine phosphorothiorate

SEQ ID NO: 1657 - RNA, 75 nt, synthetic construct; identical to SEQ ID NO: 1045
  source 1..75: mol_type = other RNA
  modified_base 1: mod_base = OTHER; note = 2'-Omethylguanosine
  modified_base 72: mod_base = OTHER; note = 2'-Omethyluridine

SEQ ID NO: 1658 - RNA, 75 nt, synthetic construct; identical to SEQ ID NO: 1045
  source 1..75: mol_type = other RNA
  modified_base 10: mod_base = OTHER; note = 2'-Omethylguanosine
  modified_base 11: mod_base = OTHER; note = 2'-Omethyluridine
  modified_base 12: mod_base = OTHER; note = 2'-Omethylguanosine
  modified_base 13: mod_base = OTHER; note = 2'-Omethyluridine
  modified_base 22: mod_base = OTHER; note = 2'-Omethylguanosine
  modified_base 23: mod_base = OTHER; note = 2'-Omethylcytosine
  modified_base 24: mod_base = OTHER; note = 2'-Omethyladenosine
  modified_base 25: mod_base = OTHER; note = 2'-Omethylcytosine

SEQ ID NO: 1659 - RNA, 75 nt, synthetic construct; identical to SEQ ID NO: 1045
  source 1..75: mol_type = other RNA
  modified_base 10: mod_base = OTHER; note = 2'-Omethylguanosine
  modified_base 11: mod_base = OTHER; note = 2'-Omethyluridine
  modified_base 12: mod_base = OTHER; note = 2'-Omethylguanosine
  modified_base 13: mod_base = OTHER; note = 2'-Omethyluridine

SEQ ID NO: 1660 - RNA, 75 nt, synthetic construct; identical to SEQ ID NO: 1045
  source 1..75: mol_type = other RNA
  modified_base 22: mod_base = OTHER; note = 2'-Omethylguanosine
  modified_base 23: mod_base = OTHER; note = 2'-Omethylcytosine
  modified_base 24: mod_base = OTHER; note = 2'-Omethyladenosine
  modified_base 25: mod_base = OTHER; note = 2'-Omethylcytosine

SEQ ID NO: 1661 - RNA, 75 nt, synthetic construct; identical to SEQ ID NO: 1045
  source 1..75: mol_type = other RNA
  modified_base 48: mod_base = OTHER; note = 2'-Omethylcytosine
  modified_base 49: mod_base = OTHER; note = 2'-Omethylcytosine
  modified_base 50: mod_base = OTHER; note = 2'-Omethylguanosine
  modified_base 51: mod_base = OTHER; note = 2'-Omethyladenosine
  modified_base 52: mod_base = OTHER; note = 2'-Omethylguanosine

SEQ ID NO: 1662 - RNA, 85 nt, synthetic construct; identical to SEQ ID NO: 1132
  source 1..85: mol_type = other RNA
  modified_base 10: mod_base = OTHER; note = 2'-Omethylguanosine
  modified_base 11: mod_base = OTHER; note = 2'-Omethylcytosine
  modified_base 12: mod_base = OTHER; note = 2'-Omethylcytosine
  modified_base 23: mod_base = OTHER; note = 2'-Omethylguanosine
  modified_base 24: mod_base = OTHER; note = 2'-Omethylguanosine
  modified_base 25: mod_base = OTHER; note = 2'-Omethylcytosine

SEQ ID NO: 1663 - RNA, 85 nt, synthetic construct; identical to SEQ ID NO: 1132
  source 1..85: mol_type = other RNA
  modified_base 10: mod_base = OTHER; note = 2'-Omethylguanosine
  modified_base 11: mod_base = OTHER; note = 2'-Omethylcytosine
  modified_base 12: mod_base = OTHER; note = 2'-Omethylcytosine

SEQ ID NO: 1664 - RNA, 85 nt, synthetic construct; identical to SEQ ID NO: 1132
  source 1..85: mol_type = other RNA
  modified_base 23: mod_base = OTHER; note = 2'-Omethylguanosine
  modified_base 24: mod_base = OTHER; note = 2'-Omethylguanosine
  modified_base 25: mod_base = OTHER; note = 2'-Omethylcytosine

SEQ ID NO: 1665 - skipped

SEQ ID NO: 1666 - RNA, 85 nt, synthetic construct; identical to SEQ ID NO: 1132
  source 1..85: mol_type = other RNA
  modified_base 58: mod_base = OTHER; note = 2'-Omethylguanosine
  modified_base 59: mod_base = OTHER; note = 2'-Omethyluridine
  modified_base 60: mod_base = OTHER; note = 2'-Omethylguanosine
  modified_base 61: mod_base = OTHER; note = 2'-Omethylguanosine
  modified_base 62: mod_base = OTHER; note = 2'-Omethylguanosine

SEQ ID NO: 1667 - RNA, 75 nt, synthetic construct; identical to SEQ ID NO: 1045
  source 1..75: mol_type = other RNA
  modified_base 1: mod_base = OTHER; note = 2'-fluoroguanosine

SEQ ID NO: 1668 - RNA, 75 nt, synthetic construct; identical to SEQ ID NO: 1045
  source 1..75: mol_type = other RNA
  modified_base 2: mod_base = OTHER; note = 2'-fluoroguanosine

SEQ ID NO: 1669 - RNA, 75 nt, synthetic construct; identical to SEQ ID NO: 1045
  source 1..75: mol_type = other RNA
  modified_base 3: mod_base = OTHER; note = 2'-fluorouridine

SEQ ID NO: 1670 - RNA, 75 nt, synthetic construct; identical to SEQ ID NO: 1045
  source 1..75: mol_type = other RNA
  modified_base 4: mod_base = OTHER; note = 2'-fluorouridine

SEQ ID NO: 1671 - RNA, 75 nt, synthetic construct; identical to SEQ ID NO: 1045
  source 1..75: mol_type = other RNA
  modified_base 5: mod_base = OTHER; note = 2'-fluorocytosine

SEQ ID NO: 1672 - RNA, 75 nt, synthetic construct; identical to SEQ ID NO: 1045
  source 1..75: mol_type = other RNA
  modified_base 6: mod_base = OTHER; note = 2'-fluorocytosine

SEQ ID NO: 1673 - RNA, 75 nt, synthetic construct; identical to SEQ ID NO: 1045
  source 1..75: mol_type = other RNA
  modified_base 7: mod_base = OTHER; note = 2'-fluoroadenosine

SEQ ID NO: 1674 - RNA, 75 nt, synthetic construct; identical to SEQ ID NO: 1045
  source 1..75: mol_type = other RNA
  modified_base 8: mod_base = OTHER; note = 2'-fluorouridine

SEQ ID NO: 1675 - RNA, 75 nt, synthetic construct; identical to SEQ ID NO: 1045
  source 1..75: mol_type = other RNA
  modified_base 9: mod_base = OTHER; note = 2'-fluoroguanosine

SEQ ID NO: 1676 - RNA, 75 nt, synthetic construct; identical to SEQ ID NO: 1045
  source 1..75: mol_type = other RNA
  modified_base 10: mod_base = OTHER; note = 2'-fluoroguanosine

SEQ ID NO: 1677 - RNA, 75 nt, synthetic construct; identical to SEQ ID NO: 1045
  source 1..75: mol_type = other RNA
  modified_base 11: mod_base = OTHER; note = 2'-fluorouridine

SEQ ID NO: 1678 - RNA, 75 nt, synthetic construct; identical to SEQ ID NO: 1045
  source 1..75: mol_type = other RNA
  modified_base 12: mod_base = OTHER; note = 2'-fluoroguanosine

SEQ ID NO: 1679 - RNA, 75 nt, synthetic construct; identical to SEQ ID NO: 1045
  source 1..75: mol_type = other RNA
  modified_base 13: mod_base = OTHER; note = 2'-fluorouridine

SEQ ID NO: 1680 - RNA, 75 nt, synthetic construct; identical to SEQ ID NO: 1045
  source 1..75: mol_type = other RNA
  modified_base 14: mod_base = OTHER; note = 2'-fluoroadenosine

SEQ ID NO: 1681 - RNA, 75 nt, synthetic construct; identical to SEQ ID NO: 1045
  source 1..75: mol_type = other RNA
  modified_base 15: mod_base = OTHER; note = 2'-fluoroadenosine

SEQ ID NO: 1682 - RNA, 75 nt, synthetic construct; identical to SEQ ID NO: 1045
  source 1..75: mol_type = other RNA
  modified_base 16: mod_base = OTHER; note = 2'-fluorouridine

SEQ ID NO: 1683 - RNA, 75 nt, synthetic construct; identical to SEQ ID NO: 1045
  source 1..75: mol_type = other RNA
  modified_base 17: mod_base = OTHER; note = 2'-fluoroguanosine

SEQ ID NO: 1684 - RNA, 75 nt, synthetic construct; identical to SEQ ID NO: 1045
  source 1..75: mol_type = other RNA
  modified_base 18: mod_base = OTHER; note = 2'-fluoroguanosine

SEQ ID NO: 1685 - RNA, 75 nt, synthetic construct; identical to SEQ ID NO: 1045
  source 1..75: mol_type = other RNA
  modified_base 19: mod_base = OTHER; note = 2'-fluorouridine

SEQ ID NO: 1686 - RNA, 75 nt, synthetic construct; identical to SEQ ID NO: 1045
  source 1..75: mol_type = other RNA
  modified_base 20: mod_base = OTHER; note = 2'-fluoroadenosine

SEQ ID NO: 1687 - RNA, 75 nt, synthetic construct; identical to SEQ ID NO: 1045
  source 1..75: mol_type = other RNA
  modified_base 21: mod_base = OTHER; note = 2'-fluoroadenosine

SEQ ID NO: 1688 - RNA, 75 nt, synthetic construct; identical to SEQ ID NO: 1045
  source 1..75: mol_type = other RNA
  modified_base 22: mod_base = OTHER; note = 2'-fluoroguanosine

SEQ ID NO: 1689 - RNA, 75 nt, synthetic construct; identical to SEQ ID NO: 1045
  source 1..75: mol_type = other RNA
  modified_base 23: mod_base = OTHER; note = 2'-fluorocytosine

SEQ ID NO: 1690 - RNA, 75 nt, synthetic construct; identical to SEQ ID NO: 1045
  source 1..75: mol_type = other RNA
  modified_base 24: mod_base = OTHER; note = 2'-fluoroadenosine

SEQ ID NO: 1691 - RNA, 75 nt, synthetic construct; identical to SEQ ID NO: 1045
  source 1..75: mol_type = other RNA
  modified_base 25: mod_base = OTHER; note = 2'-fluorocytosine

SEQ ID NO: 1692 - RNA, 75 nt, synthetic construct; identical to SEQ ID NO: 1045
  source 1..75: mol_type = other RNA
  modified_base 26: mod_base = OTHER; note = 2'-fluorouridine

SEQ ID NO: 1693 - RNA, 75 nt, synthetic construct; identical to SEQ ID NO: 1045
  source 1..75: mol_type = other RNA
  modified_base 27: mod_base = OTHER; note = 2'-fluorocytosine

SEQ ID NO: 1694 - RNA, 75 nt, synthetic construct; identical to SEQ ID NO: 1045
  source 1..75: mol_type = other RNA
  modified_base 28: mod_base = OTHER; note = 2'-fluorouridine

SEQ ID NO: 1695 - RNA, 75 nt, synthetic construct; identical to SEQ ID NO: 1045
  source 1..75: mol_type = other RNA
  modified_base 29: mod_base = OTHER; note = 2'-fluoroguanosine

SEQ ID NO: 1696 - RNA, 75 nt, synthetic construct; identical to SEQ ID NO: 1045
  source 1..75: mol_type = other RNA
  modified_base 30: mod_base = OTHER; note = 2'-fluoroguanosine

SEQ ID NO: 1697 - RNA, 75 nt, synthetic construct; identical to SEQ ID NO: 1045
  source 1..75: mol_type = other RNA
  modified_base 31: mod_base = OTHER; note = 2'-fluoroadenosine

SEQ ID NO: 1698 - RNA, 75 nt, synthetic construct; identical to SEQ ID NO: 1045
  source 1..75: mol_type = other RNA
  modified_base 32: mod_base = OTHER; note = 2'-fluorocytosine

SEQ ID NO: 1699 - RNA, 75 nt, synthetic construct; identical to SEQ ID NO: 1045
  source 1..75: mol_type = other RNA
  modified_base 34: mod_base = OTHER; note = 2'-fluorouridine

SEQ ID NO: 1700 - RNA, 75 nt, synthetic construct; identical to SEQ ID NO: 1045
  source 1..75: mol_type = other RNA
  modified_base 35: mod_base = OTHER; note = 2'-fluorouridine

SEQ ID NO: 1701 - RNA, 75 nt, synthetic construct; identical to SEQ ID NO: 1045
  source 1..75: mol_type = other RNA
  modified_base 36: mod_base = OTHER; note = 2'-fluoroadenosine

SEQ ID NO: 1702 - RNA, 75 nt, synthetic construct; identical to SEQ ID NO: 1045
  source 1..75: mol_type = other RNA
  modified_base 37: mod_base = OTHER; note = 2'-fluoroadenosine

SEQ ID NO: 1703 - RNA, 75 nt, synthetic construct; identical to SEQ ID NO: 1045
  source 1..75: mol_type = other RNA
  modified_base 38: mod_base = OTHER; note = 2'-fluoroadenosine

SEQ ID NO: 1704 - RNA, 75 nt, synthetic construct; identical to SEQ ID NO: 1045
  source 1..75: mol_type = other RNA
  modified_base 39: mod_base = OTHER; note = 2'-fluorouridine

SEQ ID NO: 1705 - RNA, 75 nt, synthetic construct; identical to SEQ ID NO: 1045
  source 1..75: mol_type = other RNA
  modified_base 40: mod_base = OTHER; note = 2'-fluorocytosine

SEQ ID NO: 1706 - RNA, 75 nt, synthetic construct; identical to SEQ ID NO: 1045
  source 1..75: mol_type = other RNA
  modified_base 41: mod_base = OTHER; note = 2'-fluorocytosine

SEQ ID NO: 1707 - RNA, 75 nt, synthetic construct; identical to SEQ ID NO: 1045
  source 1..75: mol_type = other RNA
  modified_base 42: mod_base = OTHER; note = 2'-fluoroadenosine

SEQ ID NO: 1708 - RNA, 75 nt, synthetic construct; identical to SEQ ID NO: 1045
  source 1..75: mol_type = other RNA
  modified_base 43: mod_base = OTHER; note = 2'-fluoroguanosine

SEQ ID NO: 1709 - RNA, 75 nt, synthetic construct; identical to SEQ ID NO: 1045
  source 1..75: mol_type = other RNA
  modified_base 44: mod_base = OTHER; note = 2'-fluorocytosine

SEQ ID NO: 1710 - RNA, 75 nt, synthetic construct; identical to SEQ ID NO: 1045
  source 1..75: mol_type = other RNA
  modified_base 45: mod_base = OTHER; note = 2'-fluoroguanosine

SEQ ID NO: 1711 - RNA, 75 nt, synthetic construct; identical to SEQ ID NO: 1045
  source 1..75: mol_type = other RNA
  modified_base 46: mod_base = OTHER; note = 2'-fluoroadenosine

SEQ ID NO: 1712 - RNA, 75 nt, synthetic construct; identical to SEQ ID NO: 1045
  source 1..75: mol_type = other RNA
  modified_base 47: mod_base = OTHER; note = 2'-fluorouridine

SEQ ID NO: 1713 - RNA, 75 nt, synthetic construct; identical to SEQ ID NO: 1045
  source 1..75: mol_type = other RNA
  modified_base 48: mod_base = OTHER; note = 2'-fluorocytosine

SEQ ID NO: 1714 - RNA, 75 nt, synthetic construct; identical to SEQ ID NO: 1045
  source 1..75: mol_type = other RNA
  modified_base 49: mod_base = OTHER; note = 2'-fluorocytosine

SEQ ID NO: 1715 - RNA, 75 nt, synthetic construct; identical to SEQ ID NO: 1045
  source 1..75: mol_type = other RNA
  modified_base 50: mod_base = OTHER; note = 2'-fluoroguanosine

SEQ ID NO: 1716 - RNA, 75 nt, synthetic construct; identical to SEQ ID NO: 1045
  source 1..75: mol_type = other RNA
  modified_base 51: mod_base = OTHER; note = 2'-fluoroadenosine

SEQ ID NO: 1717 - RNA, 75 nt, synthetic construct; identical to SEQ ID NO: 1045
  source 1..75: mol_type = other RNA
  modified_base 52: mod_base = OTHER; note = 2'-fluoroguanosine

SEQ ID NO: 1718 - RNA, 75 nt, synthetic construct; identical to SEQ ID NO: 1045
  source 1..75: mol_type = other RNA
  modified_base 53: mod_base = OTHER; note = 2'-fluorouridine

SEQ ID NO: 1719 - RNA, 75 nt, synthetic construct; identical to SEQ ID NO: 1045
  source 1..75: mol_type = other RNA
  modified_base 54: mod_base = OTHER; note = 2'-fluorouridine

SEQ ID NO: 1720 - RNA, 75 nt, synthetic construct; identical to SEQ ID NO: 1045
  source 1..75: mol_type = other RNA
  modified_base 55: mod_base = OTHER; note = 2'-fluorocytosine

SEQ ID NO: 1721 - RNA, 75 nt, synthetic construct; identical to SEQ ID NO: 1045
  source 1..75: mol_type = other RNA
  modified_base 56: mod_base = OTHER; note = 2'-fluoroguanosine

SEQ ID NO: 1722 - RNA, 75 nt, synthetic construct; identical to SEQ ID NO: 1045
  source 1..75: mol_type = other RNA
  modified_base 57: mod_base = OTHER; note = 2'-fluoroadenosine

SEQ ID NO: 1723 - RNA, 75 nt, synthetic construct; identical to SEQ ID NO: 1045
  source 1..75: mol_type = other RNA
  modified_base 58: mod_base = OTHER; note = 2'-fluoroguanosine

SEQ ID NO: 1724 - RNA, 75 nt, synthetic construct; identical to SEQ ID NO: 1045
  source 1..75: mol_type = other RNA
  modified_base 59: mod_base = OTHER; note = 2'-fluorouridine

SEQ ID NO: 1725 - RNA, 75 nt, synthetic construct; identical to SEQ ID NO: 1045
  source 1..75: mol_type = other RNA
  modified_base 60: mod_base = OTHER; note = 2'-fluorocytosine

SEQ ID NO: 1726 - RNA, 75 nt, synthetic construct; identical to SEQ ID NO: 1045
  source 1..75: mol_type = other RNA
  modified_base 61: mod_base = OTHER; note = 2'-fluorouridine

SEQ ID NO: 1727 - RNA, 75 nt, synthetic construct; identical to SEQ ID NO: 1045
  source 1..75: mol_type = other RNA
  modified_base 62: mod_base = OTHER; note = 2'-fluorocytosine

SEQ ID NO: 1728 - RNA, 75 nt, synthetic construct; identical to SEQ ID NO: 1045
  source 1..75: mol_type = other RNA
  modified_base 63: mod_base = OTHER; note = 2'-fluoroguanosine

SEQ ID NO: 1729 - RNA, 75 nt, synthetic construct; identical to SEQ ID NO: 1045
  source 1..75: mol_type = other RNA
  modified_base 64: mod_base = OTHER; note = 2'-fluoroguanosine

SEQ ID NO: 1730 - RNA, 75 nt, synthetic construct; identical to SEQ ID NO: 1045
  source 1..75: mol_type = other RNA
  modified_base 65: mod_base = OTHER; note = 2'-fluorouridine

SEQ ID NO: 1731 - RNA, 75 nt, synthetic construct; identical to SEQ ID NO: 1045
  source 1..75: mol_type = other RNA
  modified_base 66: mod_base = OTHER; note = 2'-fluoroguanosine

SEQ ID NO: 1732 - RNA, 75 nt, synthetic construct; identical to SEQ ID NO: 1045
  source 1..75: mol_type = other RNA
  modified_base 67: mod_base = OTHER; note = 2'-fluoroguanosine

SEQ ID NO: 1733 - RNA, 75 nt, synthetic construct; identical to SEQ ID NO: 1045
  source 1..75: mol_type = other RNA
  modified_base 68: mod_base = OTHER; note = 2'-fluoroadenosine

SEQ ID NO: 1734 - RNA, 75 nt, synthetic construct; identical to SEQ ID NO: 1045
  source 1..75: mol_type = other RNA
  modified_base 69: mod_base = OTHER; note = 2'-fluoroadenosine

SEQ ID NO: 1735 - RNA, 75 nt, synthetic construct; identical to SEQ ID NO: 1045
  source 1..75: mol_type = other RNA
  modified_base 70: mod_base = OTHER; note = 2'-fluorocytosine

SEQ ID NO: 1736 - RNA, 75 nt, synthetic construct; identical to SEQ ID NO: 1045
  source 1..75: mol_type = other RNA
  modified_base 71: mod_base = OTHER; note = 2'-fluorocytosine

SEQ ID NO: 1737 - RNA, 75 nt, synthetic construct; identical to SEQ ID NO: 1045
  source 1..75: mol_type = other RNA
  modified_base 73: mod_base = OTHER; note = 2'-fluorocytosine

SEQ ID NO: 1738 - RNA, 75 nt, synthetic construct; identical to SEQ ID NO: 1045
  source 1..75: mol_type = other RNA
  modified_base 74: mod_base = OTHER; note = 2'-fluorocytosine

SEQ ID NO: 1739 - RNA, 75 nt, synthetic construct; identical to SEQ ID NO: 1045
  source 1..75: mol_type = other RNA
  modified_base 75: mod_base = OTHER; note = 2'-fluoroadenosine

SEQ ID NO: 1740 - RNA, 75 nt, synthetic construct; identical to SEQ ID NO: 1045
  source 1..75: mol_type = other RNA
  modified_base 1: mod_base = OTHER; note = 2'-Omethylguanosine
  modified_base 17: mod_base = OTHER; note = 2'-Omethylguanosine
  modified_base 18: mod_base = OTHER; note = 2'-Omethylguanosine
  modified_base 49: mod_base = OTHER; note = 2'-Omethylcytosine
  modified_base 51: mod_base = OTHER; note = 2'-Omethyladenosine
  modified_base 72: mod_base = OTHER; note = 2'-Omethyluridine

SEQ ID NO: 1741 - RNA, 75 nt, synthetic construct; identical to SEQ ID NO: 1045
  source 1..75: mol_type = other RNA
  modified_base 1: mod_base = OTHER; note = 2'-Omethylguanosine phosphorothiorate
  modified_base 17: mod_base = OTHER; note = 2'-Omethylguanosine
  modified_base 18: mod_base = OTHER; note = 2'-Omethylguanosine
  modified_base 49: mod_base = OTHER; note = 2'-Omethylcytosine
  modified_base 51: mod_base = OTHER; note = 2'-Omethyladenosine
  modified_base 72: mod_base = OTHER; note = 2'-Omethyluridine

SEQ ID NO: 1742 - RNA, 75 nt, synthetic construct; identical to SEQ ID NO: 1045
  source 1..75: mol_type = other RNA
  modified_base 1: mod_base = OTHER; note = 2'-Omethylguanosine
  modified_base 2: mod_base = OTHER; note = 2'-Omethylguanosine
  modified_base 3: mod_base = OTHER; note = 2'-Omethyluridine
  modified_base 17: mod_base = OTHER; note = 2'-Omethylguanosine
  modified_base 18: mod_base = OTHER; note = 2'-Omethylguanosine
  modified_base 49: mod_base = OTHER; note = 2'-Omethylcytosine
  modified_base 51: mod_base = OTHER; note = 2'-Omethyladenosine
  modified_base 72: mod_base = OTHER; note = 2'-Omethyluridine

SEQ ID NO: 1743 - RNA, 75 nt, synthetic construct; identical to SEQ ID NO: 1045
  source 1..75: mol_type = other RNA
  modified_base 1: mod_base = OTHER; note = 2'-Omethylguanosine phosphorothiorate
  modified_base 2: mod_base = OTHER; note = 2'-Omethylguanosine phosphorothiorate
  modified_base 3: mod_base = OTHER; note = 2'-Omethyluridine
  modified_base 17: mod_base = OTHER; note = 2'-Omethylguanosine
  modified_base 18: mod_base = OTHER; note = 2'-Omethylguanosine
  modified_base 49: mod_base = OTHER; note = 2'-Omethylcytosine
  modified_base 51: mod_base = OTHER; note = 2'-Omethyladenosine
  modified_base 72: mod_base = OTHER; note = 2'-Omethyluridine

SEQ ID NO: 1744 - RNA, 75 nt, synthetic construct; identical to SEQ ID NO: 1045
  source 1..75: mol_type = other RNA
  modified_base 1: mod_base = OTHER; note = 2'-Omethylguanosine
  modified_base 2: mod_base = OTHER; note = 2'-Omethylguanosine
  modified_base 3: mod_base = OTHER; note = 2'-Omethyluridine
  modified_base 4: mod_base = OTHER; note = 2'-Omethyluridine
  modified_base 17: mod_base = OTHER; note = 2'-Omethylguanosine
  modified_base 18: mod_base = OTHER; note = 2'-Omethylguanosine
  modified_base 49: mod_base = OTHER; note = 2'-Omethylcytosine
  modified_base 51: mod_base = OTHER; note = 2'-Omethyladenosine
  modified_base 72: mod_base = OTHER; note = 2'-Omethyluridine

SEQ ID NO: 1745 - RNA, 75 nt, synthetic construct; identical to SEQ ID NO: 1045
  source 1..75: mol_type = other RNA
  modified_base 1: mod_base = OTHER; note = 2'-Omethylguanosine
  modified_base 2: mod_base = OTHER; note = 2'-Omethylguanosine
  modified_base 3: mod_base = OTHER; note = 2'-Omethyluridine
  modified_base 4: mod_base = OTHER; note = 2'-Omethyluridine
  modified_base 13: mod_base = OTHER; note = 2'-Omethyluridine
  modified_base 17: mod_base = OTHER; note = 2'-Omethylguanosine
  modified_base 18: mod_base = OTHER; note = 2'-Omethylguanosine
  modified_base 49: mod_base = OTHER; note = 2'-Omethylcytosine
  modified_base 51: mod_base = OTHER; note = 2'-Omethyladenosine
  modified_base 72: mod_base = OTHER; note = 2'-Omethyluridine

SEQ ID NO: 1746 - RNA, 75 nt, synthetic construct; identical to SEQ ID NO: 1045
  source 1..75: mol_type = other RNA
  modified_base 1: mod_base = OTHER; note = 2'-Omethylguanosine
  modified_base 2: mod_base = OTHER; note = 2'-Omethylguanosine
  modified_base 3: mod_base = OTHER; note = 2'-Omethyluridine
  modified_base 4: mod_base = OTHER; note = 2'-Omethyluridine
  modified_base 13: mod_base = OTHER; note = 2'-Omethyluridine
  modified_base 17: mod_base = OTHER; note = 2'-Omethylguanosine
  modified_base 18: mod_base = OTHER; note = 2'-Omethylguanosine
  modified_base 49: mod_base = OTHER; note = 2'-Omethylcytosine
  modified_base 51: mod_base = OTHER; note = 2'-Omethyladenosine
  modified_base 64: mod_base = OTHER; note = 2'-Omethylguanosine
  modified_base 72: mod_base = OTHER; note = 2'-Omethyluridine

SEQ ID NO: 1747 - RNA, 85 nt, synthetic construct; identical to SEQ ID NO: 1132
  source 1..85: mol_type = other RNA
  modified_base 1: mod_base = OTHER; note = 2'-Omethylguanosine
  modified_base 2: mod_base = OTHER; note = 2'-Omethyladenosine
  modified_base 3: mod_base = OTHER; note = 2'-Omethylcytosine
  modified_base 17: mod_base = OTHER; note = 2'-Omethylguanosine
  modified_base 18: mod_base = OTHER; note = 2'-Omethylguanosine
  modified_base 59: mod_base = OTHER; note = 2'-Omethyluridine
  modified_base 61: mod_base = OTHER; note = 2'-Omethylguanosine
  modified_base 82: mod_base = OTHER; note = 2'-Omethylguanosine

SEQ ID NO: 1748 - RNA, 85 nt, synthetic construct; identical to SEQ ID NO: 1132
  source 1..85: mol_type = other RNA
  modified_base 1: mod_base = OTHER; note = 2'-Omethylguanosine phosphorothiorate
  modified_base 2: mod_base = OTHER; note = 2'-Omethyladenosine phosphorothiorate
  modified_base 3: mod_base = OTHER; note = 2'-Omethylcytosine
  modified_base 17: mod_base = OTHER; note = 2'-Omethylguanosine
  modified_base 18: mod_base = OTHER; note = 2'-Omethylguanosine
  modified_base 59: mod_base = OTHER; note = 2'-Omethyluridine
  modified_base 61: mod_base = OTHER; note = 2'-Omethylguanosine
  modified_base 82: mod_base = OTHER; note = 2'-Omethylguanosine

SEQ ID NO: 1749 - RNA, 85 nt, synthetic construct; identical to SEQ ID NO: 1132
  source 1..85: mol_type = other RNA
  modified_base 1: mod_base = OTHER; note = 2'-Omethylguanosine
  modified_base 2: mod_base = OTHER; note = 2'-Omethyladenosine
  modified_base 3: mod_base = OTHER; note = 2'-Omethylcytosine
  modified_base 4: mod_base = OTHER; note = 2'-Omethylguanosine
  modified_base 17: mod_base = OTHER; note = 2'-Omethylguanosine
  modified_base 18: mod_base = OTHER; note = 2'-Omethylguanosine
  modified_base 59: mod_base = OTHER; note = 2'-Omethyluridine
  modified_base 61: mod_base = OTHER; note = 2'-Omethylguanosine
  modified_base 82: mod_base = OTHER; note = 2'-Omethylguanosine

SEQ ID NO: 1750 - RNA, 85 nt, synthetic construct; identical to SEQ ID NO: 1132
  source 1..85: mol_type = other RNA
  modified_base 1: mod_base = OTHER; note = 2'-Omethylguanosine
  modified_base 2: mod_base = OTHER; note = 2'-Omethyladenosine
  modified_base 3: mod_base = OTHER; note = 2'-Omethylcytosine
  modified_base 4: mod_base = OTHER; note = 2'-Omethylguanosine
  modified_base 13: mod_base = OTHER; note = 2'-Omethylguanosine
  modified_base 17: mod_base = OTHER; note = 2'-Omethylguanosine
  modified_base 18: mod_base = OTHER; note = 2'-Omethylguanosine
  modified_base 59: mod_base = OTHER; note = 2'-Omethyluridine
  modified_base 61: mod_base = OTHER; note = 2'-Omethylguanosine
  modified_base 82: mod_base = OTHER; note = 2'-Omethylguanosine

SEQ ID NO: 1751 - RNA, 85 nt, synthetic construct; identical to SEQ ID NO: 1132
  source 1..85: mol_type = other RNA
  modified_base 1: mod_base = OTHER; note = 2'-Omethylguanosine
  modified_base 2: mod_base = OTHER; note = 2'-Omethyladenosine
  modified_base 3: mod_base = OTHER; note = 2'-Omethylcytosine
  modified_base 4: mod_base = OTHER; note = 2'-Omethylguanosine
  modified_base 13: mod_base = OTHER; note = 2'-Omethylguanosine
  modified_base 17: mod_base = OTHER; note = 2'-Omethylguanosine
  modified_base 18: mod_base = OTHER; note = 2'-Omethylguanosine
  modified_base 59: mod_base = OTHER; note = 2'-Omethyluridine
  modified_base 61: mod_base = OTHER; note = 2'-Omethylguanosine
  modified_base 75: mod_base = OTHER; note = 2'-Omethylcytosine
  modified_base 82: mod_base = OTHER; note = 2'-Omethylguanosine

SEQ ID NO: 1752 - RNA, 75 nt, synthetic construct; identical to SEQ ID NO: 765
  source 1..75: mol_type = other RNA
  modified_base 1: mod_base = OTHER; note = 2'-Omethylguanosine
  modified_base 17: mod_base = OTHER; note = 2'-Omethylguanosine
  modified_base 18: mod_base = OTHER; note = 2'-Omethylguanosine
  modified_base 50: mod_base = OTHER; note = 2'-Omethylcytosine
  modified_base 52: mod_base = OTHER; note = 2'-Omethylguanosine
  modified_base 73: mod_base = OTHER; note = 2'-Omethylguanosine

SEQ ID NO: 1753 - RNA, 74 nt, synthetic construct; identical to SEQ ID NO: 766
  source 1..74: mol_type = other RNA
  modified_base 1: mod_base = OTHER; note = 2'-Omethylguanosine
  modified_base 17: mod_base = OTHER; note = 2'-Omethylguanosine
  modified_base 18: mod_base = OTHER; note = 2'-Omethylguanosine
  modified_base 50: mod_base = OTHER; note = 2'-Omethylcytosine
  modified_base 52: mod_base = OTHER; note = 2'-Omethylguanosine
  modified_base 73: mod_base = OTHER; note = 2'-Omethylguanosine

SEQ ID NO: 1754 - RNA, 73 nt, synthetic construct; identical to SEQ ID NO: 935
  source 1..73: mol_type = other RNA
  modified_base 1: mod_base = OTHER; note = 2'-Omethylguanosine
  modified_base 17: mod_base = OTHER; note = 2'-Omethylguanosine
  modified_base 18: mod_base = OTHER; note = 2'-Omethylguanosine
  modified_base 50: mod_base = OTHER; note = 2'-Omethylcytosine
  modified_base 52: mod_base = OTHER; note = 2'-Omethylguanosine
  modified_base 73: mod_base = OTHER; note = 2'-Omethylguanosine

SEQ ID NO: 1755 - RNA, 73 nt, synthetic construct; identical to SEQ ID NO: 935
  source 1..73: mol_type = other RNA
  modified_base 1: mod_base = OTHER; note = 2'-Omethylguanosine
  modified_base 17: mod_base = OTHER; note = 2'-Omethylguanosine
  modified_base 18: mod_base = OTHER; note = 2'-Omethylguanosine
  modified_base 50: mod_base = OTHER; note = 2'-Omethylcytosine
  modified_base 52: mod_base = OTHER; note = 2'-Omethylguanosine

SEQ ID NO: 1756-1775 - skipped (20 entries)

SEQ ID NO: 1776 - RNA, 76 nt, synthetic construct; identical to SEQ ID NO: 625
  source 1..76: mol_type = other RNA
  modified_base 1: mod_base = OTHER; note = 2'-Omethylguanosine
  modified_base 2: mod_base = OTHER; note = 2'-Omethylguanosine
  modified_base 3: mod_base = OTHER; note = 2'-Omethylcytosine
  modified_base 4: mod_base = OTHER; note = 2'-Omethyluridine
  modified_base 5: mod_base = OTHER; note = 2'-Omethylcytosine
  modified_base 6: mod_base = OTHER; note = 2'-Omethylcytosine
  modified_base 13: mod_base = OTHER; note = 2'-Omethylcytosine
  modified_base 17: mod_base = OTHER; note = 2'-Omethylguanosine
  modified_base 18: mod_base = OTHER; note = 2'-Omethylguanosine
  modified_base 25: mod_base = OTHER; note = 2'-Omethylcytosine
  modified_base 33: mod_base = OTHER; note = 2'-fluorouridine
  modified_base 34: mod_base = OTHER; note = 2'-Omethyluridine
  modified_base 35: mod_base = OTHER; note = Cytosine phosphorothiorate
  modified_base 37: mod_base = OTHER; note = Adenosine phosphorothiorate
  modified_base 38: mod_base = OTHER; note = Adenosine phosphorothiorate
  modified_base 41: mod_base = OTHER; note = 2'-fluorocytosine
  modified_base 42: mod_base = OTHER; note = 2'-Omethyladenosine
  modified_base 43: mod_base = OTHER; note = 2'-Omethyladenosine
  modified_base 44: mod_base = OTHER; note = 2'-fluoroadenosine
  modified_base 49: mod_base = OTHER; note = 2'-Omethylcytosine
  modified_base 50: mod_base = OTHER; note = 2'-Omethylcytosine
  modified_base 51: mod_base = OTHER; note = 2'-Omethylguanosine
  modified_base 52: mod_base = OTHER; note = 2'-Omethylguanosine
  modified_base 53: mod_base = OTHER; note = 2'-Omethylguanosine
  modified_base 54: mod_base = OTHER; note = Uridine phosphorothiorate
  modified_base 55: mod_base = OTHER; note = Uridine phosphorothiorate
  modified_base 61: mod_base = OTHER; note = 2'-Omethylcytosine
  modified_base 65: mod_base = OTHER; note = 2'-Omethylguanosine
  modified_base 73: mod_base = OTHER; note = 2'-Omethylguanosine

SEQ ID NO: 1777 - RNA, 76 nt, synthetic construct; identical to SEQ ID NO: 625
  source 1..76: mol_type = other RNA
  modified_base 1: mod_base = OTHER; note = 2'-Omethylguanosine
  modified_base 2: mod_base = OTHER; note = 2'-Omethylguanosine
  modified_base 3: mod_base = OTHER; note = 2'-Omethylcytosine
  modified_base 4: mod_base = OTHER; note = 2'-Omethyluridine
  modified_base 5: mod_base = OTHER; note = 2'-Omethylcytosine
  modified_base 6: mod_base = OTHER; note = 2'-Omethylcytosine
  modified_base 13: mod_base = OTHER; note = 2'-Omethylcytosine
  modified_base 14: mod_base = OTHER; note = 2'-Omethyladenosine
  modified_base 15: mod_base = OTHER; note = 2'-Omethyladenosine
  modified_base 16: mod_base = OTHER; note = 2'-Omethyluridine
  modified_base 17: mod_base = OTHER; note = 2'-Omethylguanosine
  modified_base 18: mod_base = OTHER; note = 2'-Omethylguanosine
  modified_base 19: mod_base = OTHER; note = Adenosine phosphorothiorate
  modified_base 20: mod_base = OTHER; note = 2'-Omethyluridine
  modified_base 21: mod_base = OTHER; note = Adenosine phosphorothiorate
  modified_base 25: mod_base = OTHER; note = 2'-Omethylcytosine
  modified_base 33: mod_base = OTHER; note = Uridine phosphorothiorate
  modified_base 34: mod_base = OTHER; note = 2'-Omethyluridine
  modified_base 35: mod_base = OTHER; note = Cytosine phosphorothiorate
  modified_base 37: mod_base = OTHER; note = Adenosine phosphorothiorate
  modified_base 38: mod_base = OTHER; note = Adenosine phosphorothiorate
  modified_base 49: mod_base = OTHER; note = 2'-Omethylcytosine
  modified_base 50: mod_base = OTHER; note = 2'-Omethylcytosine
  modified_base 51: mod_base = OTHER; note = 2'-Omethylguanosine
  modified_base 52: mod_base = OTHER; note = 2'-Omethylguanosine
  modified_base 53: mod_base = OTHER; note = 2'-Omethylguanosine
  modified_base 54: mod_base = OTHER; note = Uridine phosphorothiorate
  modified_base 55: mod_base = OTHER; note = Uridine phosphorothiorate
  modified_base 61: mod_base = OTHER; note = 2'-Omethylcytosine
  modified_base 65: mod_base = OTHER; note = 2'-Omethylguanosine
  modified_base 73: mod_base = OTHER; note = 2'-Omethylguanosine

SEQ ID NO: 1778 - RNA, 76 nt, synthetic construct; identical to SEQ ID NO: 625
  source 1..76: mol_type = other RNA
  modified_base 1: mod_base = OTHER; note = 2'-Omethylguanosine
  modified_base 2: mod_base = OTHER; note = 2'-Omethylguanosine
  modified_base 3: mod_base = OTHER; note = 2'-Omethylcytosine
  modified_base 4: mod_base = OTHER; note = 2'-Omethyluridine
  modified_base 5: mod_base = OTHER; note = 2'-Omethylcytosine
  modified_base 6: mod_base = OTHER; note = 2'-Omethylcytosine
  modified_base 13: mod_base = OTHER; note = 2'-Omethylcytosine
  modified_base 14: mod_base = OTHER; note = 2'-Omethyladenosine
  modified_base 15: mod_base = OTHER; note = 2'-Omethyladenosine
  modified_base 16: mod_base = OTHER; note = 2'-Omethyluridine
  modified_base 17: mod_base = OTHER; note = 2'-Omethylguanosine
  modified_base 18: mod_base = OTHER; note = 2'-Omethylguanosine
  modified_base 19: mod_base = OTHER; note = Adenosine phosphorothiorate
  modified_base 20: mod_base = OTHER; note = 2'-Omethyluridine
  modified_base 21: mod_base = OTHER; note = Adenosine phosphorothiorate
  modified_base 25: mod_base = OTHER; note = 2'-Omethylcytosine
  modified_base 33: mod_base = OTHER; note = 2'-fluorouridine
  modified_base 34: mod_base = OTHER; note = 2'-Omethyluridine
  modified_base 35: mod_base = OTHER; note = Cytosine phosphorothiorate
  modified_base 37: mod_base = OTHER; note = Adenosine phosphorothiorate
  modified_base 38: mod_base = OTHER; note = Adenosine phosphorothiorate
  modified_base 49: mod_base = OTHER; note = 2'-Omethylcytosine
  modified_base 50: mod_base = OTHER; note = 2'-Omethylcytosine
  modified_base 51: mod_base = OTHER; note = 2'-Omethylguanosine
  modified_base 52: mod_base = OTHER; note = 2'-Omethylguanosine
  modified_base 53: mod_base = OTHER; note = 2'-Omethylguanosine
  modified_base 54: mod_base = OTHER; note = Uridine phosphorothiorate
  modified_base 55: mod_base = OTHER; note = Uridine phosphorothiorate
  modified_base 61: mod_base = OTHER; note = 2'-Omethylcytosine
  modified_base 65: mod_base = OTHER; note = 2'-Omethylguanosine
  modified_base 73: mod_base = OTHER; note = 2'-Omethylguanosine

SEQ ID NO: 1779 - RNA, 76 nt, synthetic construct; identical to SEQ ID NO: 625
  source 1..76: mol_type = other RNA
  modified_base 1: mod_base = OTHER; note = 2'-Omethylguanosine
  modified_base 2: mod_base = OTHER; note = 2'-Omethylguanosine
  modified_base 3: mod_base = OTHER; note = 2'-Omethylcytosine
  modified_base 4: mod_base = OTHER; note = 2'-Omethyluridine
  modified_base 5: mod_base = OTHER; note = 2'-Omethylcytosine
  modified_base 6: mod_base = OTHER; note = 2'-Omethylcytosine
  modified_base 13: mod_base = OTHER; note = 2'-Omethylcytosine
  modified_base 14: mod_base = OTHER; note = 2'-Omethyladenosine
  modified_base 15: mod_base = OTHER; note = 2'-Omethyladenosine
  modified_base 16: mod_base = OTHER; note = 2'-Omethyluridine
  modified_base 17: mod_base = OTHER; note = 2'-Omethylguanosine
  modified_base 18: mod_base = OTHER; note = 2'-Omethylguanosine
  modified_base 19: mod_base = OTHER; note = Adenosine phosphorothiorate
  modified_base 20: mod_base = OTHER; note = 2'-Omethyluridine
  modified_base 21: mod_base = OTHER; note = Adenosine phosphorothiorate
  modified_base 25: mod_base = OTHER; note = 2'-Omethylcytosine
  modified_base 33: mod_base = OTHER; note = Uridine phosphorothiorate
  modified_base 34: mod_base = OTHER; note = 2'-Omethyluridine
  modified_base 35: mod_base = OTHER; note = Cytosine phosphorothiorate
  modified_base 37: mod_base = OTHER; note = Adenosine phosphorothiorate
  modified_base 38: mod_base = OTHER; note = Adenosine phosphorothiorate
  modified_base 41: mod_base = OTHER; note = 2'-Omethylcytosine
  modified_base 42: mod_base = OTHER; note = 2'-Omethyladenosine
  modified_base 43: mod_base = OTHER; note = 2'-Omethyladenosine
  modified_base 44: mod_base = OTHER; note = 2'-Omethyladenosine
  modified_base 49: mod_base = OTHER; note = 2'-Omethylcytosine
  modified_base 50: mod_base = OTHER; note = 2'-Omethylcytosine
  modified_base 51: mod_base = OTHER; note = 2'-Omethylguanosine
  modified_base 52: mod_base = OTHER; note = 2'-Omethylguanosine
  modified_base 53: mod_base = OTHER; note = 2'-Omethylguanosine
  modified_base 54: mod_base = OTHER; note = Uridine phosphorothiorate
  modified_base 55: mod_base = OTHER; note = Uridine phosphorothiorate
  modified_base 61: mod_base = OTHER; note = 2'-Omethylcytosine
  modified_base 65: mod_base = OTHER; note = 2'-Omethylguanosine
  modified_base 73: mod_base = OTHER; note = 2'-Omethylguanosine

SEQ ID NO: 1780 - RNA, 76 nt, synthetic construct; identical to SEQ ID NO: 625
  source 1..76: mol_type = other RNA
  modified_base 1: mod_base = OTHER; note = 2'-Omethylguanosine
  modified_base 2: mod_base = OTHER; note = 2'-Omethylguanosine
  modified_base 3: mod_base = OTHER; note = 2'-Omethylcytosine
  modified_base 4: mod_base = OTHER; note = 2'-Omethyluridine
  modified_base 5: mod_base = OTHER; note = 2'-Omethylcytosine
  modified_base 6: mod_base = OTHER; note = 2'-Omethylcytosine
  modified_base 13: mod_base = OTHER; note = 2'-Omethylcytosine
  modified_base 14: mod_base = OTHER; note = 2'-Omethyladenosine
  modified_base 15: mod_base = OTHER; note = 2'-Omethyladenosine
  modified_base 16: mod_base = OTHER; note = 2'-Omethyluridine
  modified_base 17: mod_base = OTHER; note = 2'-Omethylguanosine
  modified_base 18: mod_base = OTHER; note = 2'-Omethylguanosine
  modified_base 19: mod_base = OTHER; note = Adenosine phosphorothiorate
  modified_base 20: mod_base = OTHER; note = 2'-Omethyluridine
  modified_base 21: mod_base = OTHER; note = Adenosine phosphorothiorate
  modified_base 25: mod_base = OTHER; note = 2'-Omethylcytosine
  modified_base 33: mod_base = OTHER; note = Uridine phosphorothiorate
  modified_base 34: mod_base = OTHER; note = 2'-Omethyluridine
  modified_base 35: mod_base = OTHER; note = Cytosine phosphorothiorate
  modified_base 37: mod_base = OTHER; note = Adenosine phosphorothiorate
  modified_base 38: mod_base = OTHER; note = Adenosine phosphorothiorate
  modified_base 41: mod_base = OTHER; note = 2'-fluorocytosine
  modified_base 42: mod_base = OTHER; note = 2'-Omethyladenosine
  modified_base 43: mod_base = OTHER; note = 2'-Omethyladenosine
  modified_base 44: mod_base = OTHER; note = 2'-fluoroadenosine
  modified_base 49: mod_base = OTHER; note = 2'-Omethylcytosine
  modified_base 50: mod_base = OTHER; note = 2'-Omethylcytosine
  modified_base 51: mod_base = OTHER; note = 2'-Omethylguanosine
  modified_base 52: mod_base = OTHER; note = 2'-Omethylguanosine
  modified_base 53: mod_base = OTHER; note = 2'-Omethylguanosine
  modified_base 54: mod_base = OTHER; note = Uridine phosphorothiorate
  modified_base 55: mod_base = OTHER; note = Uridine phosphorothiorate
  modified_base 61: mod_base = OTHER; note = 2'-Omethylcytosine
  modified_base 65: mod_base = OTHER; note = 2'-Omethylguanosine
  modified_base 73: mod_base = OTHER; note = 2'-Omethylguanosine

SEQ ID NO: 1781 - RNA, 76 nt, synthetic construct; identical to SEQ ID NO: 625
  source 1..76: mol_type = other RNA
  modified_base 1: mod_base = OTHER; note = 2'-Omethylguanosine
  modified_base 2: mod_base = OTHER; note = 2'-Omethylguanosine
  modified_base 3: mod_base = OTHER; note = 2'-Omethylcytosine
  modified_base 4: mod_base = OTHER; note = 2'-Omethyluridine
  modified_base 5: mod_base = OTHER; note = 2'-Omethylcytosine
  modified_base 6: mod_base = OTHER; note = 2'-Omethylcytosine
  modified_base 13: mod_base = OTHER; note = 2'-Omethylcytosine
  modified_base 14: mod_base = OTHER; note = 2'-Omethyladenosine
  modified_base 15: mod_base = OTHER; note = 2'-Omethyladenosine
  modified_base 16: mod_base = OTHER; note = 2'-Omethyluridine
  modified_base 17: mod_base = OTHER; note = 2'-Omethylguanosine
  modified_base 18: mod_base = OTHER; note = 2'-Omethylguanosine
  modified_base 19: mod_base = OTHER; note = Adenosine phosphorothiorate
  modified_base 20: mod_base = OTHER; note = 2'-Omethyluridine
  modified_base 21: mod_base = OTHER; note = Adenosine phosphorothiorate
  modified_base 25: mod_base = OTHER; note = 2'-Omethylcytosine
  modified_base 33: mod_base = OTHER; note = 2'-fluorouridine
  modified_base 34: mod_base = OTHER; note = 2'-Omethyluridine
  modified_base 35: mod_base = OTHER; note = Cytosine phosphorothiorate
  modified_base 37: mod_base = OTHER; note = Adenosine phosphorothiorate
  modified_base 38: mod_base = OTHER; note = Adenosine phosphorothiorate
  modified_base 41: mod_base = OTHER; note = 2'-Omethylcytosine
  modified_base 42: mod_base = OTHER; note = 2'-Omethyladenosine
  modified_base 43: mod_base = OTHER; note = 2'-Omethyladenosine
  modified_base 44: mod_base = OTHER; note = 2'-Omethyladenosine
  modified_base 49: mod_base = OTHER; note = 2'-Omethylcytosine
  modified_base 50: mod_base = OTHER; note = 2'-Omethylcytosine
  modified_base 51: mod_base = OTHER; note = 2'-Omethylguanosine
  modified_base 52: mod_base = OTHER; note = 2'-Omethylguanosine
  modified_base 53: mod_base = OTHER; note = 2'-Omethylguanosine
  modified_base 54: mod_base = OTHER; note = Uridine phosphorothiorate
  modified_base 55: mod_base = OTHER; note = Uridine phosphorothiorate
  modified_base 61: mod_base = OTHER; note = 2'-Omethylcytosine
  modified_base 65: mod_base = OTHER; note = 2'-Omethylguanosine
  modified_base 73: mod_base = OTHER; note = 2'-Omethylguanosine

SEQ ID NO: 1782 - RNA, 76 nt, synthetic construct; identical to SEQ ID NO: 625
  source 1..76: mol_type = other RNA
  modified_base 1: mod_base = OTHER; note = 2'-Omethylguanosine
  modified_base 2: mod_base = OTHER; note = 2'-Omethylguanosine
  modified_base 3: mod_base = OTHER; note = 2'-Omethylcytosine
  modified_base 4: mod_base = OTHER; note = 2'-Omethyluridine
  modified_base 5: mod_base = OTHER; note = 2'-Omethylcytosine
  modified_base 6: mod_base = OTHER; note = 2'-Omethylcytosine
  modified_base 13: mod_base = OTHER; note = 2'-Omethylcytosine
  modified_base 14: mod_base = OTHER; note = 2'-Omethyladenosine
  modified_base 15: mod_base = OTHER; note = 2'-Omethyladenosine
  modified_base 16: mod_base = OTHER; note = 2'-Omethyluridine
  modified_base 17: mod_base = OTHER; note = 2'-Omethylguanosine
  modified_base 18: mod_base = OTHER; note = 2'-Omethylguanosine
  modified_base 19: mod_base = OTHER; note = Adenosine phosphorothiorate
  modified_base 20: mod_base = OTHER; note = 2'-Omethyluridine
  modified_base 21: mod_base = OTHER; note = Adenosine phosphorothiorate
  modified_base 25: mod_base = OTHER; note = 2'-Omethylcytosine
  modified_base 33: mod_base = OTHER; note = 2'-fluorouridine
  modified_base 34: mod_base = OTHER; note = 2'-Omethyluridine
  modified_base 35: mod_base = OTHER; note = Cytosine phosphorothiorate
  modified_base 37: mod_base = OTHER; note = Adenosine phosphorothiorate
  modified_base 38: mod_base = OTHER; note = Adenosine phosphorothiorate
  modified_base 41: mod_base = OTHER; note = 2'-fluorocytosine
  modified_base 42: mod_base = OTHER; note = 2'-Omethyladenosine
  modified_base 43: mod_base = OTHER; note = 2'-Omethyladenosine
  modified_base 44: mod_base = OTHER; note = 2'-fluoroadenosine
  modified_base 49: mod_base = OTHER; note = 2'-Omethylcytosine
  modified_base 50: mod_base = OTHER; note = 2'-Omethylcytosine
  modified_base 51: mod_base = OTHER; note = 2'-Omethylguanosine
  modified_base 52: mod_base = OTHER; note = 2'-Omethylguanosine
  modified_base 53: mod_base = OTHER; note = 2'-Omethylguanosine
  modified_base 54: mod_base = OTHER; note = Uridine phosphorothiorate
  modified_base 55: mod_base = OTHER; note = Uridine phosphorothiorate
  modified_base 61: mod_base = OTHER; note = 2'-Omethylcytosine
  modified_base 65: mod_base = OTHER; note = 2'-Omethylguanosine
  modified_base 73: mod_base = OTHER; note = 2'-Omethylguanosine

SEQ ID NO: 1783 - RNA, 76 nt, synthetic construct; identical to SEQ ID NO: 625
  source 1..76: mol_type = other RNA
  modified_base 1: mod_base = OTHER; note = 2'-Omethylguanosine
  modified_base 10: mod_base = OTHER; note = 2'-Omethylguanosine
  modified_base 11: mod_base = OTHER; note = 2'-Omethylcytosine
  modified_base 12: mod_base = OTHER; note = 2'-Omethylguanosine
  modified_base 13: mod_base = OTHER; note = 2'-Omethylcytosine
  modified_base 14: mod_base = OTHER; note = 2'-Omethyladenosine
  modified_base 15: mod_base = OTHER; note = 2'-Omethyladenosine
  modified_base 16: mod_base = OTHER; note = 2'-Omethyluridine
  modified_base 17: mod_base = OTHER; note = 2'-Omethylguanosine
  modified_base 18: mod_base = OTHER; note = 2'-Omethylguanosine
  modified_base 19: mod_base = OTHER; note = Adenosine phosphorothiorate
  modified_base 20: mod_base = OTHER; note = 2'-Omethyluridine
  modified_base 21: mod_base = OTHER; note = Adenosine phosphorothiorate
  modified_base 25: mod_base = OTHER; note = 2'-Omethylcytosine
  modified_base 41: mod_base = OTHER; note = 2'-Omethylcytosine
  modified_base 42: mod_base = OTHER; note = 2'-Omethyladenosine
  modified_base 43: mod_base = OTHER; note = 2'-Omethyladenosine
  modified_base 44: mod_base = OTHER; note = 2'-Omethyladenosine
  modified_base 49: mod_base = OTHER; note = 2'-Omethylcytosine
  modified_base 50: mod_base = OTHER; note = 2'-Omethylcytosine
  modified_base 52: mod_base = OTHER; note = 2'-Omethylguanosine
  modified_base 54: mod_base = OTHER; note = Uridine phosphorothiorate
  modified_base 55: mod_base = OTHER; note = Uridine phosphorothiorate
  modified_base 61: mod_base = OTHER; note = 2'-Omethylcytosine
  modified_base 65: mod_base = OTHER; note = 2'-Omethylguanosine
  modified_base 73: mod_base = OTHER; note = 2'-Omethylguanosine

SEQ ID NO: 1784 - RNA, 76 nt, synthetic construct; identical to SEQ ID NO: 625
  source 1..76: mol_type = other RNA
  modified_base 1: mod_base = OTHER; note = 2'-Omethylguanosine
  modified_base 10: mod_base = OTHER; note = 2'-Omethylguanosine
  modified_base 11: mod_base = OTHER; note = 2'-Omethylcytosine
  modified_base 12: mod_base = OTHER; note = 2'-Omethylguanosine
  modified_base 13: mod_base = OTHER; note = 2'-Omethylcytosine
  modified_base 14: mod_base = OTHER; note = 2'-Omethyladenosine
  modified_base 15: mod_base = OTHER; note = 2'-Omethyladenosine
  modified_base 16: mod_base = OTHER; note = 2'-Omethyluridine
  modified_base 17: mod_base = OTHER; note = 2'-Omethylguanosine
  modified_base 18: mod_base = OTHER; note = 2'-Omethylguanosine
  modified_base 19: mod_base = OTHER; note = Adenosine phosphorothiorate
  modified_base 20: mod_base = OTHER; note = 2'-Omethyluridine
  modified_base 21: mod_base = OTHER; note = Adenosine phosphorothiorate
  modified_base 25: mod_base = OTHER; note = 2'-Omethylcytosine
  modified_base 41: mod_base = OTHER; note = 2'-fluorocytosine
  modified_base 42: mod_base = OTHER; note = 2'-Omethyladenosine
  modified_base 43: mod_base = OTHER; note = 2'-Omethyladenosine
  modified_base 44: mod_base = OTHER; note = 2'-fluoroadenosine
  modified_base 49: mod_base = OTHER; note = 2'-Omethylcytosine
  modified_base 50: mod_base = OTHER; note = 2'-Omethylcytosine
  modified_base 52: mod_base = OTHER; note = 2'-Omethylguanosine
  modified_base 54: mod_base = OTHER; note = Uridine phosphorothiorate
  modified_base 55: mod_base = OTHER; note = Uridine phosphorothiorate
  modified_base 61: mod_base = OTHER; note = 2'-Omethylcytosine
  modified_base 65: mod_base = OTHER; note = 2'-Omethylguanosine
  modified_base 73: mod_base = OTHER; note = 2'-Omethylguanosine

SEQ ID NO: 1785 - RNA, 76 nt, synthetic construct; identical to SEQ ID NO: 625
  source 1..76: mol_type = other RNA
  modified_base 1: mod_base = OTHER; note = 2'-Omethylguanosine
  modified_base 10: mod_base = OTHER; note = 2'-Omethylguanosine
  modified_base 11: mod_base = OTHER; note = 2'-Omethylcytosine
  modified_base 12: mod_base = OTHER; note = 2'-Omethylguanosine
  modified_base 13: mod_base = OTHER; note = 2'-Omethylcytosine
  modified_base 17: mod_base = OTHER; note = 2'-Omethylguanosine
  modified_base 18: mod_base = OTHER; note = 2'-Omethylguanosine
  modified_base 25: mod_base = OTHER; note = 2'-Omethylcytosine
  modified_base 33: mod_base = OTHER; note = Uridine phosphorothiorate
  modified_base 34: mod_base = OTHER; note = 2'-Omethyluridine
  modified_base 35: mod_base = OTHER; note = Cytosine phosphorothiorate
  modified_base 37: mod_base = OTHER; note = Adenosine phosphorothiorate
  modified_base 38: mod_base = OTHER; note = Adenosine phosphorothiorate
  modified_base 41: mod_base = OTHER; note = 2'-Omethylcytosine
  modified_base 42: mod_base = OTHER; note = 2'-Omethyladenosine
  modified_base 43: mod_base = OTHER; note = 2'-Omethyladenosine
  modified_base 44: mod_base = OTHER; note = 2'-Omethyladenosine
  modified_base 49: mod_base = OTHER; note = 2'-Omethylcytosine
  modified_base 50: mod_base = OTHER; note = 2'-Omethylcytosine
  modified_base 52: mod_base = OTHER; note = 2'-Omethylguanosine
  modified_base 54: mod_base = OTHER; note = Uridine phosphorothiorate
  modified_base 55: mod_base = OTHER; note = Uridine phosphorothiorate
  modified_base 61: mod_base = OTHER; note = 2'-Omethylcytosine
  modified_base 65: mod_base = OTHER; note = 2'-Omethylguanosine
  modified_base 73: mod_base = OTHER; note = 2'-Omethylguanosine

SEQ ID NO: 1786 - RNA, 76 nt, synthetic construct; identical to SEQ ID NO: 625
  source 1..76: mol_type = other RNA
  modified_base 1: mod_base = OTHER; note = 2'-Omethylguanosine
  modified_base 10: mod_base = OTHER; note = 2'-Omethylguanosine
  modified_base 11: mod_base = OTHER; note = 2'-Omethylcytosine
  modified_base 12: mod_base = OTHER; note = 2'-Omethylguanosine
  modified_base 13: mod_base = OTHER; note = 2'-Omethylcytosine
  modified_base 17: mod_base = OTHER; note = 2'-Omethylguanosine
  modified_base 18: mod_base = OTHER; note = 2'-Omethylguanosine
  modified_base 25: mod_base = OTHER; note = 2'-Omethylcytosine
  modified_base 33: mod_base = OTHER; note = Uridine phosphorothiorate
  modified_base 34: mod_base = OTHER; note = 2'-Omethyluridine
  modified_base 35: mod_base = OTHER; note = Cytosine phosphorothiorate
  modified_base 37: mod_base = OTHER; note = Adenosine phosphorothiorate
  modified_base 38: mod_base = OTHER; note = Adenosine phosphorothiorate
  modified_base 41: mod_base = OTHER; note = 2'-fluorocytosine
  modified_base 42: mod_base = OTHER; note = 2'-Omethyladenosine
  modified_base 43: mod_base = OTHER; note = 2'-Omethyladenosine
  modified_base 44: mod_base = OTHER; note = 2'-fluoroadenosine
  modified_base 49: mod_base = OTHER; note = 2'-Omethylcytosine
  modified_base 50: mod_base = OTHER; note = 2'-Omethylcytosine
  modified_base 52: mod_base = OTHER; note = 2'-Omethylguanosine
  modified_base 54: mod_base = OTHER; note = Uridine phosphorothiorate
  modified_base 55: mod_base = OTHER; note = Uridine phosphorothiorate
  modified_base 61: mod_base = OTHER; note = 2'-Omethylcytosine
  modified_base 65: mod_base = OTHER; note = 2'-Omethylguanosine
  modified_base 73: mod_base = OTHER; note = 2'-Omethylguanosine

SEQ ID NO: 1787 - RNA, 76 nt, synthetic construct; identical to SEQ ID NO: 625
  source 1..76: mol_type = other RNA
  modified_base 1: mod_base = OTHER; note = 2'-Omethylguanosine
  modified_base 10: mod_base = OTHER; note = 2'-Omethylguanosine
  modified_base 11: mod_base = OTHER; note = 2'-Omethylcytosine
  modified_base 12: mod_base = OTHER; note = 2'-Omethylguanosine
  modified_base 13: mod_base = OTHER; note = 2'-Omethylcytosine
  modified_base 17: mod_base = OTHER; note = 2'-Omethylguanosine
  modified_base 18: mod_base = OTHER; note = 2'-Omethylguanosine
  modified_base 25: mod_base = OTHER; note = 2'-Omethylcytosine
  modified_base 33: mod_base = OTHER; note = 2'-fluorouridine
  modified_base 34: mod_base = OTHER; note = 2'-Omethyluridine
  modified_base 35: mod_base = OTHER; note = Cytosine phosphorothiorate
  modified_base 37: mod_base = OTHER; note = Adenosine phosphorothiorate
  modified_base 38: mod_base = OTHER; note = Adenosine phosphorothiorate
  modified_base 41: mod_base = OTHER; note = 2'-Omethylcytosine
  modified_base 42: mod_base = OTHER; note = 2'-Omethyladenosine
  modified_base 43: mod_base = OTHER; note = 2'-Omethyladenosine
  modified_base 44: mod_base = OTHER; note = 2'-Omethyladenosine
  modified_base 49: mod_base = OTHER; note = 2'-Omethylcytosine
  modified_base 50: mod_base = OTHER; note = 2'-Omethylcytosine
  modified_base 52: mod_base = OTHER; note = 2'-Omethylguanosine
  modified_base 54: mod_base = OTHER; note = Uridine phosphorothiorate
  modified_base 55: mod_base = OTHER; note = Uridine phosphorothiorate
  modified_base 61: mod_base = OTHER; note = 2'-Omethylcytosine
  modified_base 65: mod_base = OTHER; note = 2'-Omethylguanosine
  modified_base 73: mod_base = OTHER; note = 2'-Omethylguanosine

SEQ ID NO: 1788 - RNA, 76 nt, synthetic construct; identical to SEQ ID NO: 625
  source 1..76: mol_type = other RNA
  modified_base 1: mod_base = OTHER; note = 2'-Omethylguanosine
  modified_base 10: mod_base = OTHER; note = 2'-Omethylguanosine
  modified_base 11: mod_base = OTHER; note = 2'-Omethylcytosine
  modified_base 12: mod_base = OTHER; note = 2'-Omethylguanosine
  modified_base 13: mod_base = OTHER; note = 2'-Omethylcytosine
  modified_base 17: mod_base = OTHER; note = 2'-Omethylguanosine
  modified_base 18: mod_base = OTHER; note = 2'-Omethylguanosine
  modified_base 25: mod_base = OTHER; note = 2'-Omethylcytosine
  modified_base 33: mod_base = OTHER; note = 2'-fluorouridine
  modified_base 34: mod_base = OTHER; note = 2'-Omethyluridine
  modified_base 35: mod_base = OTHER; note = Cytosine phosphorothiorate
  modified_base 37: mod_base = OTHER; note = Adenosine phosphorothiorate
  modified_base 38: mod_base = OTHER; note = Adenosine phosphorothiorate
  modified_base 41: mod_base = OTHER; note = 2'-fluorocytosine
  modified_base 42: mod_base = OTHER; note = 2'-Omethyladenosine
  modified_base 43: mod_base = OTHER; note = 2'-Omethyladenosine
  modified_base 44: mod_base = OTHER; note = 2'-fluoroadenosine
  modified_base 49: mod_base = OTHER; note = 2'-Omethylcytosine
  modified_base 50: mod_base = OTHER; note = 2'-Omethylcytosine
  modified_base 52: mod_base = OTHER; note = 2'-Omethylguanosine
  modified_base 54: mod_base = OTHER; note = Uridine phosphorothiorate
  modified_base 55: mod_base = OTHER; note = Uridine phosphorothiorate
  modified_base 61: mod_base = OTHER; note = 2'-Omethylcytosine
  modified_base 65: mod_base = OTHER; note = 2'-Omethylguanosine
  modified_base 73: mod_base = OTHER; note = 2'-Omethylguanosine

SEQ ID NO: 1789 - RNA, 76 nt, synthetic construct; identical to SEQ ID NO: 625
  source 1..76: mol_type = other RNA
  modified_base 1: mod_base = OTHER; note = 2'-Omethylguanosine
  modified_base 10: mod_base = OTHER; note = 2'-Omethylguanosine
  modified_base 11: mod_base = OTHER; note = 2'-Omethylcytosine
  modified_base 12: mod_base = OTHER; note = 2'-Omethylguanosine
  modified_base 13: mod_base = OTHER; note = 2'-Omethylcytosine
  modified_base 14: mod_base = OTHER; note = 2'-Omethyladenosine
  modified_base 15: mod_base = OTHER; note = 2'-Omethyladenosine
  modified_base 16: mod_base = OTHER; note = 2'-Omethyluridine
  modified_base 17: mod_base = OTHER; note = 2'-Omethylguanosine
  modified_base 18: mod_base = OTHER; note = 2'-Omethylguanosine
  modified_base 19: mod_base = OTHER; note = Adenosine phosphorothiorate
  modified_base 20: mod_base = OTHER; note = 2'-Omethyluridine
  modified_base 21: mod_base = OTHER; note = Adenosine phosphorothiorate
  modified_base 25: mod_base = OTHER; note = 2'-Omethylcytosine
  modified_base 33: mod_base = OTHER; note = Uridine phosphorothiorate
  modified_base 34: mod_base = OTHER; note = 2'-Omethyluridine
  modified_base 35: mod_base = OTHER; note = Cytosine phosphorothiorate
  modified_base 37: mod_base = OTHER; note = Adenosine phosphorothiorate
  modified_base 38: mod_base = OTHER; note = Adenosine phosphorothiorate
  modified_base 49: mod_base = OTHER; note = 2'-Omethylcytosine
  modified_base 50: mod_base = OTHER; note = 2'-Omethylcytosine
  modified_base 52: mod_base = OTHER; note = 2'-Omethylguanosine
  modified_base 54: mod_base = OTHER; note = Uridine phosphorothiorate
  modified_base 55: mod_base = OTHER; note = Uridine phosphorothiorate
  modified_base 61: mod_base = OTHER; note = 2'-Omethylcytosine
  modified_base 65: mod_base = OTHER; note = 2'-Omethylguanosine
  modified_base 73: mod_base = OTHER; note = 2'-Omethylguanosine

SEQ ID NO: 1790 - RNA, 76 nt, synthetic construct; identical to SEQ ID NO: 625
  source 1..76: mol_type = other RNA
  modified_base 1: mod_base = OTHER; note = 2'-Omethylguanosine
  modified_base 10: mod_base = OTHER; note = 2'-Omethylguanosine
  modified_base 11: mod_base = OTHER; note = 2'-Omethylcytosine
  modified_base 12: mod_base = OTHER; note = 2'-Omethylguanosine
  modified_base 13: mod_base = OTHER; note = 2'-Omethylcytosine
  modified_base 14: mod_base = OTHER; note = 2'-Omethyladenosine
  modified_base 15: mod_base = OTHER; note = 2'-Omethyladenosine
  modified_base 16: mod_base = OTHER; note = 2'-Omethyluridine
  modified_base 17: mod_base = OTHER; note = 2'-Omethylguanosine
  modified_base 18: mod_base = OTHER; note = 2'-Omethylguanosine
  modified_base 19: mod_base = OTHER; note = Adenosine phosphorothiorate
  modified_base 20: mod_base = OTHER; note = 2'-Omethyluridine
  modified_base 21: mod_base = OTHER; note = Adenosine phosphorothiorate
  modified_base 25: mod_base = OTHER; note = 2'-Omethylcytosine
  modified_base 33: mod_base = OTHER; note = 2'-fluorouridine
  modified_base 34: mod_base = OTHER; note = 2'-Omethyluridine
  modified_base 35: mod_base = OTHER; note = Cytosine phosphorothiorate
  modified_base 37: mod_base = OTHER; note = Adenosine phosphorothiorate
  modified_base 38: mod_base = OTHER; note = Adenosine phosphorothiorate
  modified_base 49: mod_base = OTHER; note = 2'-Omethylcytosine
  modified_base 50: mod_base = OTHER; note = 2'-Omethylcytosine
  modified_base 52: mod_base = OTHER; note = 2'-Omethylguanosine
  modified_base 54: mod_base = OTHER; note = Uridine phosphorothiorate
  modified_base 55: mod_base = OTHER; note = Uridine phosphorothiorate
  modified_base 61: mod_base = OTHER; note = 2'-Omethylcytosine
  modified_base 65: mod_base = OTHER; note = 2'-Omethylguanosine
  modified_base 73: mod_base = OTHER; note = 2'-Omethylguanosine

SEQ ID NO: 1791 - RNA, 76 nt, synthetic construct; identical to SEQ ID NO: 625
  source 1..76: mol_type = other RNA
  modified_base 1: mod_base = OTHER; note = 2'-Omethylguanosine
  modified_base 10: mod_base = OTHER; note = 2'-Omethylguanosine
  modified_base 11: mod_base = OTHER; note = 2'-Omethylcytosine
  modified_base 12: mod_base = OTHER; note = 2'-Omethylguanosine
  modified_base 13: mod_base = OTHER; note = 2'-Omethylcytosine
  modified_base 14: mod_base = OTHER; note = 2'-Omethyladenosine
  modified_base 15: mod_base = OTHER; note = 2'-Omethyladenosine
  modified_base 16: mod_base = OTHER; note = 2'-Omethyluridine
  modified_base 17: mod_base = OTHER; note = 2'-Omethylguanosine
  modified_base 18: mod_base = OTHER; note = 2'-Omethylguanosine
  modified_base 19: mod_base = OTHER; note = Adenosine phosphorothiorate
  modified_base 20: mod_base = OTHER; note = 2'-Omethyluridine
  modified_base 21: mod_base = OTHER; note = Adenosine phosphorothiorate
  modified_base 25: mod_base = OTHER; note = 2'-Omethylcytosine
  modified_base 33: mod_base = OTHER; note = Uridine phosphorothiorate
  modified_base 34: mod_base = OTHER; note = 2'-Omethyluridine
  modified_base 35: mod_base = OTHER; note = Cytosine phosphorothiorate
  modified_base 37: mod_base = OTHER; note = Adenosine phosphorothiorate
  modified_base 38: mod_base = OTHER; note = Adenosine phosphorothiorate
  modified_base 41: mod_base = OTHER; note = 2'-Omethylcytosine
  modified_base 42: mod_base = OTHER; note = 2'-Omethyladenosine
  modified_base 43: mod_base = OTHER; note = 2'-Omethyladenosine
  modified_base 44: mod_base = OTHER; note = 2'-Omethyladenosine
  modified_base 49: mod_base = OTHER; note = 2'-Omethylcytosine
  modified_base 50: mod_base = OTHER; note = 2'-Omethylcytosine
  modified_base 52: mod_base = OTHER; note = 2'-Omethylguanosine
  modified_base 54: mod_base = OTHER; note = Uridine phosphorothiorate
  modified_base 55: mod_base = OTHER; note = Uridine phosphorothiorate
  modified_base 61: mod_base = OTHER; note = 2'-Omethylcytosine
  modified_base 65: mod_base = OTHER; note = 2'-Omethylguanosine
  modified_base 73: mod_base = OTHER; note = 2'-Omethylguanosine

SEQ ID NO: 1792 - RNA, 76 nt, synthetic construct; identical to SEQ ID NO: 625
  source 1..76: mol_type = other RNA
  modified_base 1: mod_base = OTHER; note = 2'-Omethylguanosine
  modified_base 10: mod_base = OTHER; note = 2'-Omethylguanosine
  modified_base 11: mod_base = OTHER; note = 2'-Omethylcytosine
  modified_base 12: mod_base = OTHER; note = 2'-Omethylguanosine
  modified_base 13: mod_base = OTHER; note = 2'-Omethylcytosine
  modified_base 14: mod_base = OTHER; note = 2'-Omethyladenosine
  modified_base 15: mod_base = OTHER; note = 2'-Omethyladenosine
  modified_base 16: mod_base = OTHER; note = 2'-Omethyluridine
  modified_base 17: mod_base = OTHER; note = 2'-Omethylguanosine
  modified_base 18: mod_base = OTHER; note = 2'-Omethylguanosine
  modified_base 19: mod_base = OTHER; note = Adenosine phosphorothiorate
  modified_base 20: mod_base = OTHER; note = 2'-Omethyluridine
  modified_base 21: mod_base = OTHER; note = Adenosine phosphorothiorate
  modified_base 25: mod_base = OTHER; note = 2'-Omethylcytosine
  modified_base 33: mod_base = OTHER; note = Uridine phosphorothiorate
  modified_base 34: mod_base = OTHER; note = 2'-Omethyluridine
  modified_base 35: mod_base = OTHER; note = Cytosine phosphorothiorate
  modified_base 37: mod_base = OTHER; note = Adenosine phosphorothiorate
  modified_base 38: mod_base = OTHER; note = Adenosine phosphorothiorate
  modified_base 41: mod_base = OTHER; note = 2'-fluorocytosine
  modified_base 42: mod_base = OTHER; note = 2'-Omethyladenosine
  modified_base 43: mod_base = OTHER; note = 2'-Omethyladenosine
  modified_base 44: mod_base = OTHER; note = 2'-fluoroadenosine
  modified_base 49: mod_base = OTHER; note = 2'-Omethylcytosine
  modified_base 50: mod_base = OTHER; note = 2'-Omethylcytosine
  modified_base 52: mod_base = OTHER; note = 2'-Omethylguanosine
  modified_base 54: mod_base = OTHER; note = Uridine phosphorothiorate
  modified_base 55: mod_base = OTHER; note = Uridine phosphorothiorate
  modified_base 61: mod_base = OTHER; note = 2'-Omethylcytosine
  modified_base 65: mod_base = OTHER; note = 2'-Omethylguanosine
  modified_base 73: mod_base = OTHER; note = 2'-Omethylguanosine

SEQ ID NO: 1793 - RNA, 76 nt, synthetic construct; identical to SEQ ID NO: 625
  source 1..76: mol_type = other RNA
  modified_base 1: mod_base = OTHER; note = 2'-Omethylguanosine
  modified_base 10: mod_base = OTHER; note = 2'-Omethylguanosine
  modified_base 11: mod_base = OTHER; note = 2'-Omethylcytosine
  modified_base 12: mod_base = OTHER; note = 2'-Omethylguanosine
  modified_base 13: mod_base = OTHER; note = 2'-Omethylcytosine
  modified_base 14: mod_base = OTHER; note = 2'-Omethyladenosine
  modified_base 15: mod_base = OTHER; note = 2'-Omethyladenosine
  modified_base 16: mod_base = OTHER; note = 2'-Omethyluridine
  modified_base 17: mod_base = OTHER; note = 2'-Omethylguanosine
  modified_base 18: mod_base = OTHER; note = 2'-Omethylguanosine
  modified_base 19: mod_base = OTHER; note = Adenosine phosphorothiorate
  modified_base 20: mod_base = OTHER; note = 2'-Omethyluridine
  modified_base 21: mod_base = OTHER; note = Adenosine phosphorothiorate
  modified_base 25: mod_base = OTHER; note = 2'-Omethylcytosine
  modified_base 33: mod_base = OTHER; note = 2'-fluorouridine
  modified_base 34: mod_base = OTHER; note = 2'-Omethyluridine
  modified_base 35: mod_base = OTHER; note = Cytosine phosphorothiorate
  modified_base 37: mod_base = OTHER; note = Adenosine phosphorothiorate
  modified_base 38: mod_base = OTHER; note = Adenosine phosphorothiorate
  modified_base 41: mod_base = OTHER; note = 2'-Omethylcytosine
  modified_base 42: mod_base = OTHER; note = 2'-Omethyladenosine
  modified_base 43: mod_base = OTHER; note = 2'-Omethyladenosine
  modified_base 44: mod_base = OTHER; note = 2'-Omethyladenosine
  modified_base 49: mod_base = OTHER; note = 2'-Omethylcytosine
  modified_base 50: mod_base = OTHER; note = 2'-Omethylcytosine
  modified_base 52: mod_base = OTHER; note = 2'-Omethylguanosine
  modified_base 54: mod_base = OTHER; note = Uridine phosphorothiorate
  modified_base 55: mod_base = OTHER; note = Uridine phosphorothiorate
  modified_base 61: mod_base = OTHER; note = 2'-Omethylcytosine
  modified_base 65: mod_base = OTHER; note = 2'-Omethylguanosine
  modified_base 73: mod_base = OTHER; note = 2'-Omethylguanosine

SEQ ID NO: 1794 - RNA, 76 nt, synthetic construct; identical to SEQ ID NO: 625
  source 1..76: mol_type = other RNA
  modified_base 1: mod_base = OTHER; note = 2'-Omethylguanosine
  modified_base 10: mod_base = OTHER; note = 2'-Omethylguanosine
  modified_base 11: mod_base = OTHER; note = 2'-Omethylcytosine
  modified_base 12: mod_base = OTHER; note = 2'-Omethylguanosine
  modified_base 13: mod_base = OTHER; note = 2'-Omethylcytosine
  modified_base 14: mod_base = OTHER; note = 2'-Omethyladenosine
  modified_base 15: mod_base = OTHER; note = 2'-Omethyladenosine
  modified_base 16: mod_base = OTHER; note = 2'-Omethyluridine
  modified_base 17: mod_base = OTHER; note = 2'-Omethylguanosine
  modified_base 18: mod_base = OTHER; note = 2'-Omethylguanosine
  modified_base 19: mod_base = OTHER; note = Adenosine phosphorothiorate
  modified_base 20: mod_base = OTHER; note = 2'-Omethyluridine
  modified_base 21: mod_base = OTHER; note = Adenosine phosphorothiorate
  modified_base 25: mod_base = OTHER; note = 2'-Omethylcytosine
  modified_base 33: mod_base = OTHER; note = 2'-fluorouridine
  modified_base 34: mod_base = OTHER; note = 2'-Omethyluridine
  modified_base 35: mod_base = OTHER; note = Cytosine phosphorothiorate
  modified_base 37: mod_base = OTHER; note = Adenosine phosphorothiorate
  modified_base 38: mod_base = OTHER; note = Adenosine phosphorothiorate
  modified_base 41: mod_base = OTHER; note = 2'-fluorocytosine
  modified_base 42: mod_base = OTHER; note = 2'-Omethyladenosine
  modified_base 43: mod_base = OTHER; note = 2'-Omethyladenosine
  modified_base 44: mod_base = OTHER; note = 2'-fluoroadenosine
  modified_base 49: mod_base = OTHER; note = 2'-Omethylcytosine
  modified_base 50: mod_base = OTHER; note = 2'-Omethylcytosine
  modified_base 52: mod_base = OTHER; note = 2'-Omethylguanosine
  modified_base 54: mod_base = OTHER; note = Uridine phosphorothiorate
  modified_base 55: mod_base = OTHER; note = Uridine phosphorothiorate
  modified_base 61: mod_base = OTHER; note = 2'-Omethylcytosine
  modified_base 65: mod_base = OTHER; note = 2'-Omethylguanosine
  modified_base 73: mod_base = OTHER; note = 2'-Omethylguanosine

SEQ ID NO: 1795 - RNA, 76 nt, synthetic construct; identical to SEQ ID NO: 625
  source 1..76: mol_type = other RNA
  modified_base 1: mod_base = OTHER; note = 2'-Omethylguanosine
  modified_base 13: mod_base = OTHER; note = 2'-Omethylcytosine
  modified_base 14: mod_base = OTHER; note = 2'-Omethyladenosine
  modified_base 15: mod_base = OTHER; note = 2'-Omethyladenosine
  modified_base 16: mod_base = OTHER; note = 2'-Omethyluridine
  modified_base 17: mod_base = OTHER; note = 2'-Omethylguanosine
  modified_base 18: mod_base = OTHER; note = 2'-Omethylguanosine
  modified_base 19: mod_base = OTHER; note = Adenosine phosphorothiorate
  modified_base 20: mod_base = OTHER; note = 2'-Omethyluridine
  modified_base 21: mod_base = OTHER; note = Adenosine phosphorothiorate
  modified_base 22: mod_base = OTHER; note = 2'-Omethylguanosine
  modified_base 23: mod_base = OTHER; note = 2'-Omethylcytosine
  modified_base 24: mod_base = OTHER; note = 2'-Omethylguanosine
  modified_base 25: mod_base = OTHER; note = 2'-Omethylcytosine
  modified_base 41: mod_base = OTHER; note = 2'-Omethylcytosine
  modified_base 42: mod_base = OTHER; note = 2'-Omethyladenosine
  modified_base 43: mod_base = OTHER; note = 2'-Omethyladenosine
  modified_base 44: mod_base = OTHER; note = 2'-Omethyladenosine
  modified_base 49: mod_base = OTHER; note = 2'-Omethylcytosine
  modified_base 50: mod_base = OTHER; note = 2'-Omethylcytosine
  modified_base 52: mod_base = OTHER; note = 2'-Omethylguanosine
  modified_base 54: mod_base = OTHER; note = Uridine phosphorothiorate
  modified_base 55: mod_base = OTHER; note = Uridine phosphorothiorate
  modified_base 61: mod_base = OTHER; note = 2'-Omethylcytosine
  modified_base 65: mod_base = OTHER; note = 2'-Omethylguanosine
  modified_base 73: mod_base = OTHER; note = 2'-Omethylguanosine

SEQ ID NO: 1796 - RNA, 76 nt, synthetic construct; identical to SEQ ID NO: 625
  source 1..76: mol_type = other RNA
  modified_base 1: mod_base = OTHER; note = 2'-Omethylguanosine
  modified_base 13: mod_base = OTHER; note = 2'-Omethylcytosine
  modified_base 14: mod_base = OTHER; note = 2'-Omethyladenosine
  modified_base 15: mod_base = OTHER; note = 2'-Omethyladenosine
  modified_base 16: mod_base = OTHER; note = 2'-Omethyluridine
  modified_base 17: mod_base = OTHER; note = 2'-Omethylguanosine
  modified_base 18: mod_base = OTHER; note = 2'-Omethylguanosine
  modified_base 19: mod_base = OTHER; note = Adenosine phosphorothiorate
  modified_base 20: mod_base = OTHER; note = 2'-Omethyluridine
  modified_base 21: mod_base = OTHER; note = Adenosine phosphorothiorate
  modified_base 22: mod_base = OTHER; note = 2'-Omethylguanosine
  modified_base 23: mod_base = OTHER; note = 2'-Omethylcytosine
  modified_base 24: mod_base = OTHER; note = 2'-Omethylguanosine
  modified_base 25: mod_base = OTHER; note = 2'-Omethylcytosine
  modified_base 41: mod_base = OTHER; note = 2'-fluorocytosine
  modified_base 42: mod_base = OTHER; note = 2'-Omethyladenosine
  modified_base 43: mod_base = OTHER; note = 2'-Omethyladenosine
  modified_base 44: mod_base = OTHER; note = 2'-fluoroadenosine
  modified_base 49: mod_base = OTHER; note = 2'-Omethylcytosine
  modified_base 50: mod_base = OTHER; note = 2'-Omethylcytosine
  modified_base 52: mod_base = OTHER; note = 2'-Omethylguanosine
  modified_base 54: mod_base = OTHER; note = Uridine phosphorothiorate
  modified_base 55: mod_base = OTHER; note = Uridine phosphorothiorate
  modified_base 61: mod_base = OTHER; note = 2'-Omethylcytosine
  modified_base 65: mod_base = OTHER; note = 2'-Omethylguanosine
  modified_base 73: mod_base = OTHER; note = 2'-Omethylguanosine

SEQ ID NO: 1797 - RNA, 76 nt, synthetic construct; identical to SEQ ID NO: 625
  source 1..76: mol_type = other RNA
  modified_base 1: mod_base = OTHER; note = 2'-Omethylguanosine
  modified_base 13: mod_base = OTHER; note = 2'-Omethylcytosine
  modified_base 17: mod_base = OTHER; note = 2'-Omethylguanosine
  modified_base 18: mod_base = OTHER; note = 2'-Omethylguanosine
  modified_base 22: mod_base = OTHER; note = 2'-Omethylguanosine
  modified_base 23: mod_base = OTHER; note = 2'-Omethylcytosine
  modified_base 24: mod_base = OTHER; note = 2'-Omethylguanosine
  modified_base 25: mod_base = OTHER; note = 2'-Omethylcytosine
  modified_base 33: mod_base = OTHER; note = Uridine phosphorothiorate
  modified_base 34: mod_base = OTHER; note = 2'-Omethyluridine
  modified_base 35: mod_base = OTHER; note = Cytosine phosphorothiorate
  modified_base 37: mod_base = OTHER; note = Adenosine phosphorothiorate
  modified_base 38: mod_base = OTHER; note = Adenosine phosphorothiorate
  modified_base 41: mod_base = OTHER; note = 2'-Omethylcytosine
  modified_base 42: mod_base = OTHER; note = 2'-Omethyladenosine
  modified_base 43: mod_base = OTHER; note = 2'-Omethyladenosine
  modified_base 44: mod_base = OTHER; note = 2'-Omethyladenosine
  modified_base 49: mod_base = OTHER; note = 2'-Omethylcytosine
  modified_base 50: mod_base = OTHER; note = 2'-Omethylcytosine
  modified_base 52: mod_base = OTHER; note = 2'-Omethylguanosine
  modified_base 54: mod_base = OTHER; note = Uridine phosphorothiorate
  modified_base 55: mod_base = OTHER; note = Uridine phosphorothiorate
  modified_base 61: mod_base = OTHER; note = 2'-Omethylcytosine
  modified_base 65: mod_base = OTHER; note = 2'-Omethylguanosine
  modified_base 73: mod_base = OTHER; note = 2'-Omethylguanosine

SEQ ID NO: 1798 - RNA, 76 nt, synthetic construct; identical to SEQ ID NO: 625
  source 1..76: mol_type = other RNA
  modified_base 1: mod_base = OTHER; note = 2'-Omethylguanosine
  modified_base 13: mod_base = OTHER; note = 2'-Omethylcytosine
  modified_base 17: mod_base = OTHER; note = 2'-Omethylguanosine
  modified_base 18: mod_base = OTHER; note = 2'-Omethylguanosine
  modified_base 22: mod_base = OTHER; note = 2'-Omethylguanosine
  modified_base 23: mod_base = OTHER; note = 2'-Omethylcytosine
  modified_base 24: mod_base = OTHER; note = 2'-Omethylguanosine
  modified_base 25: mod_base = OTHER; note = 2'-Omethylcytosine
  modified_base 33: mod_base = OTHER; note = Uridine phosphorothiorate
  modified_base 34: mod_base = OTHER; note = 2'-Omethyluridine
  modified_base 35: mod_base = OTHER; note = Cytosine phosphorothiorate
  modified_base 37: mod_base = OTHER; note = Adenosine phosphorothiorate
  modified_base 38: mod_base = OTHER; note = Adenosine phosphorothiorate
  modified_base 41: mod_base = OTHER; note = 2'-fluorocytosine
  modified_base 42: mod_base = OTHER; note = 2'-Omethyladenosine
  modified_base 43: mod_base = OTHER; note = 2'-Omethyladenosine
  modified_base 44: mod_base = OTHER; note = 2'-fluoroadenosine
  modified_base 49: mod_base = OTHER; note = 2'-Omethylcytosine
  modified_base 50: mod_base = OTHER; note = 2'-Omethylcytosine
  modified_base 52: mod_base = OTHER; note = 2'-Omethylguanosine
  modified_base 54: mod_base = OTHER; note = Uridine phosphorothiorate
  modified_base 55: mod_base = OTHER; note = Uridine phosphorothiorate
  modified_base 61: mod_base = OTHER; note = 2'-Omethylcytosine
  modified_base 65: mod_base = OTHER; note = 2'-Omethylguanosine
  modified_base 73: mod_base = OTHER; note = 2'-Omethylguanosine

SEQ ID NO: 1799 - RNA, 76 nt, synthetic construct; identical to SEQ ID NO: 625
  source 1..76: mol_type = other RNA
  modified_base 1: mod_base = OTHER; note = 2'-Omethylguanosine
  modified_base 13: mod_base = OTHER; note = 2'-Omethylcytosine
  modified_base 17: mod_base = OTHER; note = 2'-Omethylguanosine
  modified_base 18: mod_base = OTHER; note = 2'-Omethylguanosine
  modified_base 22: mod_base = OTHER; note = 2'-Omethylguanosine
  modified_base 23: mod_base = OTHER; note = 2'-Omethylcytosine
  modified_base 24: mod_base = OTHER; note = 2'-Omethylguanosine
  modified_base 25: mod_base = OTHER; note = 2'-Omethylcytosine
  modified_base 33: mod_base = OTHER; note = 2'-fluorouridine
  modified_base 34: mod_base = OTHER; note = 2'-Omethyluridine
  modified_base 35: mod_base = OTHER; note = Cytosine phosphorothiorate
  modified_base 37: mod_base = OTHER; note = Adenosine phosphorothiorate
  modified_base 38: mod_base = OTHER; note = Adenosine phosphorothiorate
  modified_base 41: mod_base = OTHER; note = 2'-Omethylcytosine
  modified_base 42: mod_base = OTHER; note = 2'-Omethyladenosine
  modified_base 43: mod_base = OTHER; note = 2'-Omethyladenosine
  modified_base 44: mod_base = OTHER; note = 2'-Omethyladenosine
  modified_base 49: mod_base = OTHER; note = 2'-Omethylcytosine
  modified_base 50: mod_base = OTHER; note = 2'-Omethylcytosine
  modified_base 52: mod_base = OTHER; note = 2'-Omethylguanosine
  modified_base 54: mod_base = OTHER; note = Uridine phosphorothiorate
  modified_base 55: mod_base = OTHER; note = Uridine phosphorothiorate
  modified_base 61: mod_base = OTHER; note = 2'-Omethylcytosine
  modified_base 65: mod_base = OTHER; note = 2'-Omethylguanosine
  modified_base 73: mod_base = OTHER; note = 2'-Omethylguanosine

SEQ ID NO: 1800 - RNA, 76 nt, synthetic construct; identical to SEQ ID NO: 625
  source 1..76: mol_type = other RNA
  modified_base 1: mod_base = OTHER; note = 2'-Omethylguanosine
  modified_base 13: mod_base = OTHER; note = 2'-Omethylcytosine
  modified_base 17: mod_base = OTHER; note = 2'-Omethylguanosine
  modified_base 18: mod_base = OTHER; note = 2'-Omethylguanosine
  modified_base 22: mod_base = OTHER; note = 2'-Omethylguanosine
  modified_base 23: mod_base = OTHER; note = 2'-Omethylcytosine
  modified_base 24: mod_base = OTHER; note = 2'-Omethylguanosine
  modified_base 25: mod_base = OTHER; note = 2'-Omethylcytosine
  modified_base 33: mod_base = OTHER; note = 2'-fluorouridine
  modified_base 34: mod_base = OTHER; note = 2'-Omethyluridine
  modified_base 35: mod_base = OTHER; note = Cytosine phosphorothiorate
  modified_base 37: mod_base = OTHER; note = Adenosine phosphorothiorate
  modified_base 38: mod_base = OTHER; note = Adenosine phosphorothiorate
  modified_base 41: mod_base = OTHER; note = 2'-fluorocytosine
  modified_base 42: mod_base = OTHER; note = 2'-Omethyladenosine
  modified_base 43: mod_base = OTHER; note = 2'-Omethyladenosine
  modified_base 44: mod_base = OTHER; note = 2'-fluoroadenosine
  modified_base 49: mod_base = OTHER; note = 2'-Omethylcytosine
  modified_base 50: mod_base = OTHER; note = 2'-Omethylcytosine
  modified_base 52: mod_base = OTHER; note = 2'-Omethylguanosine
  modified_base 54: mod_base = OTHER; note = Uridine phosphorothiorate
  modified_base 55: mod_base = OTHER; note = Uridine phosphorothiorate
  modified_base 61: mod_base = OTHER; note = 2'-Omethylcytosine
  modified_base 65: mod_base = OTHER; note = 2'-Omethylguanosine
  modified_base 73: mod_base = OTHER; note = 2'-Omethylguanosine

SEQ ID NO: 1801 - RNA, 76 nt, synthetic construct; identical to SEQ ID NO: 625
  source 1..76: mol_type = other RNA
  modified_base 1: mod_base = OTHER; note = 2'-Omethylguanosine
  modified_base 13: mod_base = OTHER; note = 2'-Omethylcytosine
  modified_base 14: mod_base = OTHER; note = 2'-Omethyladenosine
  modified_base 15: mod_base = OTHER; note = 2'-Omethyladenosine
  modified_base 16: mod_base = OTHER; note = 2'-Omethyluridine
  modified_base 17: mod_base = OTHER; note = 2'-Omethylguanosine
  modified_base 18: mod_base = OTHER; note = 2'-Omethylguanosine
  modified_base 19: mod_base = OTHER; note = Adenosine phosphorothiorate
  modified_base 20: mod_base = OTHER; note = 2'-Omethyluridine
  modified_base 21: mod_base = OTHER; note = Adenosine phosphorothiorate
  modified_base 22: mod_base = OTHER; note = 2'-Omethylguanosine
  modified_base 23: mod_base = OTHER; note = 2'-Omethylcytosine
  modified_base 24: mod_base = OTHER; note = 2'-Omethylguanosine
  modified_base 25: mod_base = OTHER; note = 2'-Omethylcytosine
  modified_base 33: mod_base = OTHER; note = Uridine phosphorothiorate
  modified_base 34: mod_base = OTHER; note = 2'-Omethyluridine
  modified_base 35: mod_base = OTHER; note = Cytosine phosphorothiorate
  modified_base 37: mod_base = OTHER; note = Adenosine phosphorothiorate
  modified_base 38: mod_base = OTHER; note = Adenosine phosphorothiorate
  modified_base 49: mod_base = OTHER; note = 2'-Omethylcytosine
  modified_base 50: mod_base = OTHER; note = 2'-Omethylcytosine
  modified_base 52: mod_base = OTHER; note = 2'-Omethylguanosine
  modified_base 54: mod_base = OTHER; note = Uridine phosphorothiorate
  modified_base 55: mod_base = OTHER; note = Uridine phosphorothiorate
  modified_base 61: mod_base = OTHER; note = 2'-Omethylcytosine
  modified_base 65: mod_base = OTHER; note = 2'-Omethylguanosine
  modified_base 73: mod_base = OTHER; note = 2'-Omethylguanosine

SEQ ID NO: 1802 - RNA, 76 nt, synthetic construct; identical to SEQ ID NO: 625
  source 1..76: mol_type = other RNA
  modified_base 1: mod_base = OTHER; note = 2'-Omethylguanosine
  modified_base 13: mod_base = OTHER; note = 2'-Omethylcytosine
  modified_base 14: mod_base = OTHER; note = 2'-Omethyladenosine
  modified_base 15: mod_base = OTHER; note = 2'-Omethyladenosine
  modified_base 16: mod_base = OTHER; note = 2'-Omethyluridine
  modified_base 17: mod_base = OTHER; note = 2'-Omethylguanosine
  modified_base 18: mod_base = OTHER; note = 2'-Omethylguanosine
  modified_base 19: mod_base = OTHER; note = Adenosine phosphorothiorate
  modified_base 20: mod_base = OTHER; note = 2'-Omethyluridine
  modified_base 21: mod_base = OTHER; note = Adenosine phosphorothiorate
  modified_base 22: mod_base = OTHER; note = 2'-Omethylguanosine
  modified_base 23: mod_base = OTHER; note = 2'-Omethylcytosine
  modified_base 24: mod_base = OTHER; note = 2'-Omethylguanosine
  modified_base 25: mod_base = OTHER; note = 2'-Omethylcytosine
  modified_base 33: mod_base = OTHER; note = 2'-fluorouridine
  modified_base 34: mod_base = OTHER; note = 2'-Omethyluridine
  modified_base 35: mod_base = OTHER; note = Cytosine phosphorothiorate
  modified_base 37: mod_base = OTHER; note = Adenosine phosphorothiorate
  modified_base 38: mod_base = OTHER; note = Adenosine phosphorothiorate
  modified_base 49: mod_base = OTHER; note = 2'-Omethylcytosine
  modified_base 50: mod_base = OTHER; note = 2'-Omethylcytosine
  modified_base 52: mod_base = OTHER; note = 2'-Omethylguanosine
  modified_base 54: mod_base = OTHER; note = Uridine phosphorothiorate
  modified_base 55: mod_base = OTHER; note = Uridine phosphorothiorate
  modified_base 61: mod_base = OTHER; note = 2'-Omethylcytosine
  modified_base 65: mod_base = OTHER; note = 2'-Omethylguanosine
  modified_base 73: mod_base = OTHER; note = 2'-Omethylguanosine

SEQ ID NO: 1803 - RNA, 76 nt, synthetic construct; identical to SEQ ID NO: 625
  source 1..76: mol_type = other RNA
  modified_base 1: mod_base = OTHER; note = 2'-Omethylguanosine
  modified_base 13: mod_base = OTHER; note = 2'-Omethylcytosine
  modified_base 14: mod_base = OTHER; note = 2'-Omethyladenosine
  modified_base 15: mod_base = OTHER; note = 2'-Omethyladenosine
  modified_base 16: mod_base = OTHER; note = 2'-Omethyluridine
  modified_base 17: mod_base = OTHER; note = 2'-Omethylguanosine
  modified_base 18: mod_base = OTHER; note = 2'-Omethylguanosine
  modified_base 19: mod_base = OTHER; note = Adenosine phosphorothiorate
  modified_base 20: mod_base = OTHER; note = 2'-Omethyluridine
  modified_base 21: mod_base = OTHER; note = Adenosine phosphorothiorate
  modified_base 22: mod_base = OTHER; note = 2'-Omethylguanosine
  modified_base 23: mod_base = OTHER; note = 2'-Omethylcytosine
  modified_base 24: mod_base = OTHER; note = 2'-Omethylguanosine
  modified_base 25: mod_base = OTHER; note = 2'-Omethylcytosine
  modified_base 33: mod_base = OTHER; note = Uridine phosphorothiorate
  modified_base 34: mod_base = OTHER; note = 2'-Omethyluridine
  modified_base 35: mod_base = OTHER; note = Cytosine phosphorothiorate
  modified_base 37: mod_base = OTHER; note = Adenosine phosphorothiorate
  modified_base 38: mod_base = OTHER; note = Adenosine phosphorothiorate
  modified_base 41: mod_base = OTHER; note = 2'-Omethylcytosine
  modified_base 42: mod_base = OTHER; note = 2'-Omethyladenosine
  modified_base 43: mod_base = OTHER; note = 2'-Omethyladenosine
  modified_base 44: mod_base = OTHER; note = 2'-Omethyladenosine
  modified_base 49: mod_base = OTHER; note = 2'-Omethylcytosine
  modified_base 50: mod_base = OTHER; note = 2'-Omethylcytosine
  modified_base 52: mod_base = OTHER; note = 2'-Omethylguanosine
  modified_base 54: mod_base = OTHER; note = Uridine phosphorothiorate
  modified_base 55: mod_base = OTHER; note = Uridine phosphorothiorate
  modified_base 61: mod_base = OTHER; note = 2'-Omethylcytosine
  modified_base 65: mod_base = OTHER; note = 2'-Omethylguanosine
  modified_base 73: mod_base = OTHER; note = 2'-Omethylguanosine

SEQ ID NO: 1804 - RNA, 76 nt, synthetic construct; identical to SEQ ID NO: 625
  source 1..76: mol_type = other RNA
  modified_base 1: mod_base = OTHER; note = 2'-Omethylguanosine
  modified_base 13: mod_base = OTHER; note = 2'-Omethylcytosine
  modified_base 14: mod_base = OTHER; note = 2'-Omethyladenosine
  modified_base 15: mod_base = OTHER; note = 2'-Omethyladenosine
  modified_base 16: mod_base = OTHER; note = 2'-Omethyluridine
  modified_base 17: mod_base = OTHER; note = 2'-Omethylguanosine
  modified_base 18: mod_base = OTHER; note = 2'-Omethylguanosine
  modified_base 19: mod_base = OTHER; note = Adenosine phosphorothiorate
  modified_base 20: mod_base = OTHER; note = 2'-Omethyluridine
  modified_base 21: mod_base = OTHER; note = Adenosine phosphorothiorate
  modified_base 22: mod_base = OTHER; note = 2'-Omethylguanosine
  modified_base 23: mod_base = OTHER; note = 2'-Omethylcytosine
  modified_base 24: mod_base = OTHER; note = 2'-Omethylguanosine
  modified_base 25: mod_base = OTHER; note = 2'-Omethylcytosine
  modified_base 33: mod_base = OTHER; note = Uridine phosphorothiorate
  modified_base 34: mod_base = OTHER; note = 2'-Omethyluridine
  modified_base 35: mod_base = OTHER; note = Cytosine phosphorothiorate
  modified_base 37: mod_base = OTHER; note = Adenosine phosphorothiorate
  modified_base 38: mod_base = OTHER; note = Adenosine phosphorothiorate
  modified_base 41: mod_base = OTHER; note = 2'-fluorocytosine
  modified_base 42: mod_base = OTHER; note = 2'-Omethyladenosine
  modified_base 43: mod_base = OTHER; note = 2'-Omethyladenosine
  modified_base 44: mod_base = OTHER; note = 2'-fluoroadenosine
  modified_base 49: mod_base = OTHER; note = 2'-Omethylcytosine
  modified_base 50: mod_base = OTHER; note = 2'-Omethylcytosine
  modified_base 52: mod_base = OTHER; note = 2'-Omethylguanosine
  modified_base 54: mod_base = OTHER; note = Uridine phosphorothiorate
  modified_base 55: mod_base = OTHER; note = Uridine phosphorothiorate
  modified_base 61: mod_base = OTHER; note = 2'-Omethylcytosine
  modified_base 65: mod_base = OTHER; note = 2'-Omethylguanosine
  modified_base 73: mod_base = OTHER; note = 2'-Omethylguanosine

SEQ ID NO: 1805 - RNA, 76 nt, synthetic construct; identical to SEQ ID NO: 625
  source 1..76: mol_type = other RNA
  modified_base 1: mod_base = OTHER; note = 2'-Omethylguanosine
  modified_base 13: mod_base = OTHER; note = 2'-Omethylcytosine
  modified_base 14: mod_base = OTHER; note = 2'-Omethyladenosine
  modified_base 15: mod_base = OTHER; note = 2'-Omethyladenosine
  modified_base 16: mod_base = OTHER; note = 2'-Omethyluridine
  modified_base 17: mod_base = OTHER; note = 2'-Omethylguanosine
  modified_base 18: mod_base = OTHER; note = 2'-Omethylguanosine
  modified_base 19: mod_base = OTHER; note = Adenosine phosphorothiorate
  modified_base 20: mod_base = OTHER; note = 2'-Omethyluridine
  modified_base 21: mod_base = OTHER; note = Adenosine phosphorothiorate
  modified_base 22: mod_base = OTHER; note = 2'-Omethylguanosine
  modified_base 23: mod_base = OTHER; note = 2'-Omethylcytosine
  modified_base 24: mod_base = OTHER; note = 2'-Omethylguanosine
  modified_base 25: mod_base = OTHER; note = 2'-Omethylcytosine
  modified_base 33: mod_base = OTHER; note = 2'-fluorouridine
  modified_base 34: mod_base = OTHER; note = 2'-Omethyluridine
  modified_base 35: mod_base = OTHER; note = Cytosine phosphorothiorate
  modified_base 37: mod_base = OTHER; note = Adenosine phosphorothiorate
  modified_base 38: mod_base = OTHER; note = Adenosine phosphorothiorate
  modified_base 41: mod_base = OTHER; note = 2'-Omethylcytosine
  modified_base 42: mod_base = OTHER; note = 2'-Omethyladenosine
  modified_base 43: mod_base = OTHER; note = 2'-Omethyladenosine
  modified_base 44: mod_base = OTHER; note = 2'-Omethyladenosine
  modified_base 49: mod_base = OTHER; note = 2'-Omethylcytosine
  modified_base 50: mod_base = OTHER; note = 2'-Omethylcytosine
  modified_base 52: mod_base = OTHER; note = 2'-Omethylguanosine
  modified_base 54: mod_base = OTHER; note = Uridine phosphorothiorate
  modified_base 55: mod_base = OTHER; note = Uridine phosphorothiorate
  modified_base 61: mod_base = OTHER; note = 2'-Omethylcytosine
  modified_base 65: mod_base = OTHER; note = 2'-Omethylguanosine
  modified_base 73: mod_base = OTHER; note = 2'-Omethylguanosine

SEQ ID NO: 1806 - RNA, 76 nt, synthetic construct; identical to SEQ ID NO: 625
  source 1..76: mol_type = other RNA
  modified_base 1: mod_base = OTHER; note = 2'-Omethylguanosine
  modified_base 13: mod_base = OTHER; note = 2'-Omethylcytosine
  modified_base 14: mod_base = OTHER; note = 2'-Omethyladenosine
  modified_base 15: mod_base = OTHER; note = 2'-Omethyladenosine
  modified_base 16: mod_base = OTHER; note = 2'-Omethyluridine
  modified_base 17: mod_base = OTHER; note = 2'-Omethylguanosine
  modified_base 18: mod_base = OTHER; note = 2'-Omethylguanosine
  modified_base 19: mod_base = OTHER; note = Adenosine phosphorothiorate
  modified_base 20: mod_base = OTHER; note = 2'-Omethyluridine
  modified_base 21: mod_base = OTHER; note = Adenosine phosphorothiorate
  modified_base 22: mod_base = OTHER; note = 2'-Omethylguanosine
  modified_base 23: mod_base = OTHER; note = 2'-Omethylcytosine
  modified_base 24: mod_base = OTHER; note = 2'-Omethylguanosine
  modified_base 25: mod_base = OTHER; note = 2'-Omethylcytosine
  modified_base 33: mod_base = OTHER; note = 2'-fluorouridine
  modified_base 34: mod_base = OTHER; note = 2'-Omethyluridine
  modified_base 35: mod_base = OTHER; note = Cytosine phosphorothiorate
  modified_base 37: mod_base = OTHER; note = Adenosine phosphorothiorate
  modified_base 38: mod_base = OTHER; note = Adenosine phosphorothiorate
  modified_base 41: mod_base = OTHER; note = 2'-fluorocytosine
  modified_base 42: mod_base = OTHER; note = 2'-Omethyladenosine
  modified_base 43: mod_base = OTHER; note = 2'-Omethyladenosine
  modified_base 44: mod_base = OTHER; note = 2'-fluoroadenosine
  modified_base 49: mod_base = OTHER; note = 2'-Omethylcytosine
  modified_base 50: mod_base = OTHER; note = 2'-Omethylcytosine
  modified_base 52: mod_base = OTHER; note = 2'-Omethylguanosine
  modified_base 54: mod_base = OTHER; note = Uridine phosphorothiorate
  modified_base 55: mod_base = OTHER; note = Uridine phosphorothiorate
  modified_base 61: mod_base = OTHER; note = 2'-Omethylcytosine
  modified_base 65: mod_base = OTHER; note = 2'-Omethylguanosine
  modified_base 73: mod_base = OTHER; note = 2'-Omethylguanosine

SEQ ID NO: 1807 - RNA, 76 nt, synthetic construct; identical to SEQ ID NO: 625
  source 1..76: mol_type = other RNA
  modified_base 1: mod_base = OTHER; note = 2'-Omethylguanosine
  modified_base 10: mod_base = OTHER; note = 2'-Omethylguanosine
  modified_base 11: mod_base = OTHER; note = 2'-Omethylcytosine
  modified_base 12: mod_base = OTHER; note = 2'-Omethylguanosine
  modified_base 13: mod_base = OTHER; note = 2'-Omethylcytosine
  modified_base 14: mod_base = OTHER; note = 2'-Omethyladenosine
  modified_base 15: mod_base = OTHER; note = 2'-Omethyladenosine
  modified_base 16: mod_base = OTHER; note = 2'-Omethyluridine
  modified_base 17: mod_base = OTHER; note = 2'-Omethylguanosine
  modified_base 18: mod_base = OTHER; note = 2'-Omethylguanosine
  modified_base 19: mod_base = OTHER; note = Adenosine phosphorothiorate
  modified_base 20: mod_base = OTHER; note = 2'-Omethyluridine
  modified_base 21: mod_base = OTHER; note = Adenosine phosphorothiorate
  modified_base 22: mod_base = OTHER; note = 2'-Omethylguanosine
  modified_base 23: mod_base = OTHER; note = 2'-Omethylcytosine
  modified_base 24: mod_base = OTHER; note = 2'-Omethylguanosine
  modified_base 25: mod_base = OTHER; note = 2'-Omethylcytosine
  modified_base 41: mod_base = OTHER; note = 2'-Omethylcytosine
  modified_base 42: mod_base = OTHER; note = 2'-Omethyladenosine
  modified_base 43: mod_base = OTHER; note = 2'-Omethyladenosine
  modified_base 44: mod_base = OTHER; note = 2'-Omethyladenosine
  modified_base 49: mod_base = OTHER; note = 2'-Omethylcytosine
  modified_base 50: mod_base = OTHER; note = 2'-Omethylcytosine
  modified_base 52: mod_base = OTHER; note = 2'-Omethylguanosine
  modified_base 54: mod_base = OTHER; note = Uridine phosphorothiorate
  modified_base 55: mod_base = OTHER; note = Uridine phosphorothiorate
  modified_base 61: mod_base = OTHER; note = 2'-Omethylcytosine
  modified_base 65: mod_base = OTHER; note = 2'-Omethylguanosine
  modified_base 73: mod_base = OTHER; note = 2'-Omethylguanosine

SEQ ID NO: 1808 - RNA, 76 nt, synthetic construct; identical to SEQ ID NO: 625
  source 1..76: mol_type = other RNA
  modified_base 1: mod_base = OTHER; note = 2'-Omethylguanosine
  modified_base 10: mod_base = OTHER; note = 2'-Omethylguanosine
  modified_base 11: mod_base = OTHER; note = 2'-Omethylcytosine
  modified_base 12: mod_base = OTHER; note = 2'-Omethylguanosine
  modified_base 13: mod_base = OTHER; note = 2'-Omethylcytosine
  modified_base 14: mod_base = OTHER; note = 2'-Omethyladenosine
  modified_base 15: mod_base = OTHER; note = 2'-Omethyladenosine
  modified_base 16: mod_base = OTHER; note = 2'-Omethyluridine
  modified_base 17: mod_base = OTHER; note = 2'-Omethylguanosine
  modified_base 18: mod_base = OTHER; note = 2'-Omethylguanosine
  modified_base 19: mod_base = OTHER; note = Adenosine phosphorothiorate
  modified_base 20: mod_base = OTHER; note = 2'-Omethyluridine
  modified_base 21: mod_base = OTHER; note = Adenosine phosphorothiorate
  modified_base 22: mod_base = OTHER; note = 2'-Omethylguanosine
  modified_base 23: mod_base = OTHER; note = 2'-Omethylcytosine
  modified_base 24: mod_base = OTHER; note = 2'-Omethylguanosine
  modified_base 25: mod_base = OTHER; note = 2'-Omethylcytosine
  modified_base 41: mod_base = OTHER; note = 2'-fluorocytosine
  modified_base 42: mod_base = OTHER; note = 2'-Omethyladenosine
  modified_base 43: mod_base = OTHER; note = 2'-Omethyladenosine
  modified_base 44: mod_base = OTHER; note = 2'-fluoroadenosine
  modified_base 49: mod_base = OTHER; note = 2'-Omethylcytosine
  modified_base 50: mod_base = OTHER; note = 2'-Omethylcytosine
  modified_base 52: mod_base = OTHER; note = 2'-Omethylguanosine
  modified_base 54: mod_base = OTHER; note = Uridine phosphorothiorate
  modified_base 55: mod_base = OTHER; note = Uridine phosphorothiorate
  modified_base 61: mod_base = OTHER; note = 2'-Omethylcytosine
  modified_base 65: mod_base = OTHER; note = 2'-Omethylguanosine
  modified_base 73: mod_base = OTHER; note = 2'-Omethylguanosine

SEQ ID NO: 1809 - RNA, 76 nt, synthetic construct; identical to SEQ ID NO: 625
  source 1..76: mol_type = other RNA
  modified_base 1: mod_base = OTHER; note = 2'-Omethylguanosine
  modified_base 10: mod_base = OTHER; note = 2'-Omethylguanosine
  modified_base 11: mod_base = OTHER; note = 2'-Omethylcytosine
  modified_base 12: mod_base = OTHER; note = 2'-Omethylguanosine
  modified_base 13: mod_base = OTHER; note = 2'-Omethylcytosine
  modified_base 17: mod_base = OTHER; note = 2'-Omethylguanosine
  modified_base 18: mod_base = OTHER; note = 2'-Omethylguanosine
  modified_base 22: mod_base = OTHER; note = 2'-Omethylguanosine
  modified_base 23: mod_base = OTHER; note = 2'-Omethylcytosine
  modified_base 24: mod_base = OTHER; note = 2'-Omethylguanosine
  modified_base 25: mod_base = OTHER; note = 2'-Omethylcytosine
  modified_base 33: mod_base = OTHER; note = Uridine phosphorothiorate
  modified_base 34: mod_base = OTHER; note = 2'-Omethyluridine
  modified_base 35: mod_base = OTHER; note = Cytosine phosphorothiorate
  modified_base 37: mod_base = OTHER; note = Adenosine phosphorothiorate
  modified_base 38: mod_base = OTHER; note = Adenosine phosphorothiorate
  modified_base 41: mod_base = OTHER; note = 2'-Omethylcytosine
  modified_base 42: mod_base = OTHER; note = 2'-Omethyladenosine
  modified_base 43: mod_base = OTHER; note = 2'-Omethyladenosine
  modified_base 44: mod_base = OTHER; note = 2'-Omethyladenosine
  modified_base 49: mod_base = OTHER; note = 2'-Omethylcytosine
  modified_base 50: mod_base = OTHER; note = 2'-Omethylcytosine
  modified_base 52: mod_base = OTHER; note = 2'-Omethylguanosine
  modified_base 54: mod_base = OTHER; note = Uridine phosphorothiorate
  modified_base 55: mod_base = OTHER; note = Uridine phosphorothiorate
  modified_base 61: mod_base = OTHER; note = 2'-Omethylcytosine
  modified_base 65: mod_base = OTHER; note = 2'-Omethylguanosine
  modified_base 73: mod_base = OTHER; note = 2'-Omethylguanosine

SEQ ID NO: 1810 - RNA, 76 nt, synthetic construct; identical to SEQ ID NO: 625
  source 1..76: mol_type = other RNA
  modified_base 1: mod_base = OTHER; note = 2'-Omethylguanosine
  modified_base 10: mod_base = OTHER; note = 2'-Omethylguanosine
  modified_base 11: mod_base = OTHER; note = 2'-Omethylcytosine
  modified_base 12: mod_base = OTHER; note = 2'-Omethylguanosine
  modified_base 13: mod_base = OTHER; note = 2'-Omethylcytosine
  modified_base 17: mod_base = OTHER; note = 2'-Omethylguanosine
  modified_base 18: mod_base = OTHER; note = 2'-Omethylguanosine
  modified_base 22: mod_base = OTHER; note = 2'-Omethylguanosine
  modified_base 23: mod_base = OTHER; note = 2'-Omethylcytosine
  modified_base 24: mod_base = OTHER; note = 2'-Omethylguanosine
  modified_base 25: mod_base = OTHER; note = 2'-Omethylcytosine
  modified_base 33: mod_base = OTHER; note = Uridine phosphorothiorate
  modified_base 34: mod_base = OTHER; note = 2'-Omethyluridine
  modified_base 35: mod_base = OTHER; note = Cytosine phosphorothiorate
  modified_base 37: mod_base = OTHER; note = Adenosine phosphorothiorate
  modified_base 38: mod_base = OTHER; note = Adenosine phosphorothiorate
  modified_base 41: mod_base = OTHER; note = 2'-fluorocytosine
  modified_base 42: mod_base = OTHER; note = 2'-Omethyladenosine
  modified_base 43: mod_base = OTHER; note = 2'-Omethyladenosine
  modified_base 44: mod_base = OTHER; note = 2'-fluoroadenosine
  modified_base 49: mod_base = OTHER; note = 2'-Omethylcytosine
  modified_base 50: mod_base = OTHER; note = 2'-Omethylcytosine
  modified_base 52: mod_base = OTHER; note = 2'-Omethylguanosine
  modified_base 54: mod_base = OTHER; note = Uridine phosphorothiorate
  modified_base 55: mod_base = OTHER; note = Uridine phosphorothiorate
  modified_base 61: mod_base = OTHER; note = 2'-Omethylcytosine
  modified_base 65: mod_base = OTHER; note = 2'-Omethylguanosine
  modified_base 73: mod_base = OTHER; note = 2'-Omethylguanosine

SEQ ID NO: 1811 - RNA, 76 nt, synthetic construct; identical to SEQ ID NO: 625
  source 1..76: mol_type = other RNA
  modified_base 1: mod_base = OTHER; note = 2'-Omethylguanosine
  modified_base 10: mod_base = OTHER; note = 2'-Omethylguanosine
  modified_base 11: mod_base = OTHER; note = 2'-Omethylcytosine
  modified_base 12: mod_base = OTHER; note = 2'-Omethylguanosine
  modified_base 13: mod_base = OTHER; note = 2'-Omethylcytosine
  modified_base 17: mod_base = OTHER; note = 2'-Omethylguanosine
  modified_base 18: mod_base = OTHER; note = 2'-Omethylguanosine
  modified_base 22: mod_base = OTHER; note = 2'-Omethylguanosine
  modified_base 23: mod_base = OTHER; note = 2'-Omethylcytosine
  modified_base 24: mod_base = OTHER; note = 2'-Omethylguanosine
  modified_base 25: mod_base = OTHER; note = 2'-Omethylcytosine
  modified_base 33: mod_base = OTHER; note = 2'-fluorouridine
  modified_base 34: mod_base = OTHER; note = 2'-Omethyluridine
  modified_base 35: mod_base = OTHER; note = Cytosine phosphorothiorate
  modified_base 37: mod_base = OTHER; note = Adenosine phosphorothiorate
  modified_base 38: mod_base = OTHER; note = Adenosine phosphorothiorate
  modified_base 41: mod_base = OTHER; note = 2'-Omethylcytosine
  modified_base 42: mod_base = OTHER; note = 2'-Omethyladenosine
  modified_base 43: mod_base = OTHER; note = 2'-Omethyladenosine
  modified_base 44: mod_base = OTHER; note = 2'-Omethyladenosine
  modified_base 49: mod_base = OTHER; note = 2'-Omethylcytosine
  modified_base 50: mod_base = OTHER; note = 2'-Omethylcytosine
  modified_base 52: mod_base = OTHER; note = 2'-Omethylguanosine
  modified_base 54: mod_base = OTHER; note = Uridine phosphorothiorate
  modified_base 55: mod_base = OTHER; note = Uridine phosphorothiorate
  modified_base 61: mod_base = OTHER; note = 2'-Omethylcytosine
  modified_base 65: mod_base = OTHER; note = 2'-Omethylguanosine
  modified_base 73: mod_base = OTHER; note = 2'-Omethylguanosine

SEQ ID NO: 1812 - RNA, 76 nt, synthetic construct; identical to SEQ ID NO: 625
  source 1..76: mol_type = other RNA
  modified_base 1: mod_base = OTHER; note = 2'-Omethylguanosine
  modified_base 10: mod_base = OTHER; note = 2'-Omethylguanosine
  modified_base 11: mod_base = OTHER; note = 2'-Omethylcytosine
  modified_base 12: mod_base = OTHER; note = 2'-Omethylguanosine
  modified_base 13: mod_base = OTHER; note = 2'-Omethylcytosine
  modified_base 17: mod_base = OTHER; note = 2'-Omethylguanosine
  modified_base 18: mod_base = OTHER; note = 2'-Omethylguanosine
  modified_base 22: mod_base = OTHER; note = 2'-Omethylguanosine
  modified_base 23: mod_base = OTHER; note = 2'-Omethylcytosine
  modified_base 24: mod_base = OTHER; note = 2'-Omethylguanosine
  modified_base 25: mod_base = OTHER; note = 2'-Omethylcytosine
  modified_base 33: mod_base = OTHER; note = 2'-fluorouridine
  modified_base 34: mod_base = OTHER; note = 2'-Omethyluridine
  modified_base 35: mod_base = OTHER; note = Cytosine phosphorothiorate
  modified_base 37: mod_base = OTHER; note = Adenosine phosphorothiorate
  modified_base 38: mod_base = OTHER; note = Adenosine phosphorothiorate
  modified_base 41: mod_base = OTHER; note = 2'-fluorocytosine
  modified_base 42: mod_base = OTHER; note = 2'-Omethyladenosine
  modified_base 43: mod_base = OTHER; note = 2'-Omethyladenosine
  modified_base 44: mod_base = OTHER; note = 2'-fluoroadenosine
  modified_base 49: mod_base = OTHER; note = 2'-Omethylcytosine
  modified_base 50: mod_base = OTHER; note = 2'-Omethylcytosine
  modified_base 52: mod_base = OTHER; note = 2'-Omethylguanosine
  modified_base 54: mod_base = OTHER; note = Uridine phosphorothiorate
  modified_base 55: mod_base = OTHER; note = Uridine phosphorothiorate
  modified_base 61: mod_base = OTHER; note = 2'-Omethylcytosine
  modified_base 65: mod_base = OTHER; note = 2'-Omethylguanosine
  modified_base 73: mod_base = OTHER; note = 2'-Omethylguanosine

SEQ ID NO: 1813 - RNA, 76 nt, synthetic construct; identical to SEQ ID NO: 625
  source 1..76: mol_type = other RNA
  modified_base 1: mod_base = OTHER; note = 2'-Omethylguanosine
  modified_base 10: mod_base = OTHER; note = 2'-Omethylguanosine
  modified_base 11: mod_base = OTHER; note = 2'-Omethylcytosine
  modified_base 12: mod_base = OTHER; note = 2'-Omethylguanosine
  modified_base 13: mod_base = OTHER; note = 2'-Omethylcytosine
  modified_base 14: mod_base = OTHER; note = 2'-Omethyladenosine
  modified_base 15: mod_base = OTHER; note = 2'-Omethyladenosine
  modified_base 16: mod_base = OTHER; note = 2'-Omethyluridine
  modified_base 17: mod_base = OTHER; note = 2'-Omethylguanosine
  modified_base 18: mod_base = OTHER; note = 2'-Omethylguanosine
  modified_base 19: mod_base = OTHER; note = Adenosine phosphorothiorate
  modified_base 20: mod_base = OTHER; note = 2'-Omethyluridine
  modified_base 21: mod_base = OTHER; note = Adenosine phosphorothiorate
  modified_base 22: mod_base = OTHER; note = 2'-Omethylguanosine
  modified_base 23: mod_base = OTHER; note = 2'-Omethylcytosine
  modified_base 24: mod_base = OTHER; note = 2'-Omethylguanosine
  modified_base 25: mod_base = OTHER; note = 2'-Omethylcytosine
  modified_base 33: mod_base = OTHER; note = Uridine phosphorothiorate
  modified_base 34: mod_base = OTHER; note = 2'-Omethyluridine
  modified_base 35: mod_base = OTHER; note = Cytosine phosphorothiorate
  modified_base 37: mod_base = OTHER; note = Adenosine phosphorothiorate
  modified_base 38: mod_base = OTHER; note = Adenosine phosphorothiorate
  modified_base 49: mod_base = OTHER; note = 2'-Omethylcytosine
  modified_base 50: mod_base = OTHER; note = 2'-Omethylcytosine
  modified_base 52: mod_base = OTHER; note = 2'-Omethylguanosine
  modified_base 54: mod_base = OTHER; note = Uridine phosphorothiorate
  modified_base 55: mod_base = OTHER; note = Uridine phosphorothiorate
  modified_base 61: mod_base = OTHER; note = 2'-Omethylcytosine
  modified_base 65: mod_base = OTHER; note = 2'-Omethylguanosine
  modified_base 73: mod_base = OTHER; note = 2'-Omethylguanosine

SEQ ID NO: 1814 - RNA, 76 nt, synthetic construct; identical to SEQ ID NO: 625
  source 1..76: mol_type = other RNA
  modified_base 1: mod_base = OTHER; note = 2'-Omethylguanosine
  modified_base 10: mod_base = OTHER; note = 2'-Omethylguanosine
  modified_base 11: mod_base = OTHER; note = 2'-Omethylcytosine
  modified_base 12: mod_base = OTHER; note = 2'-Omethylguanosine
  modified_base 13: mod_base = OTHER; note = 2'-Omethylcytosine
  modified_base 14: mod_base = OTHER; note = 2'-Omethyladenosine
  modified_base 15: mod_base = OTHER; note = 2'-Omethyladenosine
  modified_base 16: mod_base = OTHER; note = 2'-Omethyluridine
  modified_base 17: mod_base = OTHER; note = 2'-Omethylguanosine
  modified_base 18: mod_base = OTHER; note = 2'-Omethylguanosine
  modified_base 19: mod_base = OTHER; note = Adenosine phosphorothiorate
  modified_base 20: mod_base = OTHER; note = 2'-Omethyluridine
  modified_base 21: mod_base = OTHER; note = Adenosine phosphorothiorate
  modified_base 22: mod_base = OTHER; note = 2'-Omethylguanosine
  modified_base 23: mod_base = OTHER; note = 2'-Omethylcytosine
  modified_base 24: mod_base = OTHER; note = 2'-Omethylguanosine
  modified_base 25: mod_base = OTHER; note = 2'-Omethylcytosine
  modified_base 33: mod_base = OTHER; note = 2'-fluorouridine
  modified_base 34: mod_base = OTHER; note = 2'-Omethyluridine
  modified_base 35: mod_base = OTHER; note = Cytosine phosphorothiorate
  modified_base 37: mod_base = OTHER; note = Adenosine phosphorothiorate
  modified_base 38: mod_base = OTHER; note = Adenosine phosphorothiorate
  modified_base 49: mod_base = OTHER; note = 2'-Omethylcytosine
  modified_base 50: mod_base = OTHER; note = 2'-Omethylcytosine
  modified_base 52: mod_base = OTHER; note = 2'-Omethylguanosine
  modified_base 54: mod_base = OTHER; note = Uridine phosphorothiorate
  modified_base 55: mod_base = OTHER; note = Uridine phosphorothiorate
  modified_base 61: mod_base = OTHER; note = 2'-Omethylcytosine
  modified_base 65: mod_base = OTHER; note = 2'-Omethylguanosine
  modified_base 73: mod_base = OTHER; note = 2'-Omethylguanosine

SEQ ID NO: 1815 - RNA, 76 nt, synthetic construct; identical to SEQ ID NO: 625
  source 1..76: mol_type = other RNA
  modified_base 1: mod_base = OTHER; note = 2'-Omethylguanosine
  modified_base 10: mod_base = OTHER; note = 2'-Omethylguanosine
  modified_base 11: mod_base = OTHER; note = 2'-Omethylcytosine
  modified_base 12: mod_base = OTHER; note = 2'-Omethylguanosine
  modified_base 13: mod_base = OTHER; note = 2'-Omethylcytosine
  modified_base 14: mod_base = OTHER; note = 2'-Omethyladenosine
  modified_base 15: mod_base = OTHER; note = 2'-Omethyladenosine
  modified_base 16: mod_base = OTHER; note = 2'-Omethyluridine
  modified_base 17: mod_base = OTHER; note = 2'-Omethylguanosine
  modified_base 18: mod_base = OTHER; note = 2'-Omethylguanosine
  modified_base 19: mod_base = OTHER; note = Adenosine phosphorothiorate
  modified_base 20: mod_base = OTHER; note = 2'-Omethyluridine
  modified_base 21: mod_base = OTHER; note = Adenosine phosphorothiorate
  modified_base 22: mod_base = OTHER; note = 2'-Omethylguanosine
  modified_base 23: mod_base = OTHER; note = 2'-Omethylcytosine
  modified_base 24: mod_base = OTHER; note = 2'-Omethylguanosine
  modified_base 25: mod_base = OTHER; note = 2'-Omethylcytosine
  modified_base 33: mod_base = OTHER; note = Uridine phosphorothiorate
  modified_base 34: mod_base = OTHER; note = 2'-Omethyluridine
  modified_base 35: mod_base = OTHER; note = Cytosine phosphorothiorate
  modified_base 37: mod_base = OTHER; note = Adenosine phosphorothiorate
  modified_base 38: mod_base = OTHER; note = Adenosine phosphorothiorate
  modified_base 41: mod_base = OTHER; note = 2'-Omethylcytosine
  modified_base 42: mod_base = OTHER; note = 2'-Omethyladenosine
  modified_base 43: mod_base = OTHER; note = 2'-Omethyladenosine
  modified_base 44: mod_base = OTHER; note = 2'-Omethyladenosine
  modified_base 49: mod_base = OTHER; note = 2'-Omethylcytosine
  modified_base 50: mod_base = OTHER; note = 2'-Omethylcytosine
  modified_base 52: mod_base = OTHER; note = 2'-Omethylguanosine
  modified_base 54: mod_base = OTHER; note = Uridine phosphorothiorate
  modified_base 55: mod_base = OTHER; note = Uridine phosphorothiorate
  modified_base 61: mod_base = OTHER; note = 2'-Omethylcytosine
  modified_base 65: mod_base = OTHER; note = 2'-Omethylguanosine
  modified_base 73: mod_base = OTHER; note = 2'-Omethylguanosine

SEQ ID NO: 1816 - RNA, 76 nt, synthetic construct; identical to SEQ ID NO: 625
  source 1..76: mol_type = other RNA
  modified_base 1: mod_base = OTHER; note = 2'-Omethylguanosine
  modified_base 10: mod_base = OTHER; note = 2'-Omethylguanosine
  modified_base 11: mod_base = OTHER; note = 2'-Omethylcytosine
  modified_base 12: mod_base = OTHER; note = 2'-Omethylguanosine
  modified_base 13: mod_base = OTHER; note = 2'-Omethylcytosine
  modified_base 14: mod_base = OTHER; note = 2'-Omethyladenosine
  modified_base 15: mod_base = OTHER; note = 2'-Omethyladenosine
  modified_base 16: mod_base = OTHER; note = 2'-Omethyluridine
  modified_base 17: mod_base = OTHER; note = 2'-Omethylguanosine
  modified_base 18: mod_base = OTHER; note = 2'-Omethylguanosine
  modified_base 19: mod_base = OTHER; note = Adenosine phosphorothiorate
  modified_base 20: mod_base = OTHER; note = 2'-Omethyluridine
  modified_base 21: mod_base = OTHER; note = Adenosine phosphorothiorate
  modified_base 22: mod_base = OTHER; note = 2'-Omethylguanosine
  modified_base 23: mod_base = OTHER; note = 2'-Omethylcytosine
  modified_base 24: mod_base = OTHER; note = 2'-Omethylguanosine
  modified_base 25: mod_base = OTHER; note = 2'-Omethylcytosine
  modified_base 33: mod_base = OTHER; note = Uridine phosphorothiorate
  modified_base 34: mod_base = OTHER; note = 2'-Omethyluridine
  modified_base 35: mod_base = OTHER; note = Cytosine phosphorothiorate
  modified_base 37: mod_base = OTHER; note = Adenosine phosphorothiorate
  modified_base 38: mod_base = OTHER; note = Adenosine phosphorothiorate
  modified_base 41: mod_base = OTHER; note = 2'-fluorocytosine
  modified_base 42: mod_base = OTHER; note = 2'-Omethyladenosine
  modified_base 43: mod_base = OTHER; note = 2'-Omethyladenosine
  modified_base 44: mod_base = OTHER; note = 2'-fluoroadenosine
  modified_base 49: mod_base = OTHER; note = 2'-Omethylcytosine
  modified_base 50: mod_base = OTHER; note = 2'-Omethylcytosine
  modified_base 52: mod_base = OTHER; note = 2'-Omethylguanosine
  modified_base 54: mod_base = OTHER; note = Uridine phosphorothiorate
  modified_base 55: mod_base = OTHER; note = Uridine phosphorothiorate
  modified_base 61: mod_base = OTHER; note = 2'-Omethylcytosine
  modified_base 65: mod_base = OTHER; note = 2'-Omethylguanosine
  modified_base 73: mod_base = OTHER; note = 2'-Omethylguanosine

SEQ ID NO: 1817 - RNA, 76 nt, synthetic construct; identical to SEQ ID NO: 625
  source 1..76: mol_type = other RNA
  modified_base 1: mod_base = OTHER; note = 2'-Omethylguanosine
  modified_base 10: mod_base = OTHER; note = 2'-Omethylguanosine
  modified_base 11: mod_base = OTHER; note = 2'-Omethylcytosine
  modified_base 12: mod_base = OTHER; note = 2'-Omethylguanosine
  modified_base 13: mod_base = OTHER; note = 2'-Omethylcytosine
  modified_base 14: mod_base = OTHER; note = 2'-Omethyladenosine
  modified_base 15: mod_base = OTHER; note = 2'-Omethyladenosine
  modified_base 16: mod_base = OTHER; note = 2'-Omethyluridine
  modified_base 17: mod_base = OTHER; note = 2'-Omethylguanosine
  modified_base 18: mod_base = OTHER; note = 2'-Omethylguanosine
  modified_base 19: mod_base = OTHER; note = Adenosine phosphorothiorate
  modified_base 20: mod_base = OTHER; note = 2'-Omethyluridine
  modified_base 21: mod_base = OTHER; note = Adenosine phosphorothiorate
  modified_base 22: mod_base = OTHER; note = 2'-Omethylguanosine
  modified_base 23: mod_base = OTHER; note = 2'-Omethylcytosine
  modified_base 24: mod_base = OTHER; note = 2'-Omethylguanosine
  modified_base 25: mod_base = OTHER; note = 2'-Omethylcytosine
  modified_base 33: mod_base = OTHER; note = 2'-fluorouridine
  modified_base 34: mod_base = OTHER; note = 2'-Omethyluridine
  modified_base 35: mod_base = OTHER; note = Cytosine phosphorothiorate
  modified_base 37: mod_base = OTHER; note = Adenosine phosphorothiorate
  modified_base 38: mod_base = OTHER; note = Adenosine phosphorothiorate
  modified_base 41: mod_base = OTHER; note = 2'-Omethylcytosine
  modified_base 42: mod_base = OTHER; note = 2'-Omethyladenosine
  modified_base 43: mod_base = OTHER; note = 2'-Omethyladenosine
  modified_base 44: mod_base = OTHER; note = 2'-Omethyladenosine
  modified_base 49: mod_base = OTHER; note = 2'-Omethylcytosine
  modified_base 50: mod_base = OTHER; note = 2'-Omethylcytosine
  modified_base 52: mod_base = OTHER; note = 2'-Omethylguanosine
  modified_base 54: mod_base = OTHER; note = Uridine phosphorothiorate
  modified_base 55: mod_base = OTHER; note = Uridine phosphorothiorate
  modified_base 61: mod_base = OTHER; note = 2'-Omethylcytosine
  modified_base 65: mod_base = OTHER; note = 2'-Omethylguanosine
  modified_base 73: mod_base = OTHER; note = 2'-Omethylguanosine

SEQ ID NO: 1818 - RNA, 76 nt, synthetic construct; identical to SEQ ID NO: 625
  source 1..76: mol_type = other RNA
  modified_base 1: mod_base = OTHER; note = 2'-Omethylguanosine
  modified_base 10: mod_base = OTHER; note = 2'-Omethylguanosine
  modified_base 11: mod_base = OTHER; note = 2'-Omethylcytosine
  modified_base 12: mod_base = OTHER; note = 2'-Omethylguanosine
  modified_base 13: mod_base = OTHER; note = 2'-Omethylcytosine
  modified_base 14: mod_base = OTHER; note = 2'-Omethyladenosine
  modified_base 15: mod_base = OTHER; note = 2'-Omethyladenosine
  modified_base 16: mod_base = OTHER; note = 2'-Omethyluridine
  modified_base 17: mod_base = OTHER; note = 2'-Omethylguanosine
  modified_base 18: mod_base = OTHER; note = 2'-Omethylguanosine
  modified_base 19: mod_base = OTHER; note = Adenosine phosphorothiorate
  modified_base 20: mod_base = OTHER; note = 2'-Omethyluridine
  modified_base 21: mod_base = OTHER; note = Adenosine phosphorothiorate
  modified_base 22: mod_base = OTHER; note = 2'-Omethylguanosine
  modified_base 23: mod_base = OTHER; note = 2'-Omethylcytosine
  modified_base 24: mod_base = OTHER; note = 2'-Omethylguanosine
  modified_base 25: mod_base = OTHER; note = 2'-Omethylcytosine
  modified_base 33: mod_base = OTHER; note = 2'-fluorouridine
  modified_base 34: mod_base = OTHER; note = 2'-Omethyluridine
  modified_base 35: mod_base = OTHER; note = Cytosine phosphorothiorate
  modified_base 37: mod_base = OTHER; note = Adenosine phosphorothiorate
  modified_base 38: mod_base = OTHER; note = Adenosine phosphorothiorate
  modified_base 41: mod_base = OTHER; note = 2'-fluorocytosine
  modified_base 42: mod_base = OTHER; note = 2'-Omethyladenosine
  modified_base 43: mod_base = OTHER; note = 2'-Omethyladenosine
  modified_base 44: mod_base = OTHER; note = 2'-fluoroadenosine
  modified_base 49: mod_base = OTHER; note = 2'-Omethylcytosine
  modified_base 50: mod_base = OTHER; note = 2'-Omethylcytosine
  modified_base 52: mod_base = OTHER; note = 2'-Omethylguanosine
  modified_base 54: mod_base = OTHER; note = Uridine phosphorothiorate
  modified_base 55: mod_base = OTHER; note = Uridine phosphorothiorate
  modified_base 61: mod_base = OTHER; note = 2'-Omethylcytosine
  modified_base 65: mod_base = OTHER; note = 2'-Omethylguanosine
  modified_base 73: mod_base = OTHER; note = 2'-Omethylguanosine

SEQ ID NO: 1819 - RNA, 76 nt, synthetic construct; identical to SEQ ID NO: 625
  source 1..76: mol_type = other RNA
  modified_base 14: mod_base = OTHER; note = Adenosine phosphorothiorate
  modified_base 15: mod_base = OTHER; note = Adenosine phosphorothiorate
  modified_base 16: mod_base = OTHER; note = Uridine phosphorothiorate
  modified_base 17: mod_base = OTHER; note = Guanosine phosphorothiorate
  modified_base 18: mod_base = OTHER; note = Guanosine phosphorothiorate
  modified_base 19: mod_base = OTHER; note = Adenosine phosphorothiorate
  modified_base 20: mod_base = OTHER; note = Uridine phosphorothiorate
  modified_base 21: mod_base = OTHER; note = Adenosine phosphorothiorate
  modified_base 32: mod_base = OTHER; note = Cytosine phosphorothiorate
  modified_base 33: mod_base = OTHER; note = Uridine phosphorothiorate
  modified_base 34: mod_base = OTHER; note = Uridine phosphorothiorate
  modified_base 35: mod_base = OTHER; note = Cytosine phosphorothiorate
  modified_base 36: mod_base = OTHER; note = Adenosine phosphorothiorate
  modified_base 37: mod_base = OTHER; note = Adenosine phosphorothiorate
  modified_base 38: mod_base = OTHER; note = Adenosine phosphorothiorate
  modified_base 41: mod_base = OTHER; note = Cytosine phosphorothiorate
  modified_base 42: mod_base = OTHER; note = Adenosine phosphorothiorate
  modified_base 43: mod_base = OTHER; note = Adenosine phosphorothiorate
  modified_base 44: mod_base = OTHER; note = Adenosine phosphorothiorate
  modified_base 45: mod_base = OTHER; note = Guanosine phosphorothiorate
  modified_base 46: mod_base = OTHER; note = Guanosine phosphorothiorate
  modified_base 47: mod_base = OTHER; note = Uridine phosphorothiorate
  modified_base 48: mod_base = OTHER; note = Uridine phosphorothiorate
  modified_base 54: mod_base = OTHER; note = Uridine phosphorothiorate
  modified_base 55: mod_base = OTHER; note = Uridine phosphorothiorate
  modified_base 56: mod_base = OTHER; note = Cytosine phosphorothiorate
  modified_base 57: mod_base = OTHER; note = Guanosine phosphorothiorate
  modified_base 58: mod_base = OTHER; note = Adenosine phosphorothiorate
  modified_base 59: mod_base = OTHER; note = Guanosine phosphorothiorate
  modified_base 60: mod_base = OTHER; note = Uridine phosphorothiorate

SEQ ID NO: 1820 - RNA, 76 nt, synthetic construct; identical to SEQ ID NO: 625
  source 1..76: mol_type = other RNA
  modified_base 1: mod_base = OTHER; note = 2'-Omethylguanosine phosphorothiorate
  modified_base 2: mod_base = OTHER; note = 2'-Omethylguanosine phosphorothiorate
  modified_base 3: mod_base = OTHER; note = 2'-Omethylcytosine
  modified_base 14: mod_base = OTHER; note = Adenosine phosphorothiorate
  modified_base 15: mod_base = OTHER; note = Adenosine phosphorothiorate
  modified_base 16: mod_base = OTHER; note = Uridine phosphorothiorate
  modified_base 17: mod_base = OTHER; note = Guanosine phosphorothiorate
  modified_base 18: mod_base = OTHER; note = Guanosine phosphorothiorate
  modified_base 19: mod_base = OTHER; note = Adenosine phosphorothiorate
  modified_base 20: mod_base = OTHER; note = Uridine phosphorothiorate
  modified_base 21: mod_base = OTHER; note = Adenosine phosphorothiorate
  modified_base 32: mod_base = OTHER; note = Cytosine phosphorothiorate
  modified_base 33: mod_base = OTHER; note = Uridine phosphorothiorate
  modified_base 34: mod_base = OTHER; note = Uridine phosphorothiorate
  modified_base 35: mod_base = OTHER; note = Cytosine phosphorothiorate
  modified_base 36: mod_base = OTHER; note = Adenosine phosphorothiorate
  modified_base 37: mod_base = OTHER; note = Adenosine phosphorothiorate
  modified_base 38: mod_base = OTHER; note = Adenosine phosphorothiorate
  modified_base 41: mod_base = OTHER; note = Cytosine phosphorothiorate
  modified_base 42: mod_base = OTHER; note = Adenosine phosphorothiorate
  modified_base 43: mod_base = OTHER; note = Adenosine phosphorothiorate
  modified_base 44: mod_base = OTHER; note = Adenosine phosphorothiorate
  modified_base 45: mod_base = OTHER; note = Guanosine phosphorothiorate
  modified_base 46: mod_base = OTHER; note = Guanosine phosphorothiorate
  modified_base 47: mod_base = OTHER; note = Uridine phosphorothiorate
  modified_base 48: mod_base = OTHER; note = Uridine phosphorothiorate
  modified_base 54: mod_base = OTHER; note = Uridine phosphorothiorate
  modified_base 55: mod_base = OTHER; note = Uridine phosphorothiorate
  modified_base 56: mod_base = OTHER; note = Cytosine phosphorothiorate
  modified_base 57: mod_base = OTHER; note = Guanosine phosphorothiorate
  modified_base 58: mod_base = OTHER; note = Adenosine phosphorothiorate
  modified_base 59: mod_base = OTHER; note = Guanosine phosphorothiorate
  modified_base 60: mod_base = OTHER; note = Uridine phosphorothiorate
  modified_base 73: mod_base = OTHER; note = 2'-Omethylguanosine
  modified_base 74: mod_base = OTHER; note = 2'-Omethylcytosine phosphorothiorate
  modified_base 75: mod_base = OTHER; note = 2'-Omethylcytosine phosphorothiorate
  modified_base 76: mod_base = OTHER; note = 2'-Omethyladenosine

SEQ ID NO: 1821 - RNA, 76 nt, synthetic construct; identical to SEQ ID NO: 625
  source 1..76: mol_type = other RNA
  modified_base 1: mod_base = OTHER; note = 2'-Omethylguanosine phosphorothiorate
  modified_base 2: mod_base = OTHER; note = 2'-Omethylguanosine phosphorothiorate
  modified_base 3: mod_base = OTHER; note = 2'-Omethylcytosine
  modified_base 32: mod_base = OTHER; note = Cytosine phosphorothiorate
  modified_base 33: mod_base = OTHER; note = Uridine phosphorothiorate
  modified_base 34: mod_base = OTHER; note = Uridine phosphorothiorate
  modified_base 35: mod_base = OTHER; note = Cytosine phosphorothiorate
  modified_base 36: mod_base = OTHER; note = Adenosine phosphorothiorate
  modified_base 37: mod_base = OTHER; note = Adenosine phosphorothiorate
  modified_base 38: mod_base = OTHER; note = Adenosine phosphorothiorate
  modified_base 41: mod_base = OTHER; note = Cytosine phosphorothiorate
  modified_base 42: mod_base = OTHER; note = Adenosine phosphorothiorate
  modified_base 43: mod_base = OTHER; note = Adenosine phosphorothiorate
  modified_base 44: mod_base = OTHER; note = Adenosine phosphorothiorate
  modified_base 45: mod_base = OTHER; note = Guanosine phosphorothiorate
  modified_base 46: mod_base = OTHER; note = Guanosine phosphorothiorate
  modified_base 47: mod_base = OTHER; note = Uridine phosphorothiorate
  modified_base 48: mod_base = OTHER; note = Uridine phosphorothiorate
  modified_base 54: mod_base = OTHER; note = Uridine phosphorothiorate
  modified_base 55: mod_base = OTHER; note = Uridine phosphorothiorate
  modified_base 56: mod_base = OTHER; note = Cytosine phosphorothiorate
  modified_base 57: mod_base = OTHER; note = Guanosine phosphorothiorate
  modified_base 58: mod_base = OTHER; note = Adenosine phosphorothiorate
  modified_base 59: mod_base = OTHER; note = Guanosine phosphorothiorate
  modified_base 60: mod_base = OTHER; note = Uridine phosphorothiorate
  modified_base 73: mod_base = OTHER; note = 2'-Omethylguanosine
  modified_base 74: mod_base = OTHER; note = 2'-Omethylcytosine phosphorothiorate
  modified_base 75: mod_base = OTHER; note = 2'-Omethylcytosine phosphorothiorate
  modified_base 76: mod_base = OTHER; note = 2'-Omethyladenosine

SEQ ID NO: 1822 - RNA, 76 nt, synthetic construct; identical to SEQ ID NO: 625
  source 1..76: mol_type = other RNA
  modified_base 1: mod_base = OTHER; note = 2'-Omethylguanosine phosphorothiorate
  modified_base 2: mod_base = OTHER; note = 2'-Omethylguanosine phosphorothiorate
  modified_base 3: mod_base = OTHER; note = 2'-Omethylcytosine
  modified_base 14: mod_base = OTHER; note = Adenosine phosphorothiorate
  modified_base 15: mod_base = OTHER; note = Adenosine phosphorothiorate
  modified_base 16: mod_base = OTHER; note = Uridine phosphorothiorate
  modified_base 17: mod_base = OTHER; note = Guanosine phosphorothiorate
  modified_base 18: mod_base = OTHER; note = Guanosine phosphorothiorate
  modified_base 19: mod_base = OTHER; note = Adenosine phosphorothiorate
  modified_base 20: mod_base = OTHER; note = Uridine phosphorothiorate
  modified_base 21: mod_base = OTHER; note = Adenosine phosphorothiorate
  modified_base 41: mod_base = OTHER; note = Cytosine phosphorothiorate
  modified_base 42: mod_base = OTHER; note = Adenosine phosphorothiorate
  modified_base 43: mod_base = OTHER; note = Adenosine phosphorothiorate
  modified_base 44: mod_base = OTHER; note = Adenosine phosphorothiorate
  modified_base 45: mod_base = OTHER; note = Guanosine phosphorothiorate
  modified_base 46: mod_base = OTHER; note = Guanosine phosphorothiorate
  modified_base 47: mod_base = OTHER; note = Uridine phosphorothiorate
  modified_base 48: mod_base = OTHER; note = Uridine phosphorothiorate
  modified_base 54: mod_base = OTHER; note = Uridine phosphorothiorate
  modified_base 55: mod_base = OTHER; note = Uridine phosphorothiorate
  modified_base 56: mod_base = OTHER; note = Cytosine phosphorothiorate
  modified_base 57: mod_base = OTHER; note = Guanosine phosphorothiorate
  modified_base 58: mod_base = OTHER; note = Adenosine phosphorothiorate
  modified_base 59: mod_base = OTHER; note = Guanosine phosphorothiorate
  modified_base 60: mod_base = OTHER; note = Uridine phosphorothiorate
  modified_base 73: mod_base = OTHER; note = 2'-Omethylguanosine
  modified_base 74: mod_base = OTHER; note = 2'-Omethylcytosine phosphorothiorate
  modified_base 75: mod_base = OTHER; note = 2'-Omethylcytosine phosphorothiorate
  modified_base 76: mod_base = OTHER; note = 2'-Omethyladenosine

SEQ ID NO: 1823 - RNA, 76 nt, synthetic construct; identical to SEQ ID NO: 625
  source 1..76: mol_type = other RNA
  modified_base 1: mod_base = OTHER; note = 2'-Omethylguanosine phosphorothiorate
  modified_base 2: mod_base = OTHER; note = 2'-Omethylguanosine phosphorothiorate
  modified_base 3: mod_base = OTHER; note = 2'-Omethylcytosine
  modified_base 14: mod_base = OTHER; note = Adenosine phosphorothiorate
  modified_base 15: mod_base = OTHER; note = Adenosine phosphorothiorate
  modified_base 16: mod_base = OTHER; note = Uridine phosphorothiorate
  modified_base 17: mod_base = OTHER; note = Guanosine phosphorothiorate
  modified_base 18: mod_base = OTHER; note = Guanosine phosphorothiorate
  modified_base 19: mod_base = OTHER; note = Adenosine phosphorothiorate
  modified_base 20: mod_base = OTHER; note = Uridine phosphorothiorate
  modified_base 21: mod_base = OTHER; note = Adenosine phosphorothiorate
  modified_base 32: mod_base = OTHER; note = Cytosine phosphorothiorate
  modified_base 33: mod_base = OTHER; note = Uridine phosphorothiorate
  modified_base 34: mod_base = OTHER; note = Uridine phosphorothiorate
  modified_base 35: mod_base = OTHER; note = Cytosine phosphorothiorate
  modified_base 36: mod_base = OTHER; note = Adenosine phosphorothiorate
  modified_base 37: mod_base = OTHER; note = Adenosine phosphorothiorate
  modified_base 38: mod_base = OTHER; note = Adenosine phosphorothiorate
  modified_base 54: mod_base = OTHER; note = Uridine phosphorothiorate
  modified_base 55: mod_base = OTHER; note = Uridine phosphorothiorate
  modified_base 56: mod_base = OTHER; note = Cytosine phosphorothiorate
  modified_base 57: mod_base = OTHER; note = Guanosine phosphorothiorate
  modified_base 58: mod_base = OTHER; note = Adenosine phosphorothiorate
  modified_base 59: mod_base = OTHER; note = Guanosine phosphorothiorate
  modified_base 60: mod_base = OTHER; note = Uridine phosphorothiorate
  modified_base 73: mod_base = OTHER; note = 2'-Omethylguanosine
  modified_base 74: mod_base = OTHER; note = 2'-Omethylcytosine phosphorothiorate
  modified_base 75: mod_base = OTHER; note = 2'-Omethylcytosine phosphorothiorate
  modified_base 76: mod_base = OTHER; note = 2'-Omethyladenosine

SEQ ID NO: 1824 - RNA, 76 nt, synthetic construct; identical to SEQ ID NO: 625
  source 1..76: mol_type = other RNA
  modified_base 1: mod_base = OTHER; note = 2'-Omethylguanosine phosphorothiorate
  modified_base 2: mod_base = OTHER; note = 2'-Omethylguanosine phosphorothiorate
  modified_base 3: mod_base = OTHER; note = 2'-Omethylcytosine
  modified_base 14: mod_base = OTHER; note = Adenosine phosphorothiorate
  modified_base 15: mod_base = OTHER; note = Adenosine phosphorothiorate
  modified_base 16: mod_base = OTHER; note = Uridine phosphorothiorate
  modified_base 17: mod_base = OTHER; note = Guanosine phosphorothiorate
  modified_base 18: mod_base = OTHER; note = Guanosine phosphorothiorate
  modified_base 19: mod_base = OTHER; note = Adenosine phosphorothiorate
  modified_base 20: mod_base = OTHER; note = Uridine phosphorothiorate
  modified_base 21: mod_base = OTHER; note = Adenosine phosphorothiorate
  modified_base 32: mod_base = OTHER; note = Cytosine phosphorothiorate
  modified_base 33: mod_base = OTHER; note = Uridine phosphorothiorate
  modified_base 34: mod_base = OTHER; note = Uridine phosphorothiorate
  modified_base 35: mod_base = OTHER; note = Cytosine phosphorothiorate
  modified_base 36: mod_base = OTHER; note = Adenosine phosphorothiorate
  modified_base 37: mod_base = OTHER; note = Adenosine phosphorothiorate
  modified_base 38: mod_base = OTHER; note = Adenosine phosphorothiorate
  modified_base 41: mod_base = OTHER; note = Cytosine phosphorothiorate
  modified_base 42: mod_base = OTHER; note = Adenosine phosphorothiorate
  modified_base 43: mod_base = OTHER; note = Adenosine phosphorothiorate
  modified_base 44: mod_base = OTHER; note = Adenosine phosphorothiorate
  modified_base 45: mod_base = OTHER; note = Guanosine phosphorothiorate
  modified_base 46: mod_base = OTHER; note = Guanosine phosphorothiorate
  modified_base 47: mod_base = OTHER; note = Uridine phosphorothiorate
  modified_base 48: mod_base = OTHER; note = Uridine phosphorothiorate
  modified_base 73: mod_base = OTHER; note = 2'-Omethylguanosine
  modified_base 74: mod_base = OTHER; note = 2'-Omethylcytosine phosphorothiorate
  modified_base 75: mod_base = OTHER; note = 2'-Omethylcytosine phosphorothiorate
  modified_base 76: mod_base = OTHER; note = 2'-Omethyladenosine

SEQ ID NO: 1825 - RNA, 76 nt, synthetic construct; identical to SEQ ID NO: 625
  source 1..76: mol_type = other RNA
  modified_base 1: mod_base = OTHER; note = 2'-Omethylguanosine
  modified_base 19: mod_base = OTHER; note = 2'-Omethyladenosine
  modified_base 20: mod_base = OTHER; note = 2'-Omethyluridine
  modified_base 21: mod_base = OTHER; note = 2'-Omethyladenosine
  modified_base 22: mod_base = OTHER; note = 2'-Omethylguanosine
  modified_base 73: mod_base = OTHER; note = 2'-Omethylguanosine

SEQ ID NO: 1826 - RNA, 76 nt, synthetic construct; identical to SEQ ID NO: 625
  source 1..76: mol_type = other RNA
  modified_base 1: mod_base = OTHER; note = 2'-Omethylguanosine
  modified_base 19: mod_base = OTHER; note = 2'-Omethyladenosine
  modified_base 20: mod_base = OTHER; note = 2'-Omethyluridine
  modified_base 21: mod_base = OTHER; note = 2'-fluoroadenosine
  modified_base 22: mod_base = OTHER; note = 2'-Omethylguanosine
  modified_base 73: mod_base = OTHER; note = 2'-Omethylguanosine

SEQ ID NO: 1827 - RNA, 76 nt, synthetic construct; identical to SEQ ID NO: 625
  source 1..76: mol_type = other RNA
  modified_base 1: mod_base = OTHER; note = 2'-Omethylguanosine
  modified_base 19: mod_base = OTHER; note = 2'-fluoroadenosine
  modified_base 20: mod_base = OTHER; note = 2'-Omethyluridine
  modified_base 21: mod_base = OTHER; note = 2'-Omethyladenosine
  modified_base 22: mod_base = OTHER; note = 2'-Omethylguanosine
  modified_base 73: mod_base = OTHER; note = 2'-Omethylguanosine

SEQ ID NO: 1828 - RNA, 76 nt, synthetic construct; identical to SEQ ID NO: 625
  source 1..76: mol_type = other RNA
  modified_base 1: mod_base = OTHER; note = 2'-Omethylguanosine
  modified_base 19: mod_base = OTHER; note = 2'-fluoroadenosine
  modified_base 20: mod_base = OTHER; note = 2'-Omethyluridine
  modified_base 21: mod_base = OTHER; note = 2'-fluoroadenosine
  modified_base 22: mod_base = OTHER; note = 2'-Omethylguanosine
  modified_base 73: mod_base = OTHER; note = 2'-Omethylguanosine

SEQ ID NO: 1829 - RNA, 76 nt, synthetic construct; identical to SEQ ID NO: 625
  source 1..76: mol_type = other RNA
  modified_base 1: mod_base = OTHER; note = 2'-Omethylguanosine
  modified_base 19: mod_base = OTHER; note = 2'-fluoroadenosine
  modified_base 20: mod_base = OTHER; note = 2'-O-(2-Methoxyethyl) thymine
  modified_base 21: mod_base = OTHER; note = 2'-fluoroadenosine
  modified_base 22: mod_base = OTHER; note = 2'-Omethylguanosine
  modified_base 73: mod_base = OTHER; note = 2'-Omethylguanosine

SEQ ID NO: 1830 - RNA, 76 nt, synthetic construct; identical to SEQ ID NO: 625
  source 1..76: mol_type = other RNA
  modified_base 1: mod_base = OTHER; note = 2'-Omethylguanosine
  modified_base 19: mod_base = OTHER; note = 2'-Omethyladenosine
  modified_base 20: mod_base = OTHER; note = 2'-Omethyluridine phosphorothiorate
  modified_base 21: mod_base = OTHER; note = 2'-fluoroadenosine
  modified_base 22: mod_base = OTHER; note = 2'-Omethylguanosine
  modified_base 73: mod_base = OTHER; note = 2'-Omethylguanosine

SEQ ID NO: 1831 - RNA, 76 nt, synthetic construct; identical to SEQ ID NO: 625
  source 1..76: mol_type = other RNA
  modified_base 1: mod_base = OTHER; note = 2'-Omethylguanosine
  modified_base 19: mod_base = OTHER; note = 2'-fluoroadenosine
  modified_base 20: mod_base = OTHER; note = 2'-Omethyluridine phosphorothiorate
  modified_base 21: mod_base = OTHER; note = 2'-Omethyladenosine
  modified_base 22: mod_base = OTHER; note = 2'-Omethylguanosine
  modified_base 73: mod_base = OTHER; note = 2'-Omethylguanosine

SEQ ID NO: 1832 - RNA, 76 nt, synthetic construct; identical to SEQ ID NO: 625
  source 1..76: mol_type = other RNA
  modified_base 1: mod_base = OTHER; note = 2'-Omethylguanosine
  modified_base 19: mod_base = OTHER; note = 2'-fluoroadenosine
  modified_base 20: mod_base = OTHER; note = 2'-Omethyluridine phosphorothiorate
  modified_base 21: mod_base = OTHER; note = 2'-fluoroadenosine
  modified_base 22: mod_base = OTHER; note = 2'-Omethylguanosine
  modified_base 73: mod_base = OTHER; note = 2'-Omethylguanosine

SEQ ID NO: 1833 - RNA, 76 nt, synthetic construct; identical to SEQ ID NO: 625
  source 1..76: mol_type = other RNA
  modified_base 1: mod_base = OTHER; note = 2'-Omethylguanosine
  modified_base 19: mod_base = OTHER; note = 2'-fluoroadenosine
  modified_base 20: mod_base = OTHER; note = 2'-O-(2-Methoxyethyl) thymine phosphorothiorate
  modified_base 21: mod_base = OTHER; note = 2'-fluoroadenosine
  modified_base 22: mod_base = OTHER; note = 2'-Omethylguanosine
  modified_base 73: mod_base = OTHER; note = 2'-Omethylguanosine

SEQ ID NO: 1834 - RNA, 76 nt, synthetic construct; identical to SEQ ID NO: 625
  source 1..76: mol_type = other RNA
  modified_base 1: mod_base = OTHER; note = 2'-Omethylguanosine
  modified_base 19: mod_base = OTHER; note = 2'-Omethyladenosine
  modified_base 20: mod_base = OTHER; note = 2'-Omethyluridine
  modified_base 22: mod_base = OTHER; note = 2'-Omethylguanosine
  modified_base 73: mod_base = OTHER; note = 2'-Omethylguanosine

SEQ ID NO: 1835 - RNA, 76 nt, synthetic construct; identical to SEQ ID NO: 625
  source 1..76: mol_type = other RNA
  modified_base 1: mod_base = OTHER; note = 2'-Omethylguanosine
  modified_base 20: mod_base = OTHER; note = 2'-Omethyluridine
  modified_base 21: mod_base = OTHER; note = 2'-Omethyladenosine
  modified_base 22: mod_base = OTHER; note = 2'-Omethylguanosine
  modified_base 73: mod_base = OTHER; note = 2'-Omethylguanosine

SEQ ID NO: 1836 - RNA, 76 nt, synthetic construct; identical to SEQ ID NO: 625
  source 1..76: mol_type = other RNA
  modified_base 1: mod_base = OTHER; note = 2'-Omethylguanosine
  modified_base 19: mod_base = OTHER; note = 2'-Omethyladenosine
  modified_base 20: mod_base = OTHER; note = 2'-Omethyluridine
  modified_base 21: mod_base = OTHER; note = Adenosine phosphorothiorate
  modified_base 22: mod_base = OTHER; note = 2'-Omethylguanosine
  modified_base 73: mod_base = OTHER; note = 2'-Omethylguanosine

SEQ ID NO: 1837 - RNA, 76 nt, synthetic construct; identical to SEQ ID NO: 625
  source 1..76: mol_type = other RNA
  modified_base 1: mod_base = OTHER; note = 2'-Omethylguanosine
  modified_base 19: mod_base = OTHER; note = Adenosine phosphorothiorate
  modified_base 20: mod_base = OTHER; note = 2'-Omethyluridine
  modified_base 21: mod_base = OTHER; note = 2'-Omethyladenosine
  modified_base 22: mod_base = OTHER; note = 2'-Omethylguanosine
  modified_base 73: mod_base = OTHER; note = 2'-Omethylguanosine

SEQ ID NO: 1838 - RNA, 76 nt, synthetic construct; identical to SEQ ID NO: 625
  source 1..76: mol_type = other RNA
  modified_base 1: mod_base = OTHER; note = 2'-Omethylguanosine
  modified_base 19: mod_base = OTHER; note = 2'-fluoroadenosine
  modified_base 20: mod_base = OTHER; note = 2'-Omethyluridine
  modified_base 21: mod_base = OTHER; note = 2'-fluoroadenosine
  modified_base 22: mod_base = OTHER; note = 2'-O-(2-Methoxyethyl) guanosine
  modified_base 73: mod_base = OTHER; note = 2'-Omethylguanosine

SEQ ID NO: 1839 - RNA, 76 nt, synthetic construct; identical to SEQ ID NO: 625
  source 1..76: mol_type = other RNA
  modified_base 1: mod_base = OTHER; note = 2'-Omethylguanosine
  modified_base 19: mod_base = OTHER; note = 2'-fluoroadenosine
  modified_base 20: mod_base = OTHER; note = 2'-Omethyluridine phosphorothiorate
  modified_base 21: mod_base = OTHER; note = 2'-fluoroadenosine
  modified_base 22: mod_base = OTHER; note = 2'-O-(2-Methoxyethyl) guanosine
  modified_base 73: mod_base = OTHER; note = 2'-Omethylguanosine

SEQ ID NO: 1840 - RNA, 76 nt, synthetic construct; identical to SEQ ID NO: 625
  source 1..76: mol_type = other RNA
  modified_base 1: mod_base = OTHER; note = 2'-Omethylguanosine
  modified_base 19: mod_base = OTHER; note = 2'-fluoroadenosine
  modified_base 20: mod_base = OTHER; note = 2'-O-(2-Methoxyethyl) thymine
  modified_base 21: mod_base = OTHER; note = 2'-fluoroadenosine
  modified_base 22: mod_base = OTHER; note = 2'-O-(2-Methoxyethyl) guanosine
  modified_base 73: mod_base = OTHER; note = 2'-Omethylguanosine

SEQ ID NO: 1841 - RNA, 76 nt, synthetic construct; identical to SEQ ID NO: 625
  source 1..76: mol_type = other RNA
  modified_base 1: mod_base = OTHER; note = 2'-Omethylguanosine
  modified_base 19: mod_base = OTHER; note = 2'-fluoroadenosine
  modified_base 20: mod_base = OTHER; note = 2'-O-(2-Methoxyethyl) thymine phosphorothiorate
  modified_base 21: mod_base = OTHER; note = 2'-fluoroadenosine
  modified_base 22: mod_base = OTHER; note = 2'-O-(2-Methoxyethyl) guanosine
  modified_base 73: mod_base = OTHER; note = 2'-Omethylguanosine

SEQ ID NO: 1842 - RNA, 76 nt, synthetic construct; identical to SEQ ID NO: 625
  source 1..76: mol_type = other RNA
  modified_base 1: mod_base = OTHER; note = 2'-Omethylguanosine
  modified_base 19: mod_base = OTHER; note = 2'-Omethyladenosine phosphorothiorate
  modified_base 20: mod_base = OTHER; note = 2'-Omethyluridine phosphorothiorate
  modified_base 21: mod_base = OTHER; note = 2'-fluoroadenosine
  modified_base 22: mod_base = OTHER; note = 2'-Omethylguanosine phosphorothiorate
  modified_base 73: mod_base = OTHER; note = 2'-Omethylguanosine

SEQ ID NO: 1843 - RNA, 76 nt, synthetic construct; identical to SEQ ID NO: 625
  source 1..76: mol_type = other RNA
  modified_base 1: mod_base = OTHER; note = 2'-Omethylguanosine
  modified_base 19: mod_base = OTHER; note = 2'-fluoroadenosine phosphorothiorate
  modified_base 20: mod_base = OTHER; note = 2'-Omethyluridine phosphorothiorate
  modified_base 21: mod_base = OTHER; note = 2'-Omethyladenosine
  modified_base 22: mod_base = OTHER; note = 2'-Omethylguanosine phosphorothiorate
  modified_base 73: mod_base = OTHER; note = 2'-Omethylguanosine

SEQ ID NO: 1844 - RNA, 76 nt, synthetic construct; identical to SEQ ID NO: 625
  source 1..76: mol_type = other RNA
  modified_base 1: mod_base = OTHER; note = 2'-Omethylguanosine
  modified_base 19: mod_base = OTHER; note = 2'-fluoroadenosine phosphorothiorate
  modified_base 20: mod_base = OTHER; note = 2'-Omethyluridine phosphorothiorate
  modified_base 21: mod_base = OTHER; note = 2'-fluoroadenosine
  modified_base 22: mod_base = OTHER; note = 2'-Omethylguanosine phosphorothiorate
  modified_base 73: mod_base = OTHER; note = 2'-Omethylguanosine

SEQ ID NO: 1845 - RNA, 76 nt, synthetic construct; identical to SEQ ID NO: 625
  source 1..76: mol_type = other RNA
  modified_base 1: mod_base = OTHER; note = 2'-Omethylguanosine
  modified_base 19: mod_base = OTHER; note = 2'-fluoroadenosine phosphorothiorate
  modified_base 20: mod_base = OTHER; note = 2'-O-(2-Methoxyethyl) thymine phosphorothiorate
  modified_base 21: mod_base = OTHER; note = 2'-fluoroadenosine
  modified_base 22: mod_base = OTHER; note = 2'-Omethylguanosine phosphorothiorate
  modified_base 73: mod_base = OTHER; note = 2'-Omethylguanosine

SEQ ID NO: 1846 - RNA, 76 nt, synthetic construct; identical to SEQ ID NO: 625
  source 1..76: mol_type = other RNA
  modified_base 1: mod_base = OTHER; note = 2'-Omethylguanosine
  modified_base 19: mod_base = OTHER; note = 2'-Omethyladenosine phosphorothiorate
  modified_base 20: mod_base = OTHER; note = 2'-Omethyluridine phosphorothiorate
  modified_base 21: mod_base = OTHER; note = 2'-fluoroadenosine phosphorothiorate
  modified_base 22: mod_base = OTHER; note = 2'-Omethylguanosine phosphorothiorate
  modified_base 73: mod_base = OTHER; note = 2'-Omethylguanosine

SEQ ID NO: 1847 - RNA, 76 nt, synthetic construct; identical to SEQ ID NO: 625
  source 1..76: mol_type = other RNA
  modified_base 1: mod_base = OTHER; note = 2'-Omethylguanosine
  modified_base 19: mod_base = OTHER; note = 2'-fluoroadenosine phosphorothiorate
  modified_base 20: mod_base = OTHER; note = 2'-Omethyluridine phosphorothiorate
  modified_base 21: mod_base = OTHER; note = 2'-Omethyladenosine phosphorothiorate
  modified_base 22: mod_base = OTHER; note = 2'-Omethylguanosine phosphorothiorate
  modified_base 73: mod_base = OTHER; note = 2'-Omethylguanosine

SEQ ID NO: 1848 - RNA, 76 nt, synthetic construct; identical to SEQ ID NO: 625
  source 1..76: mol_type = other RNA
  modified_base 1: mod_base = OTHER; note = 2'-Omethylguanosine
  modified_base 19: mod_base = OTHER; note = 2'-fluoroadenosine phosphorothiorate
  modified_base 20: mod_base = OTHER; note = 2'-Omethyluridine phosphorothiorate
  modified_base 21: mod_base = OTHER; note = 2'-fluoroadenosine phosphorothiorate
  modified_base 22: mod_base = OTHER; note = 2'-Omethylguanosine phosphorothiorate
  modified_base 73: mod_base = OTHER; note = 2'-Omethylguanosine

SEQ ID NO: 1849 - RNA, 76 nt, synthetic construct; identical to SEQ ID NO: 625
  source 1..76: mol_type = other RNA
  modified_base 1: mod_base = OTHER; note = 2'-Omethylguanosine
  modified_base 19: mod_base = OTHER; note = 2'-fluoroadenosine phosphorothiorate
  modified_base 20: mod_base = OTHER; note = 2'-O-(2-Methoxyethyl) thymine phosphorothiorate
  modified_base 21: mod_base = OTHER; note = 2'-fluoroadenosine phosphorothiorate
  modified_base 22: mod_base = OTHER; note = 2'-Omethylguanosine phosphorothiorate
  modified_base 73: mod_base = OTHER; note = 2'-Omethylguanosine

SEQ ID NO: 1850 - RNA, 76 nt, synthetic construct; identical to SEQ ID NO: 625
  source 1..76: mol_type = other RNA
  modified_base 1: mod_base = OTHER; note = 2'-Omethylguanosine
  modified_base 19: mod_base = OTHER; note = 2'-fluoroadenosine phosphorothiorate
  modified_base 20: mod_base = OTHER; note = 2'-Omethyluridine
  modified_base 21: mod_base = OTHER; note = 2'-fluoroadenosine
  modified_base 22: mod_base = OTHER; note = 2'-O-(2-Methoxyethyl) guanosine
  modified_base 73: mod_base = OTHER; note = 2'-Omethylguanosine

SEQ ID NO: 1851 - RNA, 76 nt, synthetic construct; identical to SEQ ID NO: 625
  source 1..76: mol_type = other RNA
  modified_base 1: mod_base = OTHER; note = 2'-Omethylguanosine
  modified_base 19: mod_base = OTHER; note = 2'-fluoroadenosine phosphorothiorate
  modified_base 20: mod_base = OTHER; note = 2'-Omethyluridine phosphorothiorate
  modified_base 21: mod_base = OTHER; note = 2'-fluoroadenosine
  modified_base 22: mod_base = OTHER; note = 2'-O-(2-Methoxyethyl) guanosine
  modified_base 73: mod_base = OTHER; note = 2'-Omethylguanosine

SEQ ID NO: 1852 - RNA, 76 nt, synthetic construct; identical to SEQ ID NO: 625
  source 1..76: mol_type = other RNA
  modified_base 1: mod_base = OTHER; note = 2'-Omethylguanosine
  modified_base 19: mod_base = OTHER; note = 2'-fluoroadenosine phosphorothiorate
  modified_base 20: mod_base = OTHER; note = 2'-O-(2-Methoxyethyl) thymine
  modified_base 21: mod_base = OTHER; note = 2'-fluoroadenosine
  modified_base 22: mod_base = OTHER; note = 2'-O-(2-Methoxyethyl) guanosine
  modified_base 73: mod_base = OTHER; note = 2'-Omethylguanosine

SEQ ID NO: 1853 - RNA, 76 nt, synthetic construct; identical to SEQ ID NO: 625
  source 1..76: mol_type = other RNA
  modified_base 1: mod_base = OTHER; note = 2'-Omethylguanosine
  modified_base 19: mod_base = OTHER; note = 2'-fluoroadenosine phosphorothiorate
  modified_base 20: mod_base = OTHER; note = 2'-O-(2-Methoxyethyl) thymine phosphorothiorate
  modified_base 21: mod_base = OTHER; note = 2'-fluoroadenosine
  modified_base 22: mod_base = OTHER; note = 2'-O-(2-Methoxyethyl) guanosine
  modified_base 73: mod_base = OTHER; note = 2'-Omethylguanosine

SEQ ID NO: 1854 - RNA, 76 nt, synthetic construct; identical to SEQ ID NO: 625
  source 1..76: mol_type = other RNA
  modified_base 1: mod_base = OTHER; note = 2'-Omethylguanosine
  modified_base 19: mod_base = OTHER; note = 2'-fluoroadenosine
  modified_base 20: mod_base = OTHER; note = 2'-Omethyluridine
  modified_base 21: mod_base = OTHER; note = 2'-fluoroadenosine phosphorothiorate
  modified_base 22: mod_base = OTHER; note = 2'-O-(2-Methoxyethyl) guanosine
  modified_base 73: mod_base = OTHER; note = 2'-Omethylguanosine

SEQ ID NO: 1855 - RNA, 76 nt, synthetic construct; identical to SEQ ID NO: 625
  source 1..76: mol_type = other RNA
  modified_base 1: mod_base = OTHER; note = 2'-Omethylguanosine
  modified_base 19: mod_base = OTHER; note = 2'-fluoroadenosine
  modified_base 20: mod_base = OTHER; note = 2'-Omethyluridine phosphorothiorate
  modified_base 21: mod_base = OTHER; note = 2'-fluoroadenosine phosphorothiorate
  modified_base 22: mod_base = OTHER; note = 2'-O-(2-Methoxyethyl) guanosine
  modified_base 73: mod_base = OTHER; note = 2'-Omethylguanosine

SEQ ID NO: 1856 - RNA, 76 nt, synthetic construct; identical to SEQ ID NO: 625
  source 1..76: mol_type = other RNA
  modified_base 1: mod_base = OTHER; note = 2'-Omethylguanosine
  modified_base 19: mod_base = OTHER; note = 2'-fluoroadenosine
  modified_base 20: mod_base = OTHER; note = 2'-O-(2-Methoxyethyl) thymine
  modified_base 21: mod_base = OTHER; note = 2'-fluoroadenosine phosphorothiorate
  modified_base 22: mod_base = OTHER; note = 2'-O-(2-Methoxyethyl) guanosine
  modified_base 73: mod_base = OTHER; note = 2'-Omethylguanosine

SEQ ID NO: 1857 - RNA, 76 nt, synthetic construct; identical to SEQ ID NO: 625
  source 1..76: mol_type = other RNA
  modified_base 1: mod_base = OTHER; note = 2'-Omethylguanosine
  modified_base 19: mod_base = OTHER; note = 2'-fluoroadenosine
  modified_base 20: mod_base = OTHER; note = 2'-O-(2-Methoxyethyl) thymine phosphorothiorate
  modified_base 21: mod_base = OTHER; note = 2'-fluoroadenosine phosphorothiorate
  modified_base 22: mod_base = OTHER; note = 2'-O-(2-Methoxyethyl) guanosine
  modified_base 73: mod_base = OTHER; note = 2'-Omethylguanosine

SEQ ID NO: 1858 - RNA, 76 nt, synthetic construct; identical to SEQ ID NO: 625
  source 1..76: mol_type = other RNA
  modified_base 1: mod_base = OTHER; note = 2'-Omethylguanosine
  modified_base 19: mod_base = OTHER; note = 2'-fluoroadenosine phosphorothiorate
  modified_base 20: mod_base = OTHER; note = 2'-Omethyluridine
  modified_base 21: mod_base = OTHER; note = 2'-fluoroadenosine phosphorothiorate
  modified_base 22: mod_base = OTHER; note = 2'-O-(2-Methoxyethyl) guanosine
  modified_base 73: mod_base = OTHER; note = 2'-Omethylguanosine

SEQ ID NO: 1859 - RNA, 76 nt, synthetic construct; identical to SEQ ID NO: 625
  source 1..76: mol_type = other RNA
  modified_base 1: mod_base = OTHER; note = 2'-Omethylguanosine
  modified_base 19: mod_base = OTHER; note = 2'-fluoroadenosine phosphorothiorate
  modified_base 20: mod_base = OTHER; note = 2'-Omethyluridine phosphorothiorate
  modified_base 21: mod_base = OTHER; note = 2'-fluoroadenosine phosphorothiorate
  modified_base 22: mod_base = OTHER; note = 2'-O-(2-Methoxyethyl) guanosine
  modified_base 73: mod_base = OTHER; note = 2'-Omethylguanosine

SEQ ID NO: 1860 - RNA, 76 nt, synthetic construct; identical to SEQ ID NO: 625
  source 1..76: mol_type = other RNA
  modified_base 1: mod_base = OTHER; note = 2'-Omethylguanosine
  modified_base 19: mod_base = OTHER; note = 2'-fluoroadenosine phosphorothiorate
  modified_base 20: mod_base = OTHER; note = 2'-O-(2-Methoxyethyl) thymine
  modified_base 21: mod_base = OTHER; note = 2'-fluoroadenosine phosphorothiorate
  modified_base 22: mod_base = OTHER; note = 2'-O-(2-Methoxyethyl) guanosine
  modified_base 73: mod_base = OTHER; note = 2'-Omethylguanosine

SEQ ID NO: 1861 - RNA, 76 nt, synthetic construct; identical to SEQ ID NO: 625
  source 1..76: mol_type = other RNA
  modified_base 1: mod_base = OTHER; note = 2'-Omethylguanosine
  modified_base 19: mod_base = OTHER; note = 2'-fluoroadenosine phosphorothiorate
  modified_base 20: mod_base = OTHER; note = 2'-O-(2-Methoxyethyl) thymine phosphorothiorate
  modified_base 21: mod_base = OTHER; note = 2'-fluoroadenosine phosphorothiorate
  modified_base 22: mod_base = OTHER; note = 2'-O-(2-Methoxyethyl) guanosine
  modified_base 73: mod_base = OTHER; note = 2'-Omethylguanosine

SEQ ID NO: 1862 - skipped

SEQ ID NO: 1863 - RNA, 76 nt, synthetic construct; identical to SEQ ID NO: 625
  source 1..76: mol_type = other RNA
  modified_base 1: mod_base = OTHER; note = 2'-Omethylguanosine
  modified_base 40: mod_base = OTHER; note = 2'-fluorouridine
  modified_base 41: mod_base = OTHER; note = 2'-Omethylcytosine phosphorothiorate
  modified_base 42: mod_base = OTHER; note = 2'-Omethyladenosine
  modified_base 43: mod_base = OTHER; note = 2'-Omethyladenosine
  modified_base 73: mod_base = OTHER; note = 2'-Omethylguanosine

SEQ ID NO: 1864-1865 - skipped (2 entries)

SEQ ID NO: 1866 - RNA, 76 nt, synthetic construct; identical to SEQ ID NO: 625
  source 1..76: mol_type = other RNA
  modified_base 1: mod_base = OTHER; note = 2'-Omethylguanosine
  modified_base 40: mod_base = OTHER; note = 2'-fluorouridine
  modified_base 41: mod_base = OTHER; note = 2'-Omethylcytosine
  modified_base 42: mod_base = OTHER; note = 2'-fluoroadenosine
  modified_base 43: mod_base = OTHER; note = 2'-Omethyladenosine
  modified_base 73: mod_base = OTHER; note = 2'-Omethylguanosine

SEQ ID NO: 1867 - RNA, 76 nt, synthetic construct; identical to SEQ ID NO: 625
  source 1..76: mol_type = other RNA
  modified_base 1: mod_base = OTHER; note = 2'-Omethylguanosine
  modified_base 40: mod_base = OTHER; note = 2'-fluorouridine
  modified_base 41: mod_base = OTHER; note = 2'-Omethylcytosine phosphorothiorate
  modified_base 42: mod_base = OTHER; note = 2'-fluoroadenosine
  modified_base 43: mod_base = OTHER; note = 2'-Omethyladenosine
  modified_base 73: mod_base = OTHER; note = 2'-Omethylguanosine

SEQ ID NO: 1868 - RNA, 76 nt, synthetic construct; identical to SEQ ID NO: 625
  source 1..76: mol_type = other RNA
  modified_base 1: mod_base = OTHER; note = 2'-Omethylguanosine
  modified_base 40: mod_base = OTHER; note = 2'-Omethyluridine
  modified_base 41: mod_base = OTHER; note = 2'-Omethylcytosine
  modified_base 42: mod_base = OTHER; note = 2'-fluoroadenosine
  modified_base 43: mod_base = OTHER; note = 2'-Omethyladenosine
  modified_base 73: mod_base = OTHER; note = 2'-Omethylguanosine

SEQ ID NO: 1869 - RNA, 76 nt, synthetic construct; identical to SEQ ID NO: 625
  source 1..76: mol_type = other RNA
  modified_base 1: mod_base = OTHER; note = 2'-Omethylguanosine
  modified_base 40: mod_base = OTHER; note = 2'-fluorouridine
  modified_base 41: mod_base = OTHER; note = 2'-Omethylcytosine
  modified_base 42: mod_base = OTHER; note = 2'-Omethyladenosine
  modified_base 43: mod_base = OTHER; note = 2'-fluoroadenosine
  modified_base 73: mod_base = OTHER; note = 2'-Omethylguanosine

SEQ ID NO: 1870 - RNA, 76 nt, synthetic construct; identical to SEQ ID NO: 625
  source 1..76: mol_type = other RNA
  modified_base 1: mod_base = OTHER; note = 2'-Omethylguanosine
  modified_base 40: mod_base = OTHER; note = 2'-fluorouridine
  modified_base 41: mod_base = OTHER; note = 2'-Omethylcytosine phosphorothiorate
  modified_base 42: mod_base = OTHER; note = 2'-Omethyladenosine
  modified_base 43: mod_base = OTHER; note = 2'-Omethyladenosine phosphorothiorate
  modified_base 73: mod_base = OTHER; note = 2'-Omethylguanosine

SEQ ID NO: 1871-1872 - skipped (2 entries)

SEQ ID NO: 1873 - RNA, 76 nt, synthetic construct; identical to SEQ ID NO: 625
  source 1..76: mol_type = other RNA
  modified_base 1: mod_base = OTHER; note = 2'-Omethylguanosine
  modified_base 40: mod_base = OTHER; note = 2'-fluorouridine
  modified_base 41: mod_base = OTHER; note = 2'-Omethylcytosine
  modified_base 42: mod_base = OTHER; note = 2'-fluoroadenosine
  modified_base 43: mod_base = OTHER; note = 2'-Omethyladenosine phosphorothiorate
  modified_base 73: mod_base = OTHER; note = 2'-Omethylguanosine

SEQ ID NO: 1874 - RNA, 76 nt, synthetic construct; identical to SEQ ID NO: 625
  source 1..76: mol_type = other RNA
  modified_base 1: mod_base = OTHER; note = 2'-Omethylguanosine
  modified_base 40: mod_base = OTHER; note = 2'-fluorouridine
  modified_base 41: mod_base = OTHER; note = 2'-Omethylcytosine phosphorothiorate
  modified_base 42: mod_base = OTHER; note = 2'-fluoroadenosine
  modified_base 43: mod_base = OTHER; note = 2'-Omethyladenosine phosphorothiorate
  modified_base 73: mod_base = OTHER; note = 2'-Omethylguanosine

SEQ ID NO: 1875 - RNA, 76 nt, synthetic construct; identical to SEQ ID NO: 625
  source 1..76: mol_type = other RNA
  modified_base 1: mod_base = OTHER; note = 2'-Omethylguanosine
  modified_base 40: mod_base = OTHER; note = 2'-Omethyluridine
  modified_base 41: mod_base = OTHER; note = 2'-Omethylcytosine
  modified_base 42: mod_base = OTHER; note = 2'-fluoroadenosine
  modified_base 43: mod_base = OTHER; note = 2'-Omethyladenosine phosphorothiorate
  modified_base 73: mod_base = OTHER; note = 2'-Omethylguanosine

SEQ ID NO: 1876 - RNA, 76 nt, synthetic construct; identical to SEQ ID NO: 625
  source 1..76: mol_type = other RNA
  modified_base 1: mod_base = OTHER; note = 2'-Omethylguanosine
  modified_base 40: mod_base = OTHER; note = 2'-fluorouridine
  modified_base 41: mod_base = OTHER; note = 2'-Omethylcytosine
  modified_base 42: mod_base = OTHER; note = 2'-Omethyladenosine
  modified_base 43: mod_base = OTHER; note = 2'-fluoroadenosine phosphorothiorate
  modified_base 73: mod_base = OTHER; note = 2'-Omethylguanosine

SEQ ID NO: 1877 - RNA, 76 nt, synthetic construct; identical to SEQ ID NO: 625
  source 1..76: mol_type = other RNA
  modified_base 1: mod_base = OTHER; note = 2'-Omethylguanosine
  modified_base 40: mod_base = OTHER; note = 2'-fluorouridine phosphorothiorate
  modified_base 41: mod_base = OTHER; note = 2'-Omethylcytosine phosphorothiorate
  modified_base 42: mod_base = OTHER; note = 2'-Omethyladenosine
  modified_base 43: mod_base = OTHER; note = 2'-Omethyladenosine phosphorothiorate
  modified_base 73: mod_base = OTHER; note = 2'-Omethylguanosine

SEQ ID NO: 1878-1879 - skipped (2 entries)

SEQ ID NO: 1880 - RNA, 76 nt, synthetic construct; identical to SEQ ID NO: 625
  source 1..76: mol_type = other RNA
  modified_base 1: mod_base = OTHER; note = 2'-Omethylguanosine
  modified_base 40: mod_base = OTHER; note = 2'-fluorouridine phosphorothiorate
  modified_base 41: mod_base = OTHER; note = 2'-Omethylcytosine
  modified_base 42: mod_base = OTHER; note = 2'-fluoroadenosine
  modified_base 43: mod_base = OTHER; note = 2'-Omethyladenosine phosphorothiorate
  modified_base 73: mod_base = OTHER; note = 2'-Omethylguanosine

SEQ ID NO: 1881 - RNA, 76 nt, synthetic construct; identical to SEQ ID NO: 625
  source 1..76: mol_type = other RNA
  modified_base 1: mod_base = OTHER; note = 2'-Omethylguanosine
  modified_base 40: mod_base = OTHER; note = 2'-fluorouridine phosphorothiorate
  modified_base 41: mod_base = OTHER; note = 2'-Omethylcytosine phosphorothiorate
  modified_base 42: mod_base = OTHER; note = 2'-fluoroadenosine
  modified_base 43: mod_base = OTHER; note = 2'-Omethyladenosine phosphorothiorate
  modified_base 73: mod_base = OTHER; note = 2'-Omethylguanosine

SEQ ID NO: 1882 - RNA, 76 nt, synthetic construct; identical to SEQ ID NO: 625
  source 1..76: mol_type = other RNA
  modified_base 1: mod_base = OTHER; note = 2'-Omethylguanosine
  modified_base 40: mod_base = OTHER; note = 2'-Omethyluridine phosphorothiorate
  modified_base 41: mod_base = OTHER; note = 2'-Omethylcytosine
  modified_base 42: mod_base = OTHER; note = 2'-fluoroadenosine
  modified_base 43: mod_base = OTHER; note = 2'-Omethyladenosine phosphorothiorate
  modified_base 73: mod_base = OTHER; note = 2'-Omethylguanosine

SEQ ID NO: 1883 - RNA, 76 nt, synthetic construct; identical to SEQ ID NO: 625
  source 1..76: mol_type = other RNA
  modified_base 1: mod_base = OTHER; note = 2'-Omethylguanosine
  modified_base 40: mod_base = OTHER; note = 2'-fluorouridine phosphorothiorate
  modified_base 41: mod_base = OTHER; note = 2'-Omethylcytosine
  modified_base 42: mod_base = OTHER; note = 2'-Omethyladenosine
  modified_base 43: mod_base = OTHER; note = 2'-fluoroadenosine phosphorothiorate
  modified_base 73: mod_base = OTHER; note = 2'-Omethylguanosine

SEQ ID NO: 1884 - RNA, 76 nt, synthetic construct; identical to SEQ ID NO: 625
  source 1..76: mol_type = other RNA
  modified_base 1: mod_base = OTHER; note = 2'-Omethylguanosine
  modified_base 40: mod_base = OTHER; note = 2'-fluorouridine phosphorothiorate
  modified_base 41: mod_base = OTHER; note = 2'-Omethylcytosine phosphorothiorate
  modified_base 42: mod_base = OTHER; note = 2'-Omethyladenosine phosphorothiorate
  modified_base 43: mod_base = OTHER; note = 2'-Omethyladenosine phosphorothiorate
  modified_base 73: mod_base = OTHER; note = 2'-Omethylguanosine

SEQ ID NO: 1885-1886 - skipped (2 entries)

SEQ ID NO: 1887 - RNA, 76 nt, synthetic construct; identical to SEQ ID NO: 625
  source 1..76: mol_type = other RNA
  modified_base 1: mod_base = OTHER; note = 2'-Omethylguanosine
  modified_base 40: mod_base = OTHER; note = 2'-fluorouridine phosphorothiorate
  modified_base 41: mod_base = OTHER; note = 2'-Omethylcytosine
  modified_base 42: mod_base = OTHER; note = 2'-fluoroadenosine phosphorothiorate
  modified_base 43: mod_base = OTHER; note = 2'-Omethyladenosine phosphorothiorate
  modified_base 73: mod_base = OTHER; note = 2'-Omethylguanosine

SEQ ID NO: 1888 - RNA, 76 nt, synthetic construct; identical to SEQ ID NO: 625
  source 1..76: mol_type = other RNA
  modified_base 1: mod_base = OTHER; note = 2'-Omethylguanosine
  modified_base 40: mod_base = OTHER; note = 2'-fluorouridine phosphorothiorate
  modified_base 41: mod_base = OTHER; note = 2'-Omethylcytosine phosphorothiorate
  modified_base 42: mod_base = OTHER; note = 2'-fluoroadenosine phosphorothiorate
  modified_base 43: mod_base = OTHER; note = 2'-Omethyladenosine phosphorothiorate
  modified_base 73: mod_base = OTHER; note = 2'-Omethylguanosine

SEQ ID NO: 1889 - RNA, 76 nt, synthetic construct; identical to SEQ ID NO: 625
  source 1..76: mol_type = other RNA
  modified_base 1: mod_base = OTHER; note = 2'-Omethylguanosine
  modified_base 40: mod_base = OTHER; note = 2'-Omethyluridine phosphorothiorate
  modified_base 41: mod_base = OTHER; note = 2'-Omethylcytosine
  modified_base 42: mod_base = OTHER; note = 2'-fluoroadenosine phosphorothiorate
  modified_base 43: mod_base = OTHER; note = 2'-Omethyladenosine phosphorothiorate
  modified_base 73: mod_base = OTHER; note = 2'-Omethylguanosine

SEQ ID NO: 1890 - RNA, 76 nt, synthetic construct; identical to SEQ ID NO: 625
  source 1..76: mol_type = other RNA
  modified_base 1: mod_base = OTHER; note = 2'-Omethylguanosine
  modified_base 40: mod_base = OTHER; note = 2'-fluorouridine phosphorothiorate
  modified_base 41: mod_base = OTHER; note = 2'-Omethylcytosine
  modified_base 42: mod_base = OTHER; note = 2'-Omethyladenosine phosphorothiorate
  modified_base 43: mod_base = OTHER; note = 2'-fluoroadenosine phosphorothiorate
  modified_base 73: mod_base = OTHER; note = 2'-Omethylguanosine

SEQ ID NO: 1891 - RNA, 76 nt, synthetic construct; identical to SEQ ID NO: 625
  source 1..76: mol_type = other RNA
  modified_base 1: mod_base = OTHER; note = 2'-Omethylguanosine
  modified_base 19: mod_base = OTHER; note = 2'-Omethyladenosine
  modified_base 20: mod_base = OTHER; note = 2'-Omethyluridine
  modified_base 21: mod_base = OTHER; note = 2'-Omethyladenosine
  modified_base 22: mod_base = OTHER; note = 2'-Omethylguanosine
  modified_base 40: mod_base = OTHER; note = 2'-fluorouridine
  modified_base 41: mod_base = OTHER; note = 2'-Omethylcytosine
  modified_base 42: mod_base = OTHER; note = 2'-Omethyladenosine
  modified_base 43: mod_base = OTHER; note = 2'-Omethyladenosine
  modified_base 73: mod_base = OTHER; note = 2'-Omethylguanosine

SEQ ID NO: 1892 - RNA, 76 nt, synthetic construct; identical to SEQ ID NO: 625
  source 1..76: mol_type = other RNA
  modified_base 1: mod_base = OTHER; note = 2'-Omethylguanosine
  modified_base 19: mod_base = OTHER; note = 2'-Omethyladenosine
  modified_base 20: mod_base = OTHER; note = 2'-Omethyluridine
  modified_base 21: mod_base = OTHER; note = 2'-fluoroadenosine
  modified_base 22: mod_base = OTHER; note = 2'-Omethylguanosine
  modified_base 40: mod_base = OTHER; note = 2'-fluorouridine
  modified_base 41: mod_base = OTHER; note = 2'-Omethylcytosine
  modified_base 42: mod_base = OTHER; note = 2'-Omethyladenosine
  modified_base 43: mod_base = OTHER; note = 2'-Omethyladenosine
  modified_base 73: mod_base = OTHER; note = 2'-Omethylguanosine

SEQ ID NO: 1893 - RNA, 76 nt, synthetic construct; identical to SEQ ID NO: 625
  source 1..76: mol_type = other RNA
  modified_base 1: mod_base = OTHER; note = 2'-Omethylguanosine
  modified_base 19: mod_base = OTHER; note = 2'-fluoroadenosine
  modified_base 20: mod_base = OTHER; note = 2'-Omethyluridine
  modified_base 21: mod_base = OTHER; note = 2'-Omethyladenosine
  modified_base 22: mod_base = OTHER; note = 2'-Omethylguanosine
  modified_base 40: mod_base = OTHER; note = 2'-fluorouridine
  modified_base 41: mod_base = OTHER; note = 2'-Omethylcytosine
  modified_base 42: mod_base = OTHER; note = 2'-Omethyladenosine
  modified_base 43: mod_base = OTHER; note = 2'-Omethyladenosine
  modified_base 73: mod_base = OTHER; note = 2'-Omethylguanosine

SEQ ID NO: 1894 - RNA, 76 nt, synthetic construct; identical to SEQ ID NO: 625
  source 1..76: mol_type = other RNA
  modified_base 1: mod_base = OTHER; note = 2'-Omethylguanosine
  modified_base 19: mod_base = OTHER; note = 2'-fluoroadenosine
  modified_base 20: mod_base = OTHER; note = 2'-Omethyluridine
  modified_base 21: mod_base = OTHER; note = 2'-fluoroadenosine
  modified_base 22: mod_base = OTHER; note = 2'-Omethylguanosine
  modified_base 40: mod_base = OTHER; note = 2'-fluorouridine
  modified_base 41: mod_base = OTHER; note = 2'-Omethylcytosine
  modified_base 42: mod_base = OTHER; note = 2'-Omethyladenosine
  modified_base 43: mod_base = OTHER; note = 2'-Omethyladenosine
  modified_base 73: mod_base = OTHER; note = 2'-Omethylguanosine

SEQ ID NO: 1895 - RNA, 76 nt, synthetic construct; identical to SEQ ID NO: 625
  source 1..76: mol_type = other RNA
  modified_base 1: mod_base = OTHER; note = 2'-Omethylguanosine
  modified_base 19: mod_base = OTHER; note = 2'-fluoroadenosine
  modified_base 20: mod_base = OTHER; note = 2'-O-(2-Methoxyethyl) thymine
  modified_base 21: mod_base = OTHER; note = 2'-fluoroadenosine
  modified_base 22: mod_base = OTHER; note = 2'-Omethylguanosine
  modified_base 40: mod_base = OTHER; note = 2'-fluorouridine
  modified_base 41: mod_base = OTHER; note = 2'-Omethylcytosine
  modified_base 42: mod_base = OTHER; note = 2'-Omethyladenosine
  modified_base 43: mod_base = OTHER; note = 2'-Omethyladenosine
  modified_base 73: mod_base = OTHER; note = 2'-Omethylguanosine

SEQ ID NO: 1896 - RNA, 76 nt, synthetic construct; identical to SEQ ID NO: 625
  source 1..76: mol_type = other RNA
  modified_base 1: mod_base = OTHER; note = 2'-Omethylguanosine
  modified_base 19: mod_base = OTHER; note = 2'-Omethyladenosine
  modified_base 20: mod_base = OTHER; note = 2'-Omethyluridine phosphorothiorate
  modified_base 21: mod_base = OTHER; note = 2'-fluoroadenosine
  modified_base 22: mod_base = OTHER; note = 2'-Omethylguanosine
  modified_base 40: mod_base = OTHER; note = 2'-fluorouridine
  modified_base 41: mod_base = OTHER; note = 2'-Omethylcytosine
  modified_base 42: mod_base = OTHER; note = 2'-Omethyladenosine
  modified_base 43: mod_base = OTHER; note = 2'-Omethyladenosine
  modified_base 73: mod_base = OTHER; note = 2'-Omethylguanosine

SEQ ID NO: 1897 - RNA, 76 nt, synthetic construct; identical to SEQ ID NO: 625
  source 1..76: mol_type = other RNA
  modified_base 1: mod_base = OTHER; note = 2'-Omethylguanosine
  modified_base 19: mod_base = OTHER; note = 2'-fluoroadenosine
  modified_base 20: mod_base = OTHER; note = 2'-Omethyluridine phosphorothiorate
  modified_base 21: mod_base = OTHER; note = 2'-Omethyladenosine
  modified_base 22: mod_base = OTHER; note = 2'-Omethylguanosine
  modified_base 40: mod_base = OTHER; note = 2'-fluorouridine
  modified_base 41: mod_base = OTHER; note = 2'-Omethylcytosine
  modified_base 42: mod_base = OTHER; note = 2'-Omethyladenosine
  modified_base 43: mod_base = OTHER; note = 2'-Omethyladenosine
  modified_base 73: mod_base = OTHER; note = 2'-Omethylguanosine

SEQ ID NO: 1898 - RNA, 76 nt, synthetic construct; identical to SEQ ID NO: 625
  source 1..76: mol_type = other RNA
  modified_base 1: mod_base = OTHER; note = 2'-Omethylguanosine
  modified_base 19: mod_base = OTHER; note = 2'-fluoroadenosine
  modified_base 20: mod_base = OTHER; note = 2'-Omethyluridine phosphorothiorate
  modified_base 21: mod_base = OTHER; note = 2'-fluoroadenosine
  modified_base 22: mod_base = OTHER; note = 2'-Omethylguanosine
  modified_base 40: mod_base = OTHER; note = 2'-fluorouridine
  modified_base 41: mod_base = OTHER; note = 2'-Omethylcytosine
  modified_base 42: mod_base = OTHER; note = 2'-Omethyladenosine
  modified_base 43: mod_base = OTHER; note = 2'-Omethyladenosine
  modified_base 73: mod_base = OTHER; note = 2'-Omethylguanosine

SEQ ID NO: 1899 - RNA, 76 nt, synthetic construct; identical to SEQ ID NO: 625
  source 1..76: mol_type = other RNA
  modified_base 1: mod_base = OTHER; note = 2'-Omethylguanosine
  modified_base 19: mod_base = OTHER; note = 2'-fluoroadenosine
  modified_base 20: mod_base = OTHER; note = 2'-O-(2-Methoxyethyl) thymine phosphorothiorate
  modified_base 21: mod_base = OTHER; note = 2'-fluoroadenosine
  modified_base 22: mod_base = OTHER; note = 2'-Omethylguanosine
  modified_base 40: mod_base = OTHER; note = 2'-fluorouridine
  modified_base 41: mod_base = OTHER; note = 2'-Omethylcytosine
  modified_base 42: mod_base = OTHER; note = 2'-Omethyladenosine
  modified_base 43: mod_base = OTHER; note = 2'-Omethyladenosine
  modified_base 73: mod_base = OTHER; note = 2'-Omethylguanosine

SEQ ID NO: 1900 - RNA, 76 nt, synthetic construct; identical to SEQ ID NO: 625
  source 1..76: mol_type = other RNA
  modified_base 1: mod_base = OTHER; note = 2'-Omethylguanosine
  modified_base 19: mod_base = OTHER; note = 2'-Omethyladenosine
  modified_base 20: mod_base = OTHER; note = 2'-Omethyluridine
  modified_base 22: mod_base = OTHER; note = 2'-Omethylguanosine
  modified_base 40: mod_base = OTHER; note = 2'-fluorouridine
  modified_base 41: mod_base = OTHER; note = 2'-Omethylcytosine
  modified_base 42: mod_base = OTHER; note = 2'-Omethyladenosine
  modified_base 43: mod_base = OTHER; note = 2'-Omethyladenosine
  modified_base 73: mod_base = OTHER; note = 2'-Omethylguanosine

SEQ ID NO: 1901 - RNA, 76 nt, synthetic construct; identical to SEQ ID NO: 625
  source 1..76: mol_type = other RNA
  modified_base 1: mod_base = OTHER; note = 2'-Omethylguanosine
  modified_base 20: mod_base = OTHER; note = 2'-Omethyluridine
  modified_base 21: mod_base = OTHER; note = 2'-Omethyladenosine
  modified_base 22: mod_base = OTHER; note = 2'-Omethylguanosine
  modified_base 40: mod_base = OTHER; note = 2'-fluorouridine
  modified_base 41: mod_base = OTHER; note = 2'-Omethylcytosine
  modified_base 42: mod_base = OTHER; note = 2'-Omethyladenosine
  modified_base 43: mod_base = OTHER; note = 2'-Omethyladenosine
  modified_base 73: mod_base = OTHER; note = 2'-Omethylguanosine

SEQ ID NO: 1902 - RNA, 76 nt, synthetic construct; identical to SEQ ID NO: 625
  source 1..76: mol_type = other RNA
  modified_base 1: mod_base = OTHER; note = 2'-Omethylguanosine
  modified_base 19: mod_base = OTHER; note = 2'-Omethyladenosine
  modified_base 20: mod_base = OTHER; note = 2'-Omethyluridine
  modified_base 21: mod_base = OTHER; note = Adenosine phosphorothiorate
  modified_base 22: mod_base = OTHER; note = 2'-Omethylguanosine
  modified_base 40: mod_base = OTHER; note = 2'-fluorouridine
  modified_base 41: mod_base = OTHER; note = 2'-Omethylcytosine
  modified_base 42: mod_base = OTHER; note = 2'-Omethyladenosine
  modified_base 43: mod_base = OTHER; note = 2'-Omethyladenosine
  modified_base 73: mod_base = OTHER; note = 2'-Omethylguanosine

SEQ ID NO: 1903 - RNA, 76 nt, synthetic construct; identical to SEQ ID NO: 625
  source 1..76: mol_type = other RNA
  modified_base 1: mod_base = OTHER; note = 2'-Omethylguanosine
  modified_base 19: mod_base = OTHER; note = Adenosine phosphorothiorate
  modified_base 20: mod_base = OTHER; note = 2'-Omethyluridine
  modified_base 21: mod_base = OTHER; note = 2'-Omethyladenosine
  modified_base 22: mod_base = OTHER; note = 2'-Omethylguanosine
  modified_base 40: mod_base = OTHER; note = 2'-fluorouridine
  modified_base 41: mod_base = OTHER; note = 2'-Omethylcytosine
  modified_base 42: mod_base = OTHER; note = 2'-Omethyladenosine
  modified_base 43: mod_base = OTHER; note = 2'-Omethyladenosine
  modified_base 73: mod_base = OTHER; note = 2'-Omethylguanosine

SEQ ID NO: 1904 - RNA, 76 nt, synthetic construct; identical to SEQ ID NO: 625
  source 1..76: mol_type = other RNA
  modified_base 1: mod_base = OTHER; note = 2'-Omethylguanosine
  modified_base 19: mod_base = OTHER; note = 2'-fluoroadenosine
  modified_base 20: mod_base = OTHER; note = 2'-Omethyluridine
  modified_base 21: mod_base = OTHER; note = 2'-fluoroadenosine
  modified_base 22: mod_base = OTHER; note = 2'-O-(2-Methoxyethyl) guanosine
  modified_base 40: mod_base = OTHER; note = 2'-fluorouridine
  modified_base 41: mod_base = OTHER; note = 2'-Omethylcytosine
  modified_base 42: mod_base = OTHER; note = 2'-Omethyladenosine
  modified_base 43: mod_base = OTHER; note = 2'-Omethyladenosine
  modified_base 73: mod_base = OTHER; note = 2'-Omethylguanosine

SEQ ID NO: 1905 - RNA, 76 nt, synthetic construct; identical to SEQ ID NO: 625
  source 1..76: mol_type = other RNA
  modified_base 1: mod_base = OTHER; note = 2'-Omethylguanosine
  modified_base 19: mod_base = OTHER; note = 2'-fluoroadenosine
  modified_base 20: mod_base = OTHER; note = 2'-Omethyluridine phosphorothiorate
  modified_base 21: mod_base = OTHER; note = 2'-fluoroadenosine
  modified_base 22: mod_base = OTHER; note = 2'-O-(2-Methoxyethyl) guanosine
  modified_base 40: mod_base = OTHER; note = 2'-fluorouridine
  modified_base 41: mod_base = OTHER; note = 2'-Omethylcytosine
  modified_base 42: mod_base = OTHER; note = 2'-Omethyladenosine
  modified_base 43: mod_base = OTHER; note = 2'-Omethyladenosine
  modified_base 73: mod_base = OTHER; note = 2'-Omethylguanosine

SEQ ID NO: 1906 - RNA, 76 nt, synthetic construct; identical to SEQ ID NO: 625
  source 1..76: mol_type = other RNA
  modified_base 1: mod_base = OTHER; note = 2'-Omethylguanosine
  modified_base 19: mod_base = OTHER; note = 2'-fluoroadenosine
  modified_base 20: mod_base = OTHER; note = 2'-O-(2-Methoxyethyl) thymine
  modified_base 21: mod_base = OTHER; note = 2'-fluoroadenosine
  modified_base 22: mod_base = OTHER; note = 2'-O-(2-Methoxyethyl) guanosine
  modified_base 40: mod_base = OTHER; note = 2'-fluorouridine
  modified_base 41: mod_base = OTHER; note = 2'-Omethylcytosine
  modified_base 42: mod_base = OTHER; note = 2'-Omethyladenosine
  modified_base 43: mod_base = OTHER; note = 2'-Omethyladenosine
  modified_base 73: mod_base = OTHER; note = 2'-Omethylguanosine

SEQ ID NO: 1907 - RNA, 76 nt, synthetic construct; identical to SEQ ID NO: 625
  source 1..76: mol_type = other RNA
  modified_base 1: mod_base = OTHER; note = 2'-Omethylguanosine
  modified_base 19: mod_base = OTHER; note = 2'-fluoroadenosine
  modified_base 20: mod_base = OTHER; note = 2'-O-(2-Methoxyethyl) thymine phosphorothiorate
  modified_base 21: mod_base = OTHER; note = 2'-fluoroadenosine
  modified_base 22: mod_base = OTHER; note = 2'-O-(2-Methoxyethyl) guanosine
  modified_base 40: mod_base = OTHER; note = 2'-fluorouridine
  modified_base 41: mod_base = OTHER; note = 2'-Omethylcytosine
  modified_base 42: mod_base = OTHER; note = 2'-Omethyladenosine
  modified_base 43: mod_base = OTHER; note = 2'-Omethyladenosine
  modified_base 73: mod_base = OTHER; note = 2'-Omethylguanosine

SEQ ID NO: 1908 - RNA, 76 nt, synthetic construct; identical to SEQ ID NO: 625
  source 1..76: mol_type = other RNA
  modified_base 1: mod_base = OTHER; note = 2'-Omethylguanosine
  modified_base 2: mod_base = OTHER; note = 2'-Omethylguanosine
  modified_base 3: mod_base = OTHER; note = 2'-Omethylcytosine
  modified_base 4: mod_base = OTHER; note = 2'-Omethyluridine
  modified_base 5: mod_base = OTHER; note = 2'-Omethylcytosine
  modified_base 6: mod_base = OTHER; note = 2'-Omethylcytosine
  modified_base 10: mod_base = OTHER; note = 2'-Omethylguanosine
  modified_base 11: mod_base = OTHER; note = 2'-Omethylcytosine
  modified_base 12: mod_base = OTHER; note = 2'-Omethylguanosine
  modified_base 13: mod_base = OTHER; note = 2'-Omethylcytosine
  modified_base 22: mod_base = OTHER; note = 2'-Omethylguanosine
  modified_base 23: mod_base = OTHER; note = 2'-Omethylcytosine
  modified_base 24: mod_base = OTHER; note = 2'-Omethylguanosine
  modified_base 25: mod_base = OTHER; note = 2'-Omethylcytosine
  modified_base 49: mod_base = OTHER; note = 2'-Omethylcytosine
  modified_base 50: mod_base = OTHER; note = 2'-Omethylcytosine
  modified_base 51: mod_base = OTHER; note = 2'-Omethylguanosine
  modified_base 52: mod_base = OTHER; note = 2'-Omethylguanosine
  modified_base 53: mod_base = OTHER; note = 2'-Omethylguanosine
  modified_base 66: mod_base = OTHER; note = 2'-Omethylcytosine
  modified_base 67: mod_base = OTHER; note = 2'-Omethylguanosine
  modified_base 68: mod_base = OTHER; note = 2'-Omethylguanosine
  modified_base 73: mod_base = OTHER; note = 2'-Omethylguanosine

SEQ ID NO: 1909 - RNA, 76 nt, synthetic construct; identical to SEQ ID NO: 625
  source 1..76: mol_type = other RNA
  modified_base 1: mod_base = OTHER; note = 2'-Omethylguanosine
  modified_base 2: mod_base = OTHER; note = 2'-Omethylguanosine
  modified_base 3: mod_base = OTHER; note = 2'-Omethylcytosine
  modified_base 4: mod_base = OTHER; note = 2'-Omethyluridine
  modified_base 5: mod_base = OTHER; note = 2'-Omethylcytosine
  modified_base 6: mod_base = OTHER; note = 2'-Omethylcytosine
  modified_base 10: mod_base = OTHER; note = 2'-Omethylguanosine
  modified_base 11: mod_base = OTHER; note = 2'-Omethylcytosine
  modified_base 12: mod_base = OTHER; note = 2'-Omethylguanosine
  modified_base 13: mod_base = OTHER; note = 2'-Omethylcytosine
  modified_base 22: mod_base = OTHER; note = 2'-Omethylguanosine
  modified_base 23: mod_base = OTHER; note = 2'-Omethylcytosine
  modified_base 24: mod_base = OTHER; note = 2'-Omethylguanosine
  modified_base 25: mod_base = OTHER; note = 2'-Omethylcytosine
  modified_base 49: mod_base = OTHER; note = 2'-Omethylcytosine
  modified_base 50: mod_base = OTHER; note = 2'-Omethylcytosine
  modified_base 51: mod_base = OTHER; note = 2'-Omethylguanosine
  modified_base 52: mod_base = OTHER; note = 2'-Omethylguanosine
  modified_base 53: mod_base = OTHER; note = 2'-Omethylguanosine
  modified_base 61: mod_base = OTHER; note = 2'-Omethylcytosine
  modified_base 62: mod_base = OTHER; note = 2'-Omethylcytosine
  modified_base 63: mod_base = OTHER; note = 2'-fluorocytosine
  modified_base 64: mod_base = OTHER; note = 2'-Omethylguanosine
  modified_base 65: mod_base = OTHER; note = 2'-Omethylguanosine
  modified_base 73: mod_base = OTHER; note = 2'-Omethylguanosine

SEQ ID NO: 1910 - skipped

SEQ ID NO: 1911 - RNA, 76 nt, synthetic construct; identical to SEQ ID NO: 625
  source 1..76: mol_type = other RNA
  modified_base 1: mod_base = OTHER; note = 2'-Omethylguanosine
  modified_base 2: mod_base = OTHER; note = 2'-Omethylguanosine
  modified_base 3: mod_base = OTHER; note = 2'-Omethylcytosine
  modified_base 4: mod_base = OTHER; note = 2'-Omethyluridine
  modified_base 5: mod_base = OTHER; note = 2'-Omethylcytosine
  modified_base 6: mod_base = OTHER; note = 2'-Omethylcytosine
  modified_base 16: mod_base = OTHER; note = 2'-Omethyluridine
  modified_base 17: mod_base = OTHER; note = 2'-Omethylguanosine
  modified_base 18: mod_base = OTHER; note = 2'-Omethylguanosine
  modified_base 33: mod_base = OTHER; note = 2'-fluorouridine
  modified_base 35: mod_base = OTHER; note = Cytosine phosphorothiorate
  modified_base 37: mod_base = OTHER; note = Adenosine phosphorothiorate
  modified_base 38: mod_base = OTHER; note = Adenosine phosphorothiorate
  modified_base 44: mod_base = OTHER; note = 2'-Omethyladenosine
  modified_base 45: mod_base = OTHER; note = 2'-Omethylguanosine
  modified_base 46: mod_base = OTHER; note = 2'-fluoroguanosine
  modified_base 47: mod_base = OTHER; note = 2'-fluorouridine
  modified_base 48: mod_base = OTHER; note = 2'-fluorouridine
  modified_base 49: mod_base = OTHER; note = 2'-Omethylcytosine
  modified_base 50: mod_base = OTHER; note = 2'-Omethylcytosine
  modified_base 51: mod_base = OTHER; note = 2'-Omethylguanosine
  modified_base 52: mod_base = OTHER; note = 2'-Omethylguanosine
  modified_base 53: mod_base = OTHER; note = 2'-Omethylguanosine
  modified_base 54: mod_base = OTHER; note = 2'-Omethyluridine
  modified_base 56: mod_base = OTHER; note = 2'-Omethylcytosine
  modified_base 59: mod_base = OTHER; note = 2'-Omethylguanosine
  modified_base 61: mod_base = OTHER; note = 2'-Omethylcytosine
  modified_base 62: mod_base = OTHER; note = 2'-Omethylcytosine
  modified_base 63: mod_base = OTHER; note = 2'-fluorocytosine
  modified_base 64: mod_base = OTHER; note = 2'-Omethylguanosine
  modified_base 65: mod_base = OTHER; note = 2'-Omethylguanosine
  modified_base 66: mod_base = OTHER; note = 2'-Omethylcytosine
  modified_base 67: mod_base = OTHER; note = 2'-Omethylguanosine
  modified_base 68: mod_base = OTHER; note = 2'-Omethylguanosine
  modified_base 73: mod_base = OTHER; note = 2'-Omethylguanosine

SEQ ID NO: 1912 - RNA, 76 nt, synthetic construct; identical to SEQ ID NO: 625
  source 1..76: mol_type = other RNA
  modified_base 1: mod_base = OTHER; note = 2'-Omethylguanosine
  modified_base 2: mod_base = OTHER; note = 2'-Omethylguanosine
  modified_base 3: mod_base = OTHER; note = 2'-Omethylcytosine
  modified_base 4: mod_base = OTHER; note = 2'-Omethyluridine
  modified_base 5: mod_base = OTHER; note = 2'-Omethylcytosine
  modified_base 6: mod_base = OTHER; note = 2'-Omethylcytosine
  modified_base 49: mod_base = OTHER; note = 2'-Omethylcytosine
  modified_base 50: mod_base = OTHER; note = 2'-Omethylcytosine
  modified_base 51: mod_base = OTHER; note = 2'-Omethylguanosine
  modified_base 52: mod_base = OTHER; note = 2'-Omethylguanosine
  modified_base 53: mod_base = OTHER; note = 2'-Omethylguanosine
  modified_base 54: mod_base = OTHER; note = 2'-Omethyluridine
  modified_base 61: mod_base = OTHER; note = 2'-Omethylcytosine
  modified_base 62: mod_base = OTHER; note = 2'-Omethylcytosine
  modified_base 63: mod_base = OTHER; note = 2'-fluorocytosine
  modified_base 64: mod_base = OTHER; note = 2'-Omethylguanosine
  modified_base 65: mod_base = OTHER; note = 2'-Omethylguanosine
  modified_base 66: mod_base = OTHER; note = 2'-Omethylcytosine
  modified_base 67: mod_base = OTHER; note = 2'-Omethylguanosine
  modified_base 68: mod_base = OTHER; note = 2'-Omethylguanosine
  modified_base 73: mod_base = OTHER; note = 2'-Omethylguanosine

SEQ ID NO: 1913 - RNA, 76 nt, synthetic construct; identical to SEQ ID NO: 625
  source 1..76: mol_type = other RNA
  modified_base 1: mod_base = OTHER; note = 2'-Omethylguanosine
  modified_base 2: mod_base = OTHER; note = 2'-Omethylguanosine
  modified_base 3: mod_base = OTHER; note = 2'-Omethylcytosine
  modified_base 4: mod_base = OTHER; note = 2'-Omethyluridine
  modified_base 5: mod_base = OTHER; note = 2'-Omethylcytosine
  modified_base 6: mod_base = OTHER; note = 2'-Omethylcytosine
  modified_base 16: mod_base = OTHER; note = 2'-Omethyluridine
  modified_base 17: mod_base = OTHER; note = 2'-Omethylguanosine
  modified_base 18: mod_base = OTHER; note = 2'-Omethylguanosine
  modified_base 33: mod_base = OTHER; note = 2'-fluorouridine
  modified_base 35: mod_base = OTHER; note = Cytosine phosphorothiorate
  modified_base 37: mod_base = OTHER; note = Adenosine phosphorothiorate
  modified_base 38: mod_base = OTHER; note = Adenosine phosphorothiorate
  modified_base 44: mod_base = OTHER; note = 2'-Omethyladenosine
  modified_base 45: mod_base = OTHER; note = 2'-Omethylguanosine
  modified_base 46: mod_base = OTHER; note = 2'-fluoroguanosine
  modified_base 47: mod_base = OTHER; note = 2'-fluorouridine
  modified_base 48: mod_base = OTHER; note = 2'-fluorouridine
  modified_base 49: mod_base = OTHER; note = 2'-Omethylcytosine
  modified_base 50: mod_base = OTHER; note = 2'-Omethylcytosine
  modified_base 51: mod_base = OTHER; note = 2'-Omethylguanosine
  modified_base 52: mod_base = OTHER; note = 2'-Omethylguanosine
  modified_base 53: mod_base = OTHER; note = 2'-Omethylguanosine
  modified_base 54: mod_base = OTHER; note = 2'-Omethyluridine
  modified_base 56: mod_base = OTHER; note = 2'-Omethylcytosine
  modified_base 59: mod_base = OTHER; note = 2'-Omethylguanosine
  modified_base 73: mod_base = OTHER; note = 2'-Omethylguanosine

SEQ ID NO: 1914 - RNA, 76 nt, synthetic construct; identical to SEQ ID NO: 625
  source 1..76: mol_type = other RNA
  modified_base 1: mod_base = OTHER; note = 2'-Omethylguanosine
  modified_base 2: mod_base = OTHER; note = 2'-Omethylguanosine
  modified_base 3: mod_base = OTHER; note = 2'-Omethylcytosine
  modified_base 4: mod_base = OTHER; note = 2'-Omethyluridine
  modified_base 5: mod_base = OTHER; note = 2'-Omethylcytosine
  modified_base 6: mod_base = OTHER; note = 2'-Omethylcytosine
  modified_base 16: mod_base = OTHER; note = 2'-Omethyluridine
  modified_base 17: mod_base = OTHER; note = 2'-Omethylguanosine
  modified_base 18: mod_base = OTHER; note = 2'-Omethylguanosine
  modified_base 33: mod_base = OTHER; note = 2'-fluorouridine
  modified_base 35: mod_base = OTHER; note = Cytosine phosphorothiorate
  modified_base 37: mod_base = OTHER; note = Adenosine phosphorothiorate
  modified_base 38: mod_base = OTHER; note = Adenosine phosphorothiorate
  modified_base 44: mod_base = OTHER; note = 2'-Omethyladenosine
  modified_base 45: mod_base = OTHER; note = 2'-Omethylguanosine
  modified_base 46: mod_base = OTHER; note = 2'-fluoroguanosine
  modified_base 47: mod_base = OTHER; note = 2'-fluorouridine
  modified_base 48: mod_base = OTHER; note = 2'-fluorouridine
  modified_base 56: mod_base = OTHER; note = 2'-Omethylcytosine
  modified_base 59: mod_base = OTHER; note = 2'-Omethylguanosine
  modified_base 61: mod_base = OTHER; note = 2'-Omethylcytosine
  modified_base 62: mod_base = OTHER; note = 2'-Omethylcytosine
  modified_base 63: mod_base = OTHER; note = 2'-fluorocytosine
  modified_base 64: mod_base = OTHER; note = 2'-Omethylguanosine
  modified_base 65: mod_base = OTHER; note = 2'-Omethylguanosine
  modified_base 66: mod_base = OTHER; note = 2'-Omethylcytosine
  modified_base 67: mod_base = OTHER; note = 2'-Omethylguanosine
  modified_base 68: mod_base = OTHER; note = 2'-Omethylguanosine
  modified_base 73: mod_base = OTHER; note = 2'-Omethylguanosine

SEQ ID NO: 1915 - RNA, 76 nt, synthetic construct; identical to SEQ ID NO: 625
  source 1..76: mol_type = other RNA
  modified_base 1: mod_base = OTHER; note = 2'-Omethylguanosine
  modified_base 2: mod_base = OTHER; note = 2'-Omethylguanosine
  modified_base 3: mod_base = OTHER; note = 2'-Omethylcytosine
  modified_base 4: mod_base = OTHER; note = 2'-Omethyluridine
  modified_base 5: mod_base = OTHER; note = 2'-Omethylcytosine
  modified_base 6: mod_base = OTHER; note = 2'-Omethylcytosine
  modified_base 16: mod_base = OTHER; note = 2'-Omethyluridine
  modified_base 17: mod_base = OTHER; note = 2'-Omethylguanosine
  modified_base 18: mod_base = OTHER; note = 2'-Omethylguanosine
  modified_base 33: mod_base = OTHER; note = 2'-fluorouridine
  modified_base 35: mod_base = OTHER; note = Cytosine phosphorothiorate
  modified_base 37: mod_base = OTHER; note = Adenosine phosphorothiorate
  modified_base 38: mod_base = OTHER; note = Adenosine phosphorothiorate
  modified_base 44: mod_base = OTHER; note = 2'-Omethyladenosine
  modified_base 45: mod_base = OTHER; note = 2'-Omethylguanosine
  modified_base 46: mod_base = OTHER; note = 2'-fluoroguanosine
  modified_base 47: mod_base = OTHER; note = 2'-fluorouridine
  modified_base 48: mod_base = OTHER; note = 2'-fluorouridine
  modified_base 56: mod_base = OTHER; note = 2'-Omethylcytosine
  modified_base 59: mod_base = OTHER; note = 2'-Omethylguanosine
  modified_base 73: mod_base = OTHER; note = 2'-Omethylguanosine

SEQ ID NO: 1916 - RNA, 76 nt, synthetic construct; identical to SEQ ID NO: 625
  source 1..76: mol_type = other RNA
  modified_base 1: mod_base = OTHER; note = 2'-Omethylguanosine
  modified_base 2: mod_base = OTHER; note = 2'-Omethylguanosine
  modified_base 3: mod_base = OTHER; note = 2'-Omethylcytosine
  modified_base 4: mod_base = OTHER; note = 2'-Omethyluridine
  modified_base 5: mod_base = OTHER; note = 2'-Omethylcytosine
  modified_base 6: mod_base = OTHER; note = 2'-Omethylcytosine
  modified_base 20: mod_base = OTHER; note = 2'-Omethyluridine
  modified_base 25: mod_base = OTHER; note = 2'-Omethylcytosine
  modified_base 41: mod_base = OTHER; note = 2'-Omethylcytosine
  modified_base 49: mod_base = OTHER; note = 2'-Omethylcytosine
  modified_base 50: mod_base = OTHER; note = 2'-Omethylcytosine
  modified_base 51: mod_base = OTHER; note = 2'-Omethylguanosine
  modified_base 52: mod_base = OTHER; note = 2'-Omethylguanosine
  modified_base 53: mod_base = OTHER; note = 2'-Omethylguanosine
  modified_base 54: mod_base = OTHER; note = 2'-Omethyluridine
  modified_base 61: mod_base = OTHER; note = 2'-Omethylcytosine
  modified_base 62: mod_base = OTHER; note = 2'-Omethylcytosine
  modified_base 63: mod_base = OTHER; note = 2'-fluorocytosine
  modified_base 64: mod_base = OTHER; note = 2'-Omethylguanosine
  modified_base 65: mod_base = OTHER; note = 2'-Omethylguanosine
  modified_base 66: mod_base = OTHER; note = 2'-Omethylcytosine
  modified_base 67: mod_base = OTHER; note = 2'-Omethylguanosine
  modified_base 68: mod_base = OTHER; note = 2'-Omethylguanosine
  modified_base 73: mod_base = OTHER; note = 2'-Omethylguanosine

SEQ ID NO: 1917 - RNA, 76 nt, synthetic construct; identical to SEQ ID NO: 625
  source 1..76: mol_type = other RNA
  modified_base 1: mod_base = OTHER; note = 2'-Omethylguanosine
  modified_base 2: mod_base = OTHER; note = 2'-Omethylguanosine
  modified_base 3: mod_base = OTHER; note = 2'-Omethylcytosine
  modified_base 4: mod_base = OTHER; note = 2'-Omethyluridine
  modified_base 5: mod_base = OTHER; note = 2'-Omethylcytosine
  modified_base 6: mod_base = OTHER; note = 2'-Omethylcytosine
  modified_base 16: mod_base = OTHER; note = 2'-Omethyluridine
  modified_base 17: mod_base = OTHER; note = 2'-Omethylguanosine
  modified_base 18: mod_base = OTHER; note = 2'-Omethylguanosine
  modified_base 20: mod_base = OTHER; note = 2'-Omethyluridine
  modified_base 25: mod_base = OTHER; note = 2'-Omethylcytosine
  modified_base 33: mod_base = OTHER; note = 2'-fluorouridine
  modified_base 35: mod_base = OTHER; note = Cytosine phosphorothiorate
  modified_base 37: mod_base = OTHER; note = Adenosine phosphorothiorate
  modified_base 38: mod_base = OTHER; note = Adenosine phosphorothiorate
  modified_base 41: mod_base = OTHER; note = 2'-Omethylcytosine
  modified_base 44: mod_base = OTHER; note = 2'-Omethyladenosine
  modified_base 45: mod_base = OTHER; note = 2'-Omethylguanosine
  modified_base 46: mod_base = OTHER; note = 2'-fluoroguanosine
  modified_base 47: mod_base = OTHER; note = 2'-fluorouridine
  modified_base 48: mod_base = OTHER; note = 2'-fluorouridine
  modified_base 49: mod_base = OTHER; note = 2'-Omethylcytosine
  modified_base 50: mod_base = OTHER; note = 2'-Omethylcytosine
  modified_base 51: mod_base = OTHER; note = 2'-Omethylguanosine
  modified_base 52: mod_base = OTHER; note = 2'-Omethylguanosine
  modified_base 53: mod_base = OTHER; note = 2'-Omethylguanosine
  modified_base 54: mod_base = OTHER; note = 2'-Omethyluridine
  modified_base 56: mod_base = OTHER; note = 2'-Omethylcytosine
  modified_base 59: mod_base = OTHER; note = 2'-Omethylguanosine
  modified_base 73: mod_base = OTHER; note = 2'-Omethylguanosine

SEQ ID NO: 1918 - RNA, 76 nt, synthetic construct; identical to SEQ ID NO: 625
  source 1..76: mol_type = other RNA
  modified_base 1: mod_base = OTHER; note = 2'-Omethylguanosine
  modified_base 2: mod_base = OTHER; note = 2'-Omethylguanosine
  modified_base 3: mod_base = OTHER; note = 2'-Omethylcytosine
  modified_base 4: mod_base = OTHER; note = 2'-Omethyluridine
  modified_base 5: mod_base = OTHER; note = 2'-Omethylcytosine
  modified_base 6: mod_base = OTHER; note = 2'-Omethylcytosine
  modified_base 16: mod_base = OTHER; note = 2'-Omethyluridine
  modified_base 17: mod_base = OTHER; note = 2'-Omethylguanosine
  modified_base 18: mod_base = OTHER; note = 2'-Omethylguanosine
  modified_base 20: mod_base = OTHER; note = 2'-Omethyluridine
  modified_base 25: mod_base = OTHER; note = 2'-Omethylcytosine
  modified_base 33: mod_base = OTHER; note = 2'-fluorouridine
  modified_base 35: mod_base = OTHER; note = Cytosine phosphorothiorate
  modified_base 37: mod_base = OTHER; note = Adenosine phosphorothiorate
  modified_base 38: mod_base = OTHER; note = Adenosine phosphorothiorate
  modified_base 41: mod_base = OTHER; note = 2'-Omethylcytosine
  modified_base 44: mod_base = OTHER; note = 2'-Omethyladenosine
  modified_base 45: mod_base = OTHER; note = 2'-Omethylguanosine
  modified_base 46: mod_base = OTHER; note = 2'-fluoroguanosine
  modified_base 47: mod_base = OTHER; note = 2'-fluorouridine
  modified_base 48: mod_base = OTHER; note = 2'-fluorouridine
  modified_base 56: mod_base = OTHER; note = 2'-Omethylcytosine
  modified_base 59: mod_base = OTHER; note = 2'-Omethylguanosine
  modified_base 61: mod_base = OTHER; note = 2'-Omethylcytosine
  modified_base 62: mod_base = OTHER; note = 2'-Omethylcytosine
  modified_base 63: mod_base = OTHER; note = 2'-fluorocytosine
  modified_base 64: mod_base = OTHER; note = 2'-Omethylguanosine
  modified_base 65: mod_base = OTHER; note = 2'-Omethylguanosine
  modified_base 66: mod_base = OTHER; note = 2'-Omethylcytosine
  modified_base 67: mod_base = OTHER; note = 2'-Omethylguanosine
  modified_base 68: mod_base = OTHER; note = 2'-Omethylguanosine
  modified_base 73: mod_base = OTHER; note = 2'-Omethylguanosine

SEQ ID NO: 1919 - RNA, 76 nt, synthetic construct; identical to SEQ ID NO: 625
  source 1..76: mol_type = other RNA
  modified_base 1: mod_base = OTHER; note = 2'-Omethylguanosine
  modified_base 2: mod_base = OTHER; note = 2'-Omethylguanosine
  modified_base 3: mod_base = OTHER; note = 2'-Omethylcytosine
  modified_base 4: mod_base = OTHER; note = 2'-Omethyluridine
  modified_base 5: mod_base = OTHER; note = 2'-Omethylcytosine
  modified_base 6: mod_base = OTHER; note = 2'-Omethylcytosine
  modified_base 16: mod_base = OTHER; note = 2'-Omethyluridine
  modified_base 17: mod_base = OTHER; note = 2'-Omethylguanosine
  modified_base 18: mod_base = OTHER; note = 2'-Omethylguanosine
  modified_base 20: mod_base = OTHER; note = 2'-Omethyluridine
  modified_base 25: mod_base = OTHER; note = 2'-Omethylcytosine
  modified_base 33: mod_base = OTHER; note = 2'-fluorouridine
  modified_base 35: mod_base = OTHER; note = Cytosine phosphorothiorate
  modified_base 37: mod_base = OTHER; note = Adenosine phosphorothiorate
  modified_base 38: mod_base = OTHER; note = Adenosine phosphorothiorate
  modified_base 41: mod_base = OTHER; note = 2'-Omethylcytosine
  modified_base 44: mod_base = OTHER; note = 2'-Omethyladenosine
  modified_base 45: mod_base = OTHER; note = 2'-Omethylguanosine
  modified_base 46: mod_base = OTHER; note = 2'-fluoroguanosine
  modified_base 47: mod_base = OTHER; note = 2'-fluorouridine
  modified_base 48: mod_base = OTHER; note = 2'-fluorouridine
  modified_base 56: mod_base = OTHER; note = 2'-Omethylcytosine
  modified_base 59: mod_base = OTHER; note = 2'-Omethylguanosine
  modified_base 73: mod_base = OTHER; note = 2'-Omethylguanosine

SEQ ID NO: 1920 - RNA, 76 nt, synthetic construct; identical to SEQ ID NO: 625
  source 1..76: mol_type = other RNA
  modified_base 1: mod_base = OTHER; note = 2'-Omethylguanosine phosphorothiorate
  modified_base 2: mod_base = OTHER; note = 2'-Omethylguanosine
  modified_base 3: mod_base = OTHER; note = 2'-Omethylcytosine
  modified_base 4: mod_base = OTHER; note = 2'-Omethyluridine
  modified_base 5: mod_base = OTHER; note = 2'-Omethylcytosine
  modified_base 6: mod_base = OTHER; note = 2'-Omethylcytosine
  modified_base 16: mod_base = OTHER; note = 2'-Omethyluridine
  modified_base 17: mod_base = OTHER; note = 2'-Omethylguanosine
  modified_base 18: mod_base = OTHER; note = 2'-Omethylguanosine
  modified_base 33: mod_base = OTHER; note = 2'-fluorouridine
  modified_base 35: mod_base = OTHER; note = Cytosine phosphorothiorate
  modified_base 37: mod_base = OTHER; note = Adenosine phosphorothiorate
  modified_base 38: mod_base = OTHER; note = Adenosine phosphorothiorate
  modified_base 44: mod_base = OTHER; note = 2'-Omethyladenosine
  modified_base 45: mod_base = OTHER; note = 2'-Omethylguanosine
  modified_base 46: mod_base = OTHER; note = 2'-fluoroguanosine
  modified_base 47: mod_base = OTHER; note = 2'-fluorouridine
  modified_base 48: mod_base = OTHER; note = 2'-fluorouridine
  modified_base 49: mod_base = OTHER; note = 2'-Omethylcytosine
  modified_base 50: mod_base = OTHER; note = 2'-Omethylcytosine
  modified_base 51: mod_base = OTHER; note = 2'-Omethylguanosine
  modified_base 52: mod_base = OTHER; note = 2'-Omethylguanosine
  modified_base 53: mod_base = OTHER; note = 2'-Omethylguanosine
  modified_base 54: mod_base = OTHER; note = 2'-Omethyluridine
  modified_base 56: mod_base = OTHER; note = 2'-Omethylcytosine
  modified_base 59: mod_base = OTHER; note = 2'-Omethylguanosine
  modified_base 61: mod_base = OTHER; note = 2'-Omethylcytosine
  modified_base 62: mod_base = OTHER; note = 2'-Omethylcytosine
  modified_base 63: mod_base = OTHER; note = 2'-fluorocytosine
  modified_base 64: mod_base = OTHER; note = 2'-Omethylguanosine
  modified_base 65: mod_base = OTHER; note = 2'-Omethylguanosine
  modified_base 66: mod_base = OTHER; note = 2'-Omethylcytosine
  modified_base 67: mod_base = OTHER; note = 2'-Omethylguanosine
  modified_base 68: mod_base = OTHER; note = 2'-Omethylguanosine
  modified_base 73: mod_base = OTHER; note = 2'-Omethylguanosine

SEQ ID NO: 1921 - skipped

SEQ ID NO: 1922 - RNA, 76 nt, synthetic construct; identical to SEQ ID NO: 625
  source 1..76: mol_type = other RNA
  modified_base 1: mod_base = OTHER; note = 2'-Omethylguanosine phosphorothiorate
  modified_base 2: mod_base = OTHER; note = 2'-Omethylguanosine phosphorothiorate
  modified_base 3: mod_base = OTHER; note = 2'-Omethylcytosine
  modified_base 4: mod_base = OTHER; note = 2'-Omethyluridine
  modified_base 5: mod_base = OTHER; note = 2'-Omethylcytosine
  modified_base 6: mod_base = OTHER; note = 2'-Omethylcytosine
  modified_base 16: mod_base = OTHER; note = 2'-Omethyluridine
  modified_base 17: mod_base = OTHER; note = 2'-Omethylguanosine
  modified_base 18: mod_base = OTHER; note = 2'-Omethylguanosine
  modified_base 33: mod_base = OTHER; note = 2'-fluorouridine
  modified_base 35: mod_base = OTHER; note = Cytosine phosphorothiorate
  modified_base 37: mod_base = OTHER; note = Adenosine phosphorothiorate
  modified_base 38: mod_base = OTHER; note = Adenosine phosphorothiorate
  modified_base 44: mod_base = OTHER; note = 2'-Omethyladenosine
  modified_base 45: mod_base = OTHER; note = 2'-Omethylguanosine
  modified_base 46: mod_base = OTHER; note = 2'-fluoroguanosine
  modified_base 47: mod_base = OTHER; note = 2'-fluorouridine
  modified_base 48: mod_base = OTHER; note = 2'-fluorouridine
  modified_base 49: mod_base = OTHER; note = 2'-Omethylcytosine
  modified_base 50: mod_base = OTHER; note = 2'-Omethylcytosine
  modified_base 51: mod_base = OTHER; note = 2'-Omethylguanosine
  modified_base 52: mod_base = OTHER; note = 2'-Omethylguanosine
  modified_base 53: mod_base = OTHER; note = 2'-Omethylguanosine
  modified_base 54: mod_base = OTHER; note = 2'-Omethyluridine
  modified_base 56: mod_base = OTHER; note = 2'-Omethylcytosine
  modified_base 59: mod_base = OTHER; note = 2'-Omethylguanosine
  modified_base 61: mod_base = OTHER; note = 2'-Omethylcytosine
  modified_base 62: mod_base = OTHER; note = 2'-Omethylcytosine
  modified_base 63: mod_base = OTHER; note = 2'-fluorocytosine
  modified_base 64: mod_base = OTHER; note = 2'-Omethylguanosine
  modified_base 65: mod_base = OTHER; note = 2'-Omethylguanosine
  modified_base 66: mod_base = OTHER; note = 2'-Omethylcytosine
  modified_base 67: mod_base = OTHER; note = 2'-Omethylguanosine
  modified_base 68: mod_base = OTHER; note = 2'-Omethylguanosine
  modified_base 73: mod_base = OTHER; note = 2'-Omethylguanosine

SEQ ID NO: 1923 - RNA, 76 nt, synthetic construct; identical to SEQ ID NO: 625
  source 1..76: mol_type = other RNA
  modified_base 1: mod_base = OTHER; note = 2'-Omethylguanosine phosphorothiorate
  modified_base 2: mod_base = OTHER; note = 2'-Omethylguanosine phosphorothiorate
  modified_base 3: mod_base = OTHER; note = 2'-Omethylcytosine
  modified_base 4: mod_base = OTHER; note = 2'-Omethyluridine
  modified_base 5: mod_base = OTHER; note = 2'-Omethylcytosine
  modified_base 6: mod_base = OTHER; note = 2'-Omethylcytosine
  modified_base 16: mod_base = OTHER; note = 2'-Omethyluridine
  modified_base 17: mod_base = OTHER; note = 2'-Omethylguanosine
  modified_base 18: mod_base = OTHER; note = 2'-Omethylguanosine
  modified_base 33: mod_base = OTHER; note = 2'-fluorouridine
  modified_base 35: mod_base = OTHER; note = Cytosine phosphorothiorate
  modified_base 37: mod_base = OTHER; note = Adenosine phosphorothiorate
  modified_base 38: mod_base = OTHER; note = Adenosine phosphorothiorate
  modified_base 44: mod_base = OTHER; note = 2'-Omethyladenosine
  modified_base 45: mod_base = OTHER; note = 2'-Omethylguanosine
  modified_base 46: mod_base = OTHER; note = 2'-fluoroguanosine
  modified_base 47: mod_base = OTHER; note = 2'-fluorouridine
  modified_base 48: mod_base = OTHER; note = 2'-fluorouridine
  modified_base 50: mod_base = OTHER; note = 2'-Omethylcytosine
  modified_base 51: mod_base = OTHER; note = 2'-Omethylguanosine
  modified_base 52: mod_base = OTHER; note = 2'-Omethylguanosine
  modified_base 53: mod_base = OTHER; note = 2'-Omethylguanosine
  modified_base 54: mod_base = OTHER; note = 2'-Omethyluridine
  modified_base 56: mod_base = OTHER; note = 2'-Omethylcytosine
  modified_base 59: mod_base = OTHER; note = 2'-Omethylguanosine
  modified_base 61: mod_base = OTHER; note = 2'-Omethylcytosine
  modified_base 62: mod_base = OTHER; note = 2'-Omethylcytosine
  modified_base 63: mod_base = OTHER; note = 2'-fluorocytosine
  modified_base 64: mod_base = OTHER; note = 2'-Omethylguanosine
  modified_base 65: mod_base = OTHER; note = 2'-Omethylguanosine
  modified_base 66: mod_base = OTHER; note = 2'-Omethylcytosine
  modified_base 67: mod_base = OTHER; note = 2'-Omethylguanosine
  modified_base 68: mod_base = OTHER; note = 2'-Omethylguanosine
  modified_base 73: mod_base = OTHER; note = 2'-Omethylguanosine

SEQ ID NO: 1924 - DNA, 76 bp, synthetic construct
  source 1..76: mol_type = other DNA
  modified_base 1: mod_base = OTHER; note = 2'-Omethylguanosine phosphorothiorate
  modified_base 2: mod_base = OTHER; note = 2'-Omethylguanosine phosphorothiorate
  modified_base 3: mod_base = OTHER; note = 2'-Omethylcytosine
  modified_base 4: mod_base = OTHER; note = 2'-Omethyluridine
  modified_base 5: mod_base = OTHER; note = 2'-Omethylcytosine
  modified_base 6: mod_base = OTHER; note = 2'-Omethylcytosine
  modified_base 16: mod_base = OTHER; note = 2'-Omethyluridine
  modified_base 17: mod_base = OTHER; note = 2'-Omethylguanosine
  modified_base 18: mod_base = OTHER; note = 2'-Omethylguanosine
  modified_base 33: mod_base = OTHER; note = 2'-fluorouridine
  modified_base 35: mod_base = OTHER; note = Cytosine phosphorothiorate
  modified_base 37: mod_base = OTHER; note = Adenosine phosphorothiorate
  modified_base 38: mod_base = OTHER; note = Adenosine phosphorothiorate
  modified_base 44: mod_base = OTHER; note = 2'-Omethyladenosine
  modified_base 45: mod_base = OTHER; note = 2'-Omethylguanosine
  modified_base 46: mod_base = OTHER; note = 2'-fluoroguanosine
  modified_base 47: mod_base = OTHER; note = 2'-fluorouridine
  modified_base 48: mod_base = OTHER; note = 2'-fluorouridine
  modified_base 50: mod_base = OTHER; note = 2'-Omethylcytosine
  modified_base 51: mod_base = OTHER; note = 2'-Omethylguanosine
  modified_base 52: mod_base = OTHER; note = 2'-Omethylguanosine
  modified_base 53: mod_base = OTHER; note = 2'-Omethylguanosine
  modified_base 54: mod_base = OTHER; note = 2'-Omethyluridine
  modified_base 56: mod_base = OTHER; note = 2'-Omethylcytosine
  modified_base 59: mod_base = OTHER; note = 2'-Omethylguanosine
  modified_base 61: mod_base = OTHER; note = 2'-Omethylcytosine
  modified_base 62: mod_base = OTHER; note = 2'-Omethylcytosine
  modified_base 63: mod_base = OTHER; note = 2'-fluorocytosine
  modified_base 64: mod_base = OTHER; note = 2'-Omethylguanosine
  modified_base 65: mod_base = OTHER; note = 2'-Omethylguanosine
  modified_base 66: mod_base = OTHER; note = 2'-Omethylcytosine
  modified_base 67: mod_base = OTHER; note = 2'-Omethylguanosine
  modified_base 68: mod_base = OTHER; note = 2'-Omethylguanosine
  modified_base 73: mod_base = OTHER; note = 2'-Omethylguanosine
  misc_feature 1..48: note = RNA
  misc_feature 49: note = DNA
  misc_feature 50..76: note = RNA
ggctccgtggcgcaatggatagcgcattggacttcaaattcaaaggttccgggttcgagtcccggcggagtcgcca

SEQ ID NO: 1925 - RNA, 76 nt, synthetic construct; identical to SEQ ID NO: 625
  source 1..76: mol_type = other RNA
  modified_base 1: mod_base = OTHER; note = 2'-Omethylguanosine
  modified_base 2: mod_base = OTHER; note = 2'-Omethylguanosine
  modified_base 3: mod_base = OTHER; note = 2'-Omethylcytosine
  modified_base 4: mod_base = OTHER; note = 2'-Omethyluridine
  modified_base 5: mod_base = OTHER; note = 2'-Omethylcytosine
  modified_base 6: mod_base = OTHER; note = 2'-Omethylcytosine
  modified_base 16: mod_base = OTHER; note = 2'-Omethyluridine
  modified_base 17: mod_base = OTHER; note = 2'-Omethylguanosine
  modified_base 18: mod_base = OTHER; note = 2'-Omethylguanosine
  modified_base 33: mod_base = OTHER; note = 2'-fluorouridine
  modified_base 35: mod_base = OTHER; note = Cytosine phosphorothiorate
  modified_base 37: mod_base = OTHER; note = Adenosine phosphorothiorate
  modified_base 38: mod_base = OTHER; note = Adenosine phosphorothiorate
  modified_base 44: mod_base = OTHER; note = 2'-Omethyladenosine
  modified_base 45: mod_base = OTHER; note = 2'-Omethylguanosine
  modified_base 46: mod_base = OTHER; note = 2'-fluoroguanosine
  modified_base 47: mod_base = OTHER; note = 2'-fluorouridine
  modified_base 48: mod_base = OTHER; note = 2'-fluorouridine
  modified_base 49: mod_base = OTHER; note = 2'-fluorocytosine
  modified_base 50: mod_base = OTHER; note = 2'-Omethylcytosine
  modified_base 51: mod_base = OTHER; note = 2'-Omethylguanosine
  modified_base 52: mod_base = OTHER; note = 2'-Omethylguanosine
  modified_base 53: mod_base = OTHER; note = 2'-Omethylguanosine
  modified_base 54: mod_base = OTHER; note = 2'-Omethyluridine
  modified_base 56: mod_base = OTHER; note = 2'-Omethylcytosine
  modified_base 59: mod_base = OTHER; note = 2'-Omethylguanosine
  modified_base 61: mod_base = OTHER; note = 2'-Omethylcytosine
  modified_base 62: mod_base = OTHER; note = 2'-Omethylcytosine
  modified_base 63: mod_base = OTHER; note = 2'-fluorocytosine
  modified_base 64: mod_base = OTHER; note = 2'-Omethylguanosine
  modified_base 65: mod_base = OTHER; note = 2'-Omethylguanosine
  modified_base 66: mod_base = OTHER; note = 2'-Omethylcytosine
  modified_base 67: mod_base = OTHER; note = 2'-Omethylguanosine
  modified_base 68: mod_base = OTHER; note = 2'-Omethylguanosine
  modified_base 73: mod_base = OTHER; note = 2'-Omethylguanosine

SEQ ID NO: 1926 - RNA, 76 nt, synthetic construct; identical to SEQ ID NO: 625
  source 1..76: mol_type = other RNA
  modified_base 1: mod_base = OTHER; note = 2'-Omethylguanosine phosphorothiorate
  modified_base 2: mod_base = OTHER; note = 2'-Omethylguanosine phosphorothiorate
  modified_base 3: mod_base = OTHER; note = 2'-Omethylcytosine
  modified_base 4: mod_base = OTHER; note = 2'-Omethyluridine
  modified_base 5: mod_base = OTHER; note = 2'-Omethylcytosine
  modified_base 6: mod_base = OTHER; note = 2'-Omethylcytosine
  modified_base 16: mod_base = OTHER; note = 2'-Omethyluridine
  modified_base 17: mod_base = OTHER; note = 2'-Omethylguanosine
  modified_base 18: mod_base = OTHER; note = 2'-Omethylguanosine
  modified_base 33: mod_base = OTHER; note = 2'-fluorouridine
  modified_base 35: mod_base = OTHER; note = Cytosine phosphorothiorate
  modified_base 37: mod_base = OTHER; note = Adenosine phosphorothiorate
  modified_base 38: mod_base = OTHER; note = Adenosine phosphorothiorate
  modified_base 44: mod_base = OTHER; note = 2'-Omethyladenosine
  modified_base 45: mod_base = OTHER; note = 2'-Omethylguanosine
  modified_base 46: mod_base = OTHER; note = 2'-fluoroguanosine
  modified_base 47: mod_base = OTHER; note = 2'-fluorouridine
  modified_base 48: mod_base = OTHER; note = 2'-fluorouridine
  modified_base 49: mod_base = OTHER; note = 2'-Omethylcytosine
  modified_base 50: mod_base = OTHER; note = 2'-Omethylcytosine
  modified_base 51: mod_base = OTHER; note = 2'-Omethylguanosine
  modified_base 52: mod_base = OTHER; note = 2'-Omethylguanosine
  modified_base 53: mod_base = OTHER; note = 2'-Omethylguanosine
  modified_base 54: mod_base = OTHER; note = 2'-Omethyluridine
  modified_base 56: mod_base = OTHER; note = 2'-Omethylcytosine
  modified_base 59: mod_base = OTHER; note = 2'-Omethylguanosine
  modified_base 61: mod_base = OTHER; note = 2'-Omethylcytosine
  modified_base 62: mod_base = OTHER; note = 2'-Omethylcytosine
  modified_base 63: mod_base = OTHER; note = 2'-fluorocytosine
  modified_base 64: mod_base = OTHER; note = 2'-Omethylguanosine
  modified_base 65: mod_base = OTHER; note = 2'-Omethylguanosine
  modified_base 67: mod_base = OTHER; note = 2'-Omethylguanosine
  modified_base 68: mod_base = OTHER; note = 2'-Omethylguanosine
  modified_base 73: mod_base = OTHER; note = 2'-Omethylguanosine

SEQ ID NO: 1927 - RNA, 76 nt, synthetic construct; identical to SEQ ID NO: 625
  source 1..76: mol_type = other RNA
  modified_base 1: mod_base = OTHER; note = 2'-Omethylguanosine phosphorothiorate
  modified_base 2: mod_base = OTHER; note = 2'-Omethylguanosine phosphorothiorate
  modified_base 3: mod_base = OTHER; note = 2'-Omethylcytosine
  modified_base 4: mod_base = OTHER; note = 2'-Omethyluridine
  modified_base 5: mod_base = OTHER; note = 2'-Omethylcytosine
  modified_base 6: mod_base = OTHER; note = 2'-Omethylcytosine
  modified_base 10: mod_base = OTHER; note = 2'-Omethylguanosine
  modified_base 11: mod_base = OTHER; note = 2'-Omethylcytosine
  modified_base 12: mod_base = OTHER; note = 2'-Omethylguanosine
  modified_base 13: mod_base = OTHER; note = 2'-Omethylcytosine
  modified_base 16: mod_base = OTHER; note = 2'-Omethyluridine
  modified_base 17: mod_base = OTHER; note = 2'-Omethylguanosine
  modified_base 18: mod_base = OTHER; note = 2'-Omethylguanosine
  modified_base 33: mod_base = OTHER; note = 2'-fluorouridine
  modified_base 35: mod_base = OTHER; note = Cytosine phosphorothiorate
  modified_base 37: mod_base = OTHER; note = Adenosine phosphorothiorate
  modified_base 38: mod_base = OTHER; note = Adenosine phosphorothiorate
  modified_base 44: mod_base = OTHER; note = 2'-Omethyladenosine
  modified_base 45: mod_base = OTHER; note = 2'-Omethylguanosine
  modified_base 46: mod_base = OTHER; note = 2'-fluoroguanosine
  modified_base 47: mod_base = OTHER; note = 2'-fluorouridine
  modified_base 48: mod_base = OTHER; note = 2'-fluorouridine
  modified_base 49: mod_base = OTHER; note = 2'-Omethylcytosine
  modified_base 50: mod_base = OTHER; note = 2'-Omethylcytosine
  modified_base 51: mod_base = OTHER; note = 2'-Omethylguanosine
  modified_base 52: mod_base = OTHER; note = 2'-Omethylguanosine
  modified_base 53: mod_base = OTHER; note = 2'-Omethylguanosine
  modified_base 54: mod_base = OTHER; note = 2'-Omethyluridine
  modified_base 56: mod_base = OTHER; note = 2'-Omethylcytosine
  modified_base 59: mod_base = OTHER; note = 2'-Omethylguanosine
  modified_base 61: mod_base = OTHER; note = 2'-Omethylcytosine
  modified_base 62: mod_base = OTHER; note = 2'-Omethylcytosine
  modified_base 63: mod_base = OTHER; note = 2'-fluorocytosine
  modified_base 64: mod_base = OTHER; note = 2'-Omethylguanosine
  modified_base 65: mod_base = OTHER; note = 2'-Omethylguanosine
  modified_base 66: mod_base = OTHER; note = 2'-Omethylcytosine
  modified_base 67: mod_base = OTHER; note = 2'-Omethylguanosine
  modified_base 68: mod_base = OTHER; note = 2'-Omethylguanosine
  modified_base 73: mod_base = OTHER; note = 2'-Omethylguanosine

SEQ ID NO: 1928 - RNA, 76 nt, synthetic construct; identical to SEQ ID NO: 625
  source 1..76: mol_type = other RNA
  modified_base 1: mod_base = OTHER; note = 2'-Omethylguanosine phosphorothiorate
  modified_base 2: mod_base = OTHER; note = 2'-Omethylguanosine phosphorothiorate
  modified_base 3: mod_base = OTHER; note = 2'-Omethylcytosine
  modified_base 4: mod_base = OTHER; note = 2'-Omethyluridine
  modified_base 5: mod_base = OTHER; note = 2'-Omethylcytosine
  modified_base 6: mod_base = OTHER; note = 2'-Omethylcytosine
  modified_base 16: mod_base = OTHER; note = 2'-Omethyluridine
  modified_base 17: mod_base = OTHER; note = 2'-Omethylguanosine
  modified_base 18: mod_base = OTHER; note = 2'-Omethylguanosine
  modified_base 22: mod_base = OTHER; note = 2'-Omethylguanosine
  modified_base 23: mod_base = OTHER; note = 2'-Omethylcytosine
  modified_base 24: mod_base = OTHER; note = 2'-Omethylguanosine
  modified_base 25: mod_base = OTHER; note = 2'-Omethylcytosine
  modified_base 33: mod_base = OTHER; note = 2'-fluorouridine
  modified_base 35: mod_base = OTHER; note = Cytosine phosphorothiorate
  modified_base 37: mod_base = OTHER; note = Adenosine phosphorothiorate
  modified_base 38: mod_base = OTHER; note = Adenosine phosphorothiorate
  modified_base 44: mod_base = OTHER; note = 2'-Omethyladenosine
  modified_base 45: mod_base = OTHER; note = 2'-Omethylguanosine
  modified_base 46: mod_base = OTHER; note = 2'-fluoroguanosine
  modified_base 47: mod_base = OTHER; note = 2'-fluorouridine
  modified_base 48: mod_base = OTHER; note = 2'-fluorouridine
  modified_base 49: mod_base = OTHER; note = 2'-Omethylcytosine
  modified_base 50: mod_base = OTHER; note = 2'-Omethylcytosine
  modified_base 51: mod_base = OTHER; note = 2'-Omethylguanosine
  modified_base 52: mod_base = OTHER; note = 2'-Omethylguanosine
  modified_base 53: mod_base = OTHER; note = 2'-Omethylguanosine
  modified_base 54: mod_base = OTHER; note = 2'-Omethyluridine
  modified_base 56: mod_base = OTHER; note = 2'-Omethylcytosine
  modified_base 59: mod_base = OTHER; note = 2'-Omethylguanosine
  modified_base 61: mod_base = OTHER; note = 2'-Omethylcytosine
  modified_base 62: mod_base = OTHER; note = 2'-Omethylcytosine
  modified_base 63: mod_base = OTHER; note = 2'-fluorocytosine
  modified_base 64: mod_base = OTHER; note = 2'-Omethylguanosine
  modified_base 65: mod_base = OTHER; note = 2'-Omethylguanosine
  modified_base 66: mod_base = OTHER; note = 2'-Omethylcytosine
  modified_base 67: mod_base = OTHER; note = 2'-Omethylguanosine
  modified_base 68: mod_base = OTHER; note = 2'-Omethylguanosine
  modified_base 73: mod_base = OTHER; note = 2'-Omethylguanosine

SEQ ID NO: 1929 - RNA, 76 nt, synthetic construct; identical to SEQ ID NO: 625
  source 1..76: mol_type = other RNA
  modified_base 1: mod_base = OTHER; note = 2'-Omethylguanosine phosphorothiorate
  modified_base 2: mod_base = OTHER; note = 2'-Omethylguanosine phosphorothiorate
  modified_base 3: mod_base = OTHER; note = 2'-Omethylcytosine
  modified_base 4: mod_base = OTHER; note = 2'-Omethyluridine
  modified_base 5: mod_base = OTHER; note = 2'-Omethylcytosine
  modified_base 6: mod_base = OTHER; note = 2'-Omethylcytosine
  modified_base 10: mod_base = OTHER; note = 2'-Omethylguanosine
  modified_base 11: mod_base = OTHER; note = 2'-Omethylcytosine
  modified_base 12: mod_base = OTHER; note = 2'-Omethylguanosine
  modified_base 13: mod_base = OTHER; note = 2'-Omethylcytosine
  modified_base 16: mod_base = OTHER; note = 2'-Omethyluridine
  modified_base 17: mod_base = OTHER; note = 2'-Omethylguanosine
  modified_base 18: mod_base = OTHER; note = 2'-Omethylguanosine
  modified_base 22: mod_base = OTHER; note = 2'-Omethylguanosine
  modified_base 23: mod_base = OTHER; note = 2'-Omethylcytosine
  modified_base 24: mod_base = OTHER; note = 2'-Omethylguanosine
  modified_base 25: mod_base = OTHER; note = 2'-Omethylcytosine
  modified_base 33: mod_base = OTHER; note = 2'-fluorouridine
  modified_base 35: mod_base = OTHER; note = Cytosine phosphorothiorate
  modified_base 37: mod_base = OTHER; note = Adenosine phosphorothiorate
  modified_base 38: mod_base = OTHER; note = Adenosine phosphorothiorate
  modified_base 44: mod_base = OTHER; note = 2'-Omethyladenosine
  modified_base 45: mod_base = OTHER; note = 2'-Omethylguanosine
  modified_base 46: mod_base = OTHER; note = 2'-fluoroguanosine
  modified_base 47: mod_base = OTHER; note = 2'-fluorouridine
  modified_base 48: mod_base = OTHER; note = 2'-fluorouridine
  modified_base 49: mod_base = OTHER; note = 2'-Omethylcytosine
  modified_base 50: mod_base = OTHER; note = 2'-Omethylcytosine
  modified_base 51: mod_base = OTHER; note = 2'-Omethylguanosine
  modified_base 52: mod_base = OTHER; note = 2'-Omethylguanosine
  modified_base 53: mod_base = OTHER; note = 2'-Omethylguanosine
  modified_base 54: mod_base = OTHER; note = 2'-Omethyluridine
  modified_base 56: mod_base = OTHER; note = 2'-Omethylcytosine
  modified_base 59: mod_base = OTHER; note = 2'-Omethylguanosine
  modified_base 61: mod_base = OTHER; note = 2'-Omethylcytosine
  modified_base 62: mod_base = OTHER; note = 2'-Omethylcytosine
  modified_base 63: mod_base = OTHER; note = 2'-fluorocytosine
  modified_base 64: mod_base = OTHER; note = 2'-Omethylguanosine
  modified_base 65: mod_base = OTHER; note = 2'-Omethylguanosine
  modified_base 66: mod_base = OTHER; note = 2'-Omethylcytosine
  modified_base 67: mod_base = OTHER; note = 2'-Omethylguanosine
  modified_base 68: mod_base = OTHER; note = 2'-Omethylguanosine
  modified_base 73: mod_base = OTHER; note = 2'-Omethylguanosine

SEQ ID NO: 1930 - RNA, 76 nt, synthetic construct; identical to SEQ ID NO: 625
  source 1..76: mol_type = other RNA
  modified_base 1: mod_base = OTHER; note = 2'-Omethylguanosine phosphorothiorate
  modified_base 2: mod_base = OTHER; note = 2'-Omethylguanosine phosphorothiorate
  modified_base 3: mod_base = OTHER; note = 2'-Omethylcytosine
  modified_base 4: mod_base = OTHER; note = 2'-Omethyluridine
  modified_base 5: mod_base = OTHER; note = 2'-Omethylcytosine
  modified_base 6: mod_base = OTHER; note = 2'-Omethylcytosine
  modified_base 8: mod_base = OTHER; note = Uridine phosphorothiorate
  modified_base 16: mod_base = OTHER; note = 2'-Omethyluridine
  modified_base 17: mod_base = OTHER; note = 2'-Omethylguanosine
  modified_base 18: mod_base = OTHER; note = 2'-Omethylguanosine
  modified_base 33: mod_base = OTHER; note = 2'-fluorouridine
  modified_base 35: mod_base = OTHER; note = Cytosine phosphorothiorate
  modified_base 37: mod_base = OTHER; note = Adenosine phosphorothiorate
  modified_base 38: mod_base = OTHER; note = Adenosine phosphorothiorate
  modified_base 44: mod_base = OTHER; note = 2'-Omethyladenosine
  modified_base 45: mod_base = OTHER; note = 2'-Omethylguanosine
  modified_base 46: mod_base = OTHER; note = 2'-fluoroguanosine
  modified_base 47: mod_base = OTHER; note = 2'-fluorouridine
  modified_base 48: mod_base = OTHER; note = 2'-fluorouridine
  modified_base 49: mod_base = OTHER; note = 2'-Omethylcytosine
  modified_base 50: mod_base = OTHER; note = 2'-Omethylcytosine
  modified_base 51: mod_base = OTHER; note = 2'-Omethylguanosine
  modified_base 52: mod_base = OTHER; note = 2'-Omethylguanosine
  modified_base 53: mod_base = OTHER; note = 2'-Omethylguanosine
  modified_base 54: mod_base = OTHER; note = 2'-Omethyluridine
  modified_base 56: mod_base = OTHER; note = 2'-Omethylcytosine
  modified_base 59: mod_base = OTHER; note = 2'-Omethylguanosine
  modified_base 61: mod_base = OTHER; note = 2'-Omethylcytosine
  modified_base 62: mod_base = OTHER; note = 2'-Omethylcytosine
  modified_base 63: mod_base = OTHER; note = 2'-fluorocytosine
  modified_base 64: mod_base = OTHER; note = 2'-Omethylguanosine
  modified_base 65: mod_base = OTHER; note = 2'-Omethylguanosine
  modified_base 66: mod_base = OTHER; note = 2'-Omethylcytosine
  modified_base 67: mod_base = OTHER; note = 2'-Omethylguanosine
  modified_base 68: mod_base = OTHER; note = 2'-Omethylguanosine
  modified_base 73: mod_base = OTHER; note = 2'-Omethylguanosine

SEQ ID NO: 1931 - RNA, 76 nt, synthetic construct; identical to SEQ ID NO: 625
  source 1..76: mol_type = other RNA
  modified_base 1: mod_base = OTHER; note = 2'-Omethylguanosine phosphorothiorate
  modified_base 2: mod_base = OTHER; note = 2'-Omethylguanosine phosphorothiorate
  modified_base 3: mod_base = OTHER; note = 2'-Omethylcytosine
  modified_base 4: mod_base = OTHER; note = 2'-Omethyluridine
  modified_base 5: mod_base = OTHER; note = 2'-Omethylcytosine
  modified_base 6: mod_base = OTHER; note = 2'-Omethylcytosine
  modified_base 8: mod_base = OTHER; note = 2'-Omethyluridine
  modified_base 16: mod_base = OTHER; note = 2'-Omethyluridine
  modified_base 17: mod_base = OTHER; note = 2'-Omethylguanosine
  modified_base 18: mod_base = OTHER; note = 2'-Omethylguanosine
  modified_base 33: mod_base = OTHER; note = 2'-fluorouridine
  modified_base 35: mod_base = OTHER; note = Cytosine phosphorothiorate
  modified_base 37: mod_base = OTHER; note = Adenosine phosphorothiorate
  modified_base 38: mod_base = OTHER; note = Adenosine phosphorothiorate
  modified_base 44: mod_base = OTHER; note = 2'-Omethyladenosine
  modified_base 45: mod_base = OTHER; note = 2'-Omethylguanosine
  modified_base 46: mod_base = OTHER; note = 2'-fluoroguanosine
  modified_base 47: mod_base = OTHER; note = 2'-fluorouridine
  modified_base 48: mod_base = OTHER; note = 2'-fluorouridine
  modified_base 49: mod_base = OTHER; note = 2'-Omethylcytosine
  modified_base 50: mod_base = OTHER; note = 2'-Omethylcytosine
  modified_base 51: mod_base = OTHER; note = 2'-Omethylguanosine
  modified_base 52: mod_base = OTHER; note = 2'-Omethylguanosine
  modified_base 53: mod_base = OTHER; note = 2'-Omethylguanosine
  modified_base 54: mod_base = OTHER; note = 2'-Omethyluridine
  modified_base 56: mod_base = OTHER; note = 2'-Omethylcytosine
  modified_base 59: mod_base = OTHER; note = 2'-Omethylguanosine
  modified_base 61: mod_base = OTHER; note = 2'-Omethylcytosine
  modified_base 62: mod_base = OTHER; note = 2'-Omethylcytosine
  modified_base 63: mod_base = OTHER; note = 2'-fluorocytosine
  modified_base 64: mod_base = OTHER; note = 2'-Omethylguanosine
  modified_base 65: mod_base = OTHER; note = 2'-Omethylguanosine
  modified_base 66: mod_base = OTHER; note = 2'-Omethylcytosine
  modified_base 67: mod_base = OTHER; note = 2'-Omethylguanosine
  modified_base 68: mod_base = OTHER; note = 2'-Omethylguanosine
  modified_base 73: mod_base = OTHER; note = 2'-Omethylguanosine

SEQ ID NO: 1932 - DNA, 76 bp, synthetic construct; identical to SEQ ID NO: 1924
  source 1..76: mol_type = other DNA
  modified_base 1: mod_base = OTHER; note = 2'-Omethylguanosine phosphorothiorate
  modified_base 2: mod_base = OTHER; note = 2'-Omethylguanosine phosphorothiorate
  modified_base 3: mod_base = OTHER; note = 2'-Omethylcytosine
  modified_base 4: mod_base = OTHER; note = 2'-Omethyluridine
  modified_base 5: mod_base = OTHER; note = 2'-Omethylcytosine
  modified_base 6: mod_base = OTHER; note = 2'-Omethylcytosine
  modified_base 16: mod_base = OTHER; note = 2'-Omethyluridine
  modified_base 17: mod_base = OTHER; note = 2'-Omethylguanosine
  modified_base 18: mod_base = OTHER; note = 2'-Omethylguanosine
  modified_base 33: mod_base = OTHER; note = 2'-fluorouridine
  modified_base 35: mod_base = OTHER; note = Cytosine phosphorothiorate
  modified_base 37: mod_base = OTHER; note = Adenosine phosphorothiorate
  modified_base 38: mod_base = OTHER; note = Adenosine phosphorothiorate
  modified_base 44: mod_base = OTHER; note = 2'-Omethyladenosine
  modified_base 45: mod_base = OTHER; note = 2'-Omethylguanosine
  modified_base 46: mod_base = OTHER; note = 2'-fluoroguanosine
  modified_base 47: mod_base = OTHER; note = 2'-fluorouridine
  modified_base 48: mod_base = OTHER; note = 2'-fluorouridine
  modified_base 49: mod_base = OTHER; note = 2'-Omethylcytosine
  modified_base 50: mod_base = OTHER; note = 2'-Omethylcytosine
  modified_base 51: mod_base = OTHER; note = 2'-Omethylguanosine
  modified_base 52: mod_base = OTHER; note = 2'-Omethylguanosine
  modified_base 53: mod_base = OTHER; note = 2'-Omethylguanosine
  modified_base 54: mod_base = OTHER; note = 2'-Omethyluridine
  modified_base 56: mod_base = OTHER; note = 2'-Omethylcytosine
  modified_base 59: mod_base = OTHER; note = 2'-Omethylguanosine
  modified_base 61: mod_base = OTHER; note = 2'-Omethylcytosine
  modified_base 62: mod_base = OTHER; note = 2'-Omethylcytosine
  modified_base 63: mod_base = OTHER; note = 2'-fluorocytosine
  modified_base 64: mod_base = OTHER; note = 2'-Omethylguanosine
  modified_base 65: mod_base = OTHER; note = 2'-Omethylguanosine
  modified_base 66: mod_base = OTHER; note = 2'-Omethylcytosine
  modified_base 67: mod_base = OTHER; note = 2'-Omethylguanosine
  modified_base 68: mod_base = OTHER; note = 2'-Omethylguanosine
  modified_base 73: mod_base = OTHER; note = 2'-Omethylguanosine
  misc_feature 1..7: note = RNA
  misc_feature 8: note = DNA
  misc_feature 9..76: note = RNA

SEQ ID NO: 1933 - RNA, 76 nt, synthetic construct; identical to SEQ ID NO: 625
  source 1..76: mol_type = other RNA
  modified_base 1: mod_base = OTHER; note = 2'-Omethylguanosine phosphorothiorate
  modified_base 2: mod_base = OTHER; note = 2'-Omethylguanosine phosphorothiorate
  modified_base 3: mod_base = OTHER; note = 2'-Omethylcytosine
  modified_base 4: mod_base = OTHER; note = 2'-Omethyluridine
  modified_base 5: mod_base = OTHER; note = 2'-Omethylcytosine
  modified_base 6: mod_base = OTHER; note = 2'-Omethylcytosine
  modified_base 16: mod_base = OTHER; note = 2'-Omethyluridine
  modified_base 17: mod_base = OTHER; note = 2'-Omethylguanosine
  modified_base 18: mod_base = OTHER; note = 2'-Omethylguanosine
  modified_base 20: mod_base = OTHER; note = 2'-Omethyluridine
  modified_base 33: mod_base = OTHER; note = 2'-fluorouridine
  modified_base 35: mod_base = OTHER; note = Cytosine phosphorothiorate
  modified_base 37: mod_base = OTHER; note = Adenosine phosphorothiorate
  modified_base 38: mod_base = OTHER; note = Adenosine phosphorothiorate
  modified_base 44: mod_base = OTHER; note = 2'-Omethyladenosine
  modified_base 45: mod_base = OTHER; note = 2'-Omethylguanosine
  modified_base 46: mod_base = OTHER; note = 2'-fluoroguanosine
  modified_base 47: mod_base = OTHER; note = 2'-fluorouridine
  modified_base 48: mod_base = OTHER; note = 2'-fluorouridine
  modified_base 49: mod_base = OTHER; note = 2'-Omethylcytosine
  modified_base 50: mod_base = OTHER; note = 2'-Omethylcytosine
  modified_base 51: mod_base = OTHER; note = 2'-Omethylguanosine
  modified_base 52: mod_base = OTHER; note = 2'-Omethylguanosine
  modified_base 53: mod_base = OTHER; note = 2'-Omethylguanosine
  modified_base 54: mod_base = OTHER; note = 2'-Omethyluridine
  modified_base 56: mod_base = OTHER; note = 2'-Omethylcytosine
  modified_base 59: mod_base = OTHER; note = 2'-Omethylguanosine
  modified_base 61: mod_base = OTHER; note = 2'-Omethylcytosine
  modified_base 62: mod_base = OTHER; note = 2'-Omethylcytosine
  modified_base 63: mod_base = OTHER; note = 2'-fluorocytosine
  modified_base 64: mod_base = OTHER; note = 2'-Omethylguanosine
  modified_base 65: mod_base = OTHER; note = 2'-Omethylguanosine
  modified_base 66: mod_base = OTHER; note = 2'-Omethylcytosine
  modified_base 67: mod_base = OTHER; note = 2'-Omethylguanosine
  modified_base 68: mod_base = OTHER; note = 2'-Omethylguanosine
  modified_base 73: mod_base = OTHER; note = 2'-Omethylguanosine

SEQ ID NO: 1934 - RNA, 76 nt, synthetic construct; identical to SEQ ID NO: 625
  source 1..76: mol_type = other RNA
  modified_base 1: mod_base = OTHER; note = 2'-Omethylguanosine phosphorothiorate
  modified_base 2: mod_base = OTHER; note = 2'-Omethylguanosine phosphorothiorate
  modified_base 3: mod_base = OTHER; note = 2'-Omethylcytosine
  modified_base 4: mod_base = OTHER; note = 2'-Omethyluridine
  modified_base 5: mod_base = OTHER; note = 2'-Omethylcytosine
  modified_base 6: mod_base = OTHER; note = 2'-Omethylcytosine
  modified_base 16: mod_base = OTHER; note = 2'-Omethyluridine
  modified_base 17: mod_base = OTHER; note = 2'-Omethylguanosine
  modified_base 18: mod_base = OTHER; note = 2'-Omethylguanosine
  modified_base 20: mod_base = OTHER; note = 2'-Omethyluridine
  modified_base 22: mod_base = OTHER; note = 2'-Omethylguanosine
  modified_base 24: mod_base = OTHER; note = 2'-Omethylguanosine
  modified_base 25: mod_base = OTHER; note = 2'-Omethylcytosine
  modified_base 33: mod_base = OTHER; note = 2'-fluorouridine
  modified_base 35: mod_base = OTHER; note = Cytosine phosphorothiorate
  modified_base 37: mod_base = OTHER; note = Adenosine phosphorothiorate
  modified_base 38: mod_base = OTHER; note = Adenosine phosphorothiorate
  modified_base 44: mod_base = OTHER; note = 2'-Omethyladenosine
  modified_base 45: mod_base = OTHER; note = 2'-Omethylguanosine
  modified_base 46: mod_base = OTHER; note = 2'-fluoroguanosine
  modified_base 47: mod_base = OTHER; note = 2'-fluorouridine
  modified_base 48: mod_base = OTHER; note = 2'-fluorouridine
  modified_base 49: mod_base = OTHER; note = 2'-Omethylcytosine
  modified_base 50: mod_base = OTHER; note = 2'-Omethylcytosine
  modified_base 51: mod_base = OTHER; note = 2'-Omethylguanosine
  modified_base 52: mod_base = OTHER; note = 2'-Omethylguanosine
  modified_base 53: mod_base = OTHER; note = 2'-Omethylguanosine
  modified_base 54: mod_base = OTHER; note = 2'-Omethyluridine
  modified_base 56: mod_base = OTHER; note = 2'-Omethylcytosine
  modified_base 59: mod_base = OTHER; note = 2'-Omethylguanosine
  modified_base 61: mod_base = OTHER; note = 2'-Omethylcytosine
  modified_base 62: mod_base = OTHER; note = 2'-Omethylcytosine
  modified_base 63: mod_base = OTHER; note = 2'-fluorocytosine
  modified_base 64: mod_base = OTHER; note = 2'-Omethylguanosine
  modified_base 65: mod_base = OTHER; note = 2'-Omethylguanosine
  modified_base 66: mod_base = OTHER; note = 2'-Omethylcytosine
  modified_base 67: mod_base = OTHER; note = 2'-Omethylguanosine
  modified_base 68: mod_base = OTHER; note = 2'-Omethylguanosine
  modified_base 73: mod_base = OTHER; note = 2'-Omethylguanosine

SEQ ID NO: 1935 - RNA, 76 nt, synthetic construct; identical to SEQ ID NO: 625
  source 1..76: mol_type = other RNA
  modified_base 1: mod_base = OTHER; note = 2'-Omethylguanosine phosphorothiorate
  modified_base 2: mod_base = OTHER; note = 2'-Omethylguanosine phosphorothiorate
  modified_base 3: mod_base = OTHER; note = 2'-Omethylcytosine
  modified_base 4: mod_base = OTHER; note = 2'-Omethyluridine
  modified_base 5: mod_base = OTHER; note = 2'-Omethylcytosine
  modified_base 6: mod_base = OTHER; note = 2'-Omethylcytosine
  modified_base 16: mod_base = OTHER; note = 2'-Omethyluridine
  modified_base 17: mod_base = OTHER; note = 2'-Omethylguanosine
  modified_base 18: mod_base = OTHER; note = 2'-Omethylguanosine
  modified_base 20: mod_base = OTHER; note = 2'-Omethyluridine
  modified_base 22: mod_base = OTHER; note = 2'-Omethylguanosine
  modified_base 24: mod_base = OTHER; note = 2'-Omethylguanosine
  modified_base 25: mod_base = OTHER; note = 2'-Omethylcytosine
  modified_base 27: mod_base = OTHER; note = 2'-Omethyluridine
  modified_base 33: mod_base = OTHER; note = 2'-fluorouridine
  modified_base 35: mod_base = OTHER; note = Cytosine phosphorothiorate
  modified_base 37: mod_base = OTHER; note = Adenosine phosphorothiorate
  modified_base 38: mod_base = OTHER; note = Adenosine phosphorothiorate
  modified_base 44: mod_base = OTHER; note = 2'-Omethyladenosine
  modified_base 45: mod_base = OTHER; note = 2'-Omethylguanosine
  modified_base 46: mod_base = OTHER; note = 2'-fluoroguanosine
  modified_base 47: mod_base = OTHER; note = 2'-fluorouridine
  modified_base 48: mod_base = OTHER; note = 2'-fluorouridine
  modified_base 49: mod_base = OTHER; note = 2'-Omethylcytosine
  modified_base 50: mod_base = OTHER; note = 2'-Omethylcytosine
  modified_base 51: mod_base = OTHER; note = 2'-Omethylguanosine
  modified_base 52: mod_base = OTHER; note = 2'-Omethylguanosine
  modified_base 53: mod_base = OTHER; note = 2'-Omethylguanosine
  modified_base 54: mod_base = OTHER; note = 2'-Omethyluridine
  modified_base 56: mod_base = OTHER; note = 2'-Omethylcytosine
  modified_base 59: mod_base = OTHER; note = 2'-Omethylguanosine
  modified_base 61: mod_base = OTHER; note = 2'-Omethylcytosine
  modified_base 62: mod_base = OTHER; note = 2'-Omethylcytosine
  modified_base 63: mod_base = OTHER; note = 2'-fluorocytosine
  modified_base 64: mod_base = OTHER; note = 2'-Omethylguanosine
  modified_base 65: mod_base = OTHER; note = 2'-Omethylguanosine
  modified_base 66: mod_base = OTHER; note = 2'-Omethylcytosine
  modified_base 67: mod_base = OTHER; note = 2'-Omethylguanosine
  modified_base 68: mod_base = OTHER; note = 2'-Omethylguanosine
  modified_base 73: mod_base = OTHER; note = 2'-Omethylguanosine

SEQ ID NO: 1936 - RNA, 76 nt, synthetic construct; identical to SEQ ID NO: 625
  source 1..76: mol_type = other RNA
  modified_base 1: mod_base = OTHER; note = 2'-Omethylguanosine phosphorothiorate
  modified_base 2: mod_base = OTHER; note = 2'-Omethylguanosine phosphorothiorate
  modified_base 3: mod_base = OTHER; note = 2'-Omethylcytosine
  modified_base 4: mod_base = OTHER; note = 2'-Omethyluridine
  modified_base 5: mod_base = OTHER; note = 2'-Omethylcytosine
  modified_base 6: mod_base = OTHER; note = 2'-Omethylcytosine
  modified_base 16: mod_base = OTHER; note = 2'-Omethyluridine
  modified_base 17: mod_base = OTHER; note = 2'-Omethylguanosine
  modified_base 18: mod_base = OTHER; note = 2'-Omethylguanosine
  modified_base 20: mod_base = OTHER; note = 2'-Omethyluridine
  modified_base 22: mod_base = OTHER; note = 2'-Omethylguanosine
  modified_base 24: mod_base = OTHER; note = 2'-Omethylguanosine
  modified_base 25: mod_base = OTHER; note = 2'-Omethylcytosine
  modified_base 27: mod_base = OTHER; note = Uridine phosphorothiorate
  modified_base 33: mod_base = OTHER; note = 2'-fluorouridine
  modified_base 35: mod_base = OTHER; note = Cytosine phosphorothiorate
  modified_base 37: mod_base = OTHER; note = Adenosine phosphorothiorate
  modified_base 38: mod_base = OTHER; note = Adenosine phosphorothiorate
  modified_base 44: mod_base = OTHER; note = 2'-Omethyladenosine
  modified_base 45: mod_base = OTHER; note = 2'-Omethylguanosine
  modified_base 46: mod_base = OTHER; note = 2'-fluoroguanosine
  modified_base 47: mod_base = OTHER; note = 2'-fluorouridine
  modified_base 48: mod_base = OTHER; note = 2'-fluorouridine
  modified_base 49: mod_base = OTHER; note = 2'-Omethylcytosine
  modified_base 50: mod_base = OTHER; note = 2'-Omethylcytosine
  modified_base 51: mod_base = OTHER; note = 2'-Omethylguanosine
  modified_base 52: mod_base = OTHER; note = 2'-Omethylguanosine
  modified_base 53: mod_base = OTHER; note = 2'-Omethylguanosine
  modified_base 54: mod_base = OTHER; note = 2'-Omethyluridine
  modified_base 56: mod_base = OTHER; note = 2'-Omethylcytosine
  modified_base 59: mod_base = OTHER; note = 2'-Omethylguanosine
  modified_base 61: mod_base = OTHER; note = 2'-Omethylcytosine
  modified_base 62: mod_base = OTHER; note = 2'-Omethylcytosine
  modified_base 63: mod_base = OTHER; note = 2'-fluorocytosine
  modified_base 64: mod_base = OTHER; note = 2'-Omethylguanosine
  modified_base 65: mod_base = OTHER; note = 2'-Omethylguanosine
  modified_base 66: mod_base = OTHER; note = 2'-Omethylcytosine
  modified_base 67: mod_base = OTHER; note = 2'-Omethylguanosine
  modified_base 68: mod_base = OTHER; note = 2'-Omethylguanosine
  modified_base 73: mod_base = OTHER; note = 2'-Omethylguanosine

SEQ ID NO: 1937 - RNA, 76 nt, synthetic construct; identical to SEQ ID NO: 625
  source 1..76: mol_type = other RNA
  modified_base 1: mod_base = OTHER; note = 2'-Omethylguanosine phosphorothiorate
  modified_base 2: mod_base = OTHER; note = 2'-Omethylguanosine phosphorothiorate
  modified_base 3: mod_base = OTHER; note = 2'-Omethylcytosine
  modified_base 4: mod_base = OTHER; note = 2'-Omethyluridine
  modified_base 5: mod_base = OTHER; note = 2'-Omethylcytosine
  modified_base 6: mod_base = OTHER; note = 2'-Omethylcytosine
  modified_base 16: mod_base = OTHER; note = 2'-Omethyluridine
  modified_base 17: mod_base = OTHER; note = 2'-Omethylguanosine
  modified_base 18: mod_base = OTHER; note = 2'-Omethylguanosine
  modified_base 33: mod_base = OTHER; note = 2'-fluorouridine
  modified_base 35: mod_base = OTHER; note = Cytosine phosphorothiorate
  modified_base 37: mod_base = OTHER; note = Adenosine phosphorothiorate
  modified_base 38: mod_base = OTHER; note = Adenosine phosphorothiorate
  modified_base 41: mod_base = OTHER; note = 2'-Omethylcytosine
  modified_base 44: mod_base = OTHER; note = 2'-Omethyladenosine
  modified_base 45: mod_base = OTHER; note = 2'-Omethylguanosine
  modified_base 46: mod_base = OTHER; note = 2'-fluoroguanosine
  modified_base 47: mod_base = OTHER; note = 2'-fluorouridine
  modified_base 48: mod_base = OTHER; note = 2'-fluorouridine
  modified_base 49: mod_base = OTHER; note = 2'-Omethylcytosine
  modified_base 50: mod_base = OTHER; note = 2'-Omethylcytosine
  modified_base 51: mod_base = OTHER; note = 2'-Omethylguanosine
  modified_base 52: mod_base = OTHER; note = 2'-Omethylguanosine
  modified_base 53: mod_base = OTHER; note = 2'-Omethylguanosine
  modified_base 54: mod_base = OTHER; note = 2'-Omethyluridine
  modified_base 56: mod_base = OTHER; note = 2'-Omethylcytosine
  modified_base 59: mod_base = OTHER; note = 2'-Omethylguanosine
  modified_base 61: mod_base = OTHER; note = 2'-Omethylcytosine
  modified_base 62: mod_base = OTHER; note = 2'-Omethylcytosine
  modified_base 63: mod_base = OTHER; note = 2'-fluorocytosine
  modified_base 64: mod_base = OTHER; note = 2'-Omethylguanosine
  modified_base 65: mod_base = OTHER; note = 2'-Omethylguanosine
  modified_base 66: mod_base = OTHER; note = 2'-Omethylcytosine
  modified_base 67: mod_base = OTHER; note = 2'-Omethylguanosine
  modified_base 68: mod_base = OTHER; note = 2'-Omethylguanosine
  modified_base 73: mod_base = OTHER; note = 2'-Omethylguanosine

SEQ ID NO: 1938 - RNA, 76 nt, synthetic construct; identical to SEQ ID NO: 625
  source 1..76: mol_type = other RNA
  modified_base 1: mod_base = OTHER; note = 2'-Omethylguanosine phosphorothiorate
  modified_base 2: mod_base = OTHER; note = 2'-Omethylguanosine phosphorothiorate
  modified_base 3: mod_base = OTHER; note = 2'-Omethylcytosine
  modified_base 4: mod_base = OTHER; note = 2'-Omethyluridine
  modified_base 5: mod_base = OTHER; note = 2'-Omethylcytosine
  modified_base 6: mod_base = OTHER; note = 2'-Omethylcytosine
  modified_base 16: mod_base = OTHER; note = 2'-Omethyluridine
  modified_base 17: mod_base = OTHER; note = 2'-Omethylguanosine
  modified_base 18: mod_base = OTHER; note = 2'-Omethylguanosine
  modified_base 33: mod_base = OTHER; note = 2'-fluorouridine
  modified_base 35: mod_base = OTHER; note = Cytosine phosphorothiorate
  modified_base 37: mod_base = OTHER; note = Adenosine phosphorothiorate
  modified_base 38: mod_base = OTHER; note = Adenosine phosphorothiorate
  modified_base 41: mod_base = OTHER; note = Cytosine phosphorothiorate
  modified_base 44: mod_base = OTHER; note = 2'-Omethyladenosine
  modified_base 45: mod_base = OTHER; note = 2'-Omethylguanosine
  modified_base 46: mod_base = OTHER; note = 2'-fluoroguanosine
  modified_base 47: mod_base = OTHER; note = 2'-fluorouridine
  modified_base 48: mod_base = OTHER; note = 2'-fluorouridine
  modified_base 49: mod_base = OTHER; note = 2'-Omethylcytosine
  modified_base 50: mod_base = OTHER; note = 2'-Omethylcytosine
  modified_base 51: mod_base = OTHER; note = 2'-Omethylguanosine
  modified_base 52: mod_base = OTHER; note = 2'-Omethylguanosine
  modified_base 53: mod_base = OTHER; note = 2'-Omethylguanosine
  modified_base 54: mod_base = OTHER; note = 2'-Omethyluridine
  modified_base 56: mod_base = OTHER; note = 2'-Omethylcytosine
  modified_base 59: mod_base = OTHER; note = 2'-Omethylguanosine
  modified_base 61: mod_base = OTHER; note = 2'-Omethylcytosine
  modified_base 62: mod_base = OTHER; note = 2'-Omethylcytosine
  modified_base 63: mod_base = OTHER; note = 2'-fluorocytosine
  modified_base 64: mod_base = OTHER; note = 2'-Omethylguanosine
  modified_base 65: mod_base = OTHER; note = 2'-Omethylguanosine
  modified_base 66: mod_base = OTHER; note = 2'-Omethylcytosine
  modified_base 67: mod_base = OTHER; note = 2'-Omethylguanosine
  modified_base 68: mod_base = OTHER; note = 2'-Omethylguanosine
  modified_base 73: mod_base = OTHER; note = 2'-Omethylguanosine

SEQ ID NO: 1939 - RNA, 76 nt, synthetic construct; identical to SEQ ID NO: 625
  source 1..76: mol_type = other RNA
  modified_base 1: mod_base = OTHER; note = 2'-Omethylguanosine phosphorothiorate
  modified_base 2: mod_base = OTHER; note = 2'-Omethylguanosine phosphorothiorate
  modified_base 3: mod_base = OTHER; note = 2'-Omethylcytosine
  modified_base 4: mod_base = OTHER; note = 2'-Omethyluridine
  modified_base 5: mod_base = OTHER; note = 2'-Omethylcytosine
  modified_base 6: mod_base = OTHER; note = 2'-Omethylcytosine
  modified_base 16: mod_base = OTHER; note = 2'-Omethyluridine
  modified_base 17: mod_base = OTHER; note = 2'-Omethylguanosine
  modified_base 18: mod_base = OTHER; note = 2'-Omethylguanosine
  modified_base 33: mod_base = OTHER; note = 2'-fluorouridine
  modified_base 35: mod_base = OTHER; note = Cytosine phosphorothiorate
  modified_base 37: mod_base = OTHER; note = Adenosine phosphorothiorate
  modified_base 38: mod_base = OTHER; note = Adenosine phosphorothiorate
  modified_base 41: mod_base = OTHER; note = 2'-Omethylcytosine phosphorothiorate
  modified_base 44: mod_base = OTHER; note = 2'-Omethyladenosine
  modified_base 45: mod_base = OTHER; note = 2'-Omethylguanosine
  modified_base 46: mod_base = OTHER; note = 2'-fluoroguanosine
  modified_base 47: mod_base = OTHER; note = 2'-fluorouridine
  modified_base 48: mod_base = OTHER; note = 2'-fluorouridine
  modified_base 49: mod_base = OTHER; note = 2'-Omethylcytosine
  modified_base 50: mod_base = OTHER; note = 2'-Omethylcytosine
  modified_base 51: mod_base = OTHER; note = 2'-Omethylguanosine
  modified_base 52: mod_base = OTHER; note = 2'-Omethylguanosine
  modified_base 53: mod_base = OTHER; note = 2'-Omethylguanosine
  modified_base 54: mod_base = OTHER; note = 2'-Omethyluridine
  modified_base 56: mod_base = OTHER; note = 2'-Omethylcytosine
  modified_base 59: mod_base = OTHER; note = 2'-Omethylguanosine
  modified_base 61: mod_base = OTHER; note = 2'-Omethylcytosine
  modified_base 62: mod_base = OTHER; note = 2'-Omethylcytosine
  modified_base 63: mod_base = OTHER; note = 2'-fluorocytosine
  modified_base 64: mod_base = OTHER; note = 2'-Omethylguanosine
  modified_base 65: mod_base = OTHER; note = 2'-Omethylguanosine
  modified_base 66: mod_base = OTHER; note = 2'-Omethylcytosine
  modified_base 67: mod_base = OTHER; note = 2'-Omethylguanosine
  modified_base 68: mod_base = OTHER; note = 2'-Omethylguanosine
  modified_base 73: mod_base = OTHER; note = 2'-Omethylguanosine

SEQ ID NO: 1940 - RNA, 76 nt, synthetic construct; identical to SEQ ID NO: 625
  source 1..76: mol_type = other RNA
  modified_base 1: mod_base = OTHER; note = 2'-Omethylguanosine phosphorothiorate
  modified_base 2: mod_base = OTHER; note = 2'-Omethylguanosine phosphorothiorate
  modified_base 3: mod_base = OTHER; note = 2'-Omethylcytosine
  modified_base 4: mod_base = OTHER; note = 2'-Omethyluridine
  modified_base 5: mod_base = OTHER; note = 2'-Omethylcytosine
  modified_base 6: mod_base = OTHER; note = 2'-Omethylcytosine
  modified_base 16: mod_base = OTHER; note = 2'-Omethyluridine
  modified_base 17: mod_base = OTHER; note = 2'-Omethylguanosine
  modified_base 18: mod_base = OTHER; note = 2'-Omethylguanosine
  modified_base 33: mod_base = OTHER; note = 2'-fluorouridine
  modified_base 35: mod_base = OTHER; note = Cytosine phosphorothiorate
  modified_base 37: mod_base = OTHER; note = Adenosine phosphorothiorate
  modified_base 38: mod_base = OTHER; note = Adenosine phosphorothiorate
  modified_base 41: mod_base = OTHER; note = 2'-fluorocytosine
  modified_base 44: mod_base = OTHER; note = 2'-Omethyladenosine
  modified_base 45: mod_base = OTHER; note = 2'-Omethylguanosine
  modified_base 46: mod_base = OTHER; note = 2'-fluoroguanosine
  modified_base 47: mod_base = OTHER; note = 2'-fluorouridine
  modified_base 48: mod_base = OTHER; note = 2'-fluorouridine
  modified_base 49: mod_base = OTHER; note = 2'-Omethylcytosine
  modified_base 50: mod_base = OTHER; note = 2'-Omethylcytosine
  modified_base 51: mod_base = OTHER; note = 2'-Omethylguanosine
  modified_base 52: mod_base = OTHER; note = 2'-Omethylguanosine
  modified_base 53: mod_base = OTHER; note = 2'-Omethylguanosine
  modified_base 54: mod_base = OTHER; note = 2'-Omethyluridine
  modified_base 56: mod_base = OTHER; note = 2'-Omethylcytosine
  modified_base 59: mod_base = OTHER; note = 2'-Omethylguanosine
  modified_base 61: mod_base = OTHER; note = 2'-Omethylcytosine
  modified_base 62: mod_base = OTHER; note = 2'-Omethylcytosine
  modified_base 63: mod_base = OTHER; note = 2'-fluorocytosine
  modified_base 64: mod_base = OTHER; note = 2'-Omethylguanosine
  modified_base 65: mod_base = OTHER; note = 2'-Omethylguanosine
  modified_base 66: mod_base = OTHER; note = 2'-Omethylcytosine
  modified_base 67: mod_base = OTHER; note = 2'-Omethylguanosine
  modified_base 68: mod_base = OTHER; note = 2'-Omethylguanosine
  modified_base 73: mod_base = OTHER; note = 2'-Omethylguanosine

SEQ ID NO: 1941 - RNA, 76 nt, synthetic construct; identical to SEQ ID NO: 625
  source 1..76: mol_type = other RNA
  modified_base 1: mod_base = OTHER; note = 2'-Omethylguanosine phosphorothiorate
  modified_base 2: mod_base = OTHER; note = 2'-Omethylguanosine phosphorothiorate
  modified_base 3: mod_base = OTHER; note = 2'-Omethylcytosine
  modified_base 4: mod_base = OTHER; note = 2'-Omethyluridine
  modified_base 5: mod_base = OTHER; note = 2'-Omethylcytosine
  modified_base 6: mod_base = OTHER; note = 2'-Omethylcytosine
  modified_base 16: mod_base = OTHER; note = 2'-Omethyluridine
  modified_base 17: mod_base = OTHER; note = 2'-Omethylguanosine
  modified_base 18: mod_base = OTHER; note = 2'-Omethylguanosine
  modified_base 33: mod_base = OTHER; note = 2'-fluorouridine
  modified_base 35: mod_base = OTHER; note = Cytosine phosphorothiorate
  modified_base 37: mod_base = OTHER; note = Adenosine phosphorothiorate
  modified_base 38: mod_base = OTHER; note = Adenosine phosphorothiorate
  modified_base 41: mod_base = OTHER; note = 2'-fluorocytosine phosphorothiorate
  modified_base 44: mod_base = OTHER; note = 2'-Omethyladenosine
  modified_base 45: mod_base = OTHER; note = 2'-Omethylguanosine
  modified_base 46: mod_base = OTHER; note = 2'-fluoroguanosine
  modified_base 47: mod_base = OTHER; note = 2'-fluorouridine
  modified_base 48: mod_base = OTHER; note = 2'-fluorouridine
  modified_base 49: mod_base = OTHER; note = 2'-Omethylcytosine
  modified_base 50: mod_base = OTHER; note = 2'-Omethylcytosine
  modified_base 51: mod_base = OTHER; note = 2'-Omethylguanosine
  modified_base 52: mod_base = OTHER; note = 2'-Omethylguanosine
  modified_base 53: mod_base = OTHER; note = 2'-Omethylguanosine
  modified_base 54: mod_base = OTHER; note = 2'-Omethyluridine
  modified_base 56: mod_base = OTHER; note = 2'-Omethylcytosine
  modified_base 59: mod_base = OTHER; note = 2'-Omethylguanosine
  modified_base 61: mod_base = OTHER; note = 2'-Omethylcytosine
  modified_base 62: mod_base = OTHER; note = 2'-Omethylcytosine
  modified_base 63: mod_base = OTHER; note = 2'-fluorocytosine
  modified_base 64: mod_base = OTHER; note = 2'-Omethylguanosine
  modified_base 65: mod_base = OTHER; note = 2'-Omethylguanosine
  modified_base 66: mod_base = OTHER; note = 2'-Omethylcytosine
  modified_base 67: mod_base = OTHER; note = 2'-Omethylguanosine
  modified_base 68: mod_base = OTHER; note = 2'-Omethylguanosine
  modified_base 73: mod_base = OTHER; note = 2'-Omethylguanosine

SEQ ID NO: 1942 - RNA, 76 nt, synthetic construct; identical to SEQ ID NO: 625
  source 1..76: mol_type = other RNA
  modified_base 1: mod_base = OTHER; note = 2'-Omethylguanosine
  modified_base 2: mod_base = OTHER; note = 2'-Omethylguanosine
  modified_base 3: mod_base = OTHER; note = 2'-Omethylcytosine
  modified_base 4: mod_base = OTHER; note = 2'-Omethyluridine
  modified_base 5: mod_base = OTHER; note = 2'-Omethylcytosine
  modified_base 6: mod_base = OTHER; note = 2'-Omethylcytosine
  modified_base 65: mod_base = OTHER; note = 2'-Omethylguanosine
  modified_base 66: mod_base = OTHER; note = 2'-Omethylcytosine
  modified_base 67: mod_base = OTHER; note = 2'-Omethylguanosine
  modified_base 68: mod_base = OTHER; note = 2'-Omethylguanosine
  modified_base 73: mod_base = OTHER; note = 2'-Omethylguanosine

SEQ ID NO: 1943 - RNA, 76 nt, synthetic construct; identical to SEQ ID NO: 625
  source 1..76: mol_type = other RNA
  modified_base 1: mod_base = OTHER; note = 2'-Omethylguanosine
  modified_base 2: mod_base = OTHER; note = 2'-Omethylguanosine
  modified_base 3: mod_base = OTHER; note = 2'-Omethylcytosine
  modified_base 4: mod_base = OTHER; note = 2'-Omethyluridine
  modified_base 5: mod_base = OTHER; note = 2'-Omethylcytosine
  modified_base 6: mod_base = OTHER; note = 2'-Omethylcytosine
  modified_base 64: mod_base = OTHER; note = 2'-Omethylguanosine
  modified_base 65: mod_base = OTHER; note = 2'-Omethylguanosine
  modified_base 66: mod_base = OTHER; note = 2'-Omethylcytosine
  modified_base 67: mod_base = OTHER; note = 2'-Omethylguanosine
  modified_base 68: mod_base = OTHER; note = 2'-Omethylguanosine
  modified_base 73: mod_base = OTHER; note = 2'-Omethylguanosine

SEQ ID NO: 1944 - RNA, 76 nt, synthetic construct; identical to SEQ ID NO: 625
  source 1..76: mol_type = other RNA
  modified_base 1: mod_base = OTHER; note = 2'-Omethylguanosine
  modified_base 2: mod_base = OTHER; note = 2'-Omethylguanosine
  modified_base 3: mod_base = OTHER; note = 2'-Omethylcytosine
  modified_base 4: mod_base = OTHER; note = 2'-Omethyluridine
  modified_base 5: mod_base = OTHER; note = 2'-Omethylcytosine
  modified_base 6: mod_base = OTHER; note = 2'-Omethylcytosine
  modified_base 61: mod_base = OTHER; note = 2'-Omethylcytosine
  modified_base 62: mod_base = OTHER; note = 2'-Omethylcytosine
  modified_base 63: mod_base = OTHER; note = 2'-fluorocytosine
  modified_base 64: mod_base = OTHER; note = 2'-Omethylguanosine
  modified_base 65: mod_base = OTHER; note = 2'-Omethylguanosine
  modified_base 66: mod_base = OTHER; note = 2'-Omethylcytosine
  modified_base 67: mod_base = OTHER; note = 2'-Omethylguanosine
  modified_base 68: mod_base = OTHER; note = 2'-Omethylguanosine
  modified_base 73: mod_base = OTHER; note = 2'-Omethylguanosine

SEQ ID NO: 1945 - skipped

SEQ ID NO: 1946 - RNA, 76 nt, synthetic construct; identical to SEQ ID NO: 625
  source 1..76: mol_type = other RNA
  modified_base 1: mod_base = OTHER; note = 2'-Omethylguanosine
  modified_base 2: mod_base = OTHER; note = 2'-Omethylguanosine
  modified_base 3: mod_base = OTHER; note = 2'-Omethylcytosine
  modified_base 4: mod_base = OTHER; note = 2'-Omethyluridine
  modified_base 5: mod_base = OTHER; note = 2'-Omethylcytosine
  modified_base 6: mod_base = OTHER; note = 2'-Omethylcytosine
  modified_base 66: mod_base = OTHER; note = 2'-Omethylcytosine
  modified_base 67: mod_base = OTHER; note = 2'-Omethylguanosine
  modified_base 68: mod_base = OTHER; note = 2'-Omethylguanosine
  modified_base 72: mod_base = OTHER; note = 2'-fluorocytosine
  modified_base 73: mod_base = OTHER; note = 2'-Omethylguanosine

SEQ ID NO: 1947 - RNA, 76 nt, synthetic construct; identical to SEQ ID NO: 625
  source 1..76: mol_type = other RNA
  modified_base 1: mod_base = OTHER; note = 2'-Omethylguanosine
  modified_base 2: mod_base = OTHER; note = 2'-Omethylguanosine
  modified_base 3: mod_base = OTHER; note = 2'-Omethylcytosine
  modified_base 4: mod_base = OTHER; note = 2'-Omethyluridine
  modified_base 5: mod_base = OTHER; note = 2'-Omethylcytosine
  modified_base 6: mod_base = OTHER; note = 2'-Omethylcytosine
  modified_base 66: mod_base = OTHER; note = 2'-Omethylcytosine
  modified_base 67: mod_base = OTHER; note = 2'-Omethylguanosine
  modified_base 68: mod_base = OTHER; note = 2'-Omethylguanosine
  modified_base 72: mod_base = OTHER; note = Cytosine phosphorothiorate
  modified_base 73: mod_base = OTHER; note = 2'-Omethylguanosine

SEQ ID NO: 1948 - RNA, 76 nt, synthetic construct; identical to SEQ ID NO: 625
  source 1..76: mol_type = other RNA
  modified_base 1: mod_base = OTHER; note = 2'-Omethylguanosine
  modified_base 2: mod_base = OTHER; note = 2'-Omethylguanosine
  modified_base 3: mod_base = OTHER; note = 2'-Omethylcytosine
  modified_base 4: mod_base = OTHER; note = 2'-Omethyluridine
  modified_base 5: mod_base = OTHER; note = 2'-Omethylcytosine
  modified_base 6: mod_base = OTHER; note = 2'-Omethylcytosine
  modified_base 66: mod_base = OTHER; note = 2'-Omethylcytosine
  modified_base 67: mod_base = OTHER; note = 2'-Omethylguanosine
  modified_base 68: mod_base = OTHER; note = 2'-Omethylguanosine
  modified_base 71: mod_base = OTHER; note = 2'-Omethyluridine
  modified_base 73: mod_base = OTHER; note = 2'-Omethylguanosine

SEQ ID NO: 1949 - RNA, 76 nt, synthetic construct; identical to SEQ ID NO: 625
  source 1..76: mol_type = other RNA
  modified_base 1: mod_base = OTHER; note = 2'-Omethylguanosine
  modified_base 2: mod_base = OTHER; note = 2'-Omethylguanosine
  modified_base 3: mod_base = OTHER; note = 2'-Omethylcytosine
  modified_base 4: mod_base = OTHER; note = 2'-Omethyluridine
  modified_base 5: mod_base = OTHER; note = 2'-Omethylcytosine
  modified_base 6: mod_base = OTHER; note = 2'-Omethylcytosine
  modified_base 66: mod_base = OTHER; note = 2'-Omethylcytosine
  modified_base 67: mod_base = OTHER; note = 2'-Omethylguanosine
  modified_base 68: mod_base = OTHER; note = 2'-Omethylguanosine
  modified_base 71: mod_base = OTHER; note = 2'-fluorouridine
  modified_base 73: mod_base = OTHER; note = 2'-Omethylguanosine

SEQ ID NO: 1950 - RNA, 76 nt, synthetic construct; identical to SEQ ID NO: 625
  source 1..76: mol_type = other RNA
  modified_base 1: mod_base = OTHER; note = 2'-Omethylguanosine
  modified_base 2: mod_base = OTHER; note = 2'-Omethylguanosine
  modified_base 3: mod_base = OTHER; note = 2'-Omethylcytosine
  modified_base 4: mod_base = OTHER; note = 2'-Omethyluridine
  modified_base 5: mod_base = OTHER; note = 2'-Omethylcytosine
  modified_base 6: mod_base = OTHER; note = 2'-Omethylcytosine
  modified_base 66: mod_base = OTHER; note = 2'-Omethylcytosine
  modified_base 67: mod_base = OTHER; note = 2'-Omethylguanosine
  modified_base 68: mod_base = OTHER; note = 2'-Omethylguanosine
  modified_base 71: mod_base = OTHER; note = 2'-Omethyluridine
  modified_base 72: mod_base = OTHER; note = 2'-fluorocytosine
  modified_base 73: mod_base = OTHER; note = 2'-Omethylguanosine

SEQ ID NO: 1951 - RNA, 76 nt, synthetic construct; identical to SEQ ID NO: 625
  source 1..76: mol_type = other RNA
  modified_base 1: mod_base = OTHER; note = 2'-Omethylguanosine
  modified_base 2: mod_base = OTHER; note = 2'-Omethylguanosine
  modified_base 3: mod_base = OTHER; note = 2'-Omethylcytosine
  modified_base 4: mod_base = OTHER; note = 2'-Omethyluridine
  modified_base 5: mod_base = OTHER; note = 2'-Omethylcytosine
  modified_base 6: mod_base = OTHER; note = 2'-Omethylcytosine
  modified_base 66: mod_base = OTHER; note = 2'-Omethylcytosine
  modified_base 67: mod_base = OTHER; note = 2'-Omethylguanosine
  modified_base 68: mod_base = OTHER; note = 2'-Omethylguanosine
  modified_base 71: mod_base = OTHER; note = 2'-fluorouridine
  modified_base 72: mod_base = OTHER; note = 2'-Omethylcytosine
  modified_base 73: mod_base = OTHER; note = 2'-Omethylguanosine

SEQ ID NO: 1952 - RNA, 76 nt, synthetic construct; identical to SEQ ID NO: 625
  source 1..76: mol_type = other RNA
  modified_base 1: mod_base = OTHER; note = 2'-Omethylguanosine
  modified_base 2: mod_base = OTHER; note = 2'-Omethylguanosine
  modified_base 3: mod_base = OTHER; note = 2'-Omethylcytosine
  modified_base 4: mod_base = OTHER; note = 2'-Omethyluridine
  modified_base 5: mod_base = OTHER; note = 2'-Omethylcytosine
  modified_base 6: mod_base = OTHER; note = 2'-Omethylcytosine
  modified_base 49: mod_base = OTHER; note = 2'-Omethylcytosine
  modified_base 50: mod_base = OTHER; note = 2'-Omethylcytosine
  modified_base 51: mod_base = OTHER; note = 2'-Omethylguanosine
  modified_base 52: mod_base = OTHER; note = 2'-Omethylguanosine
  modified_base 53: mod_base = OTHER; note = 2'-Omethylguanosine
  modified_base 61: mod_base = OTHER; note = 2'-Omethylcytosine
  modified_base 62: mod_base = OTHER; note = 2'-Omethylcytosine
  modified_base 63: mod_base = OTHER; note = 2'-fluorocytosine
  modified_base 64: mod_base = OTHER; note = 2'-Omethylguanosine
  modified_base 65: mod_base = OTHER; note = 2'-Omethylguanosine
  modified_base 73: mod_base = OTHER; note = 2'-Omethylguanosine

SEQ ID NO: 1953 - RNA, 76 nt, synthetic construct; identical to SEQ ID NO: 625
  source 1..76: mol_type = other RNA
  modified_base 1: mod_base = OTHER; note = 2'-Omethylguanosine
  modified_base 44: mod_base = OTHER; note = 2'-Omethyladenosine
  modified_base 45: mod_base = OTHER; note = 2'-Omethylguanosine
  modified_base 46: mod_base = OTHER; note = 2'-fluoroguanosine
  modified_base 47: mod_base = OTHER; note = 2'-fluorouridine
  modified_base 48: mod_base = OTHER; note = 2'-fluorouridine
  modified_base 49: mod_base = OTHER; note = 2'-Omethylcytosine
  modified_base 50: mod_base = OTHER; note = 2'-Omethylcytosine
  modified_base 51: mod_base = OTHER; note = 2'-Omethylguanosine
  modified_base 52: mod_base = OTHER; note = 2'-Omethylguanosine
  modified_base 53: mod_base = OTHER; note = 2'-Omethylguanosine
  modified_base 61: mod_base = OTHER; note = 2'-Omethylcytosine
  modified_base 62: mod_base = OTHER; note = 2'-Omethylcytosine
  modified_base 63: mod_base = OTHER; note = 2'-fluorocytosine
  modified_base 64: mod_base = OTHER; note = 2'-Omethylguanosine
  modified_base 65: mod_base = OTHER; note = 2'-Omethylguanosine
  modified_base 73: mod_base = OTHER; note = 2'-Omethylguanosine

SEQ ID NO: 1954 - RNA, 76 nt, synthetic construct; identical to SEQ ID NO: 625
  source 1..76: mol_type = other RNA
  modified_base 1: mod_base = OTHER; note = 2'-Omethylguanosine
  modified_base 2: mod_base = OTHER; note = 2'-Omethylguanosine
  modified_base 3: mod_base = OTHER; note = 2'-Omethylcytosine
  modified_base 4: mod_base = OTHER; note = 2'-Omethyluridine
  modified_base 5: mod_base = OTHER; note = 2'-Omethylcytosine
  modified_base 6: mod_base = OTHER; note = 2'-Omethylcytosine
  modified_base 44: mod_base = OTHER; note = 2'-Omethyladenosine
  modified_base 45: mod_base = OTHER; note = 2'-Omethylguanosine
  modified_base 46: mod_base = OTHER; note = 2'-fluoroguanosine
  modified_base 47: mod_base = OTHER; note = 2'-fluorouridine
  modified_base 48: mod_base = OTHER; note = 2'-fluorouridine
  modified_base 49: mod_base = OTHER; note = 2'-Omethylcytosine
  modified_base 50: mod_base = OTHER; note = 2'-Omethylcytosine
  modified_base 51: mod_base = OTHER; note = 2'-Omethylguanosine
  modified_base 52: mod_base = OTHER; note = 2'-Omethylguanosine
  modified_base 53: mod_base = OTHER; note = 2'-Omethylguanosine
  modified_base 61: mod_base = OTHER; note = 2'-Omethylcytosine
  modified_base 62: mod_base = OTHER; note = 2'-Omethylcytosine
  modified_base 63: mod_base = OTHER; note = 2'-fluorocytosine
  modified_base 64: mod_base = OTHER; note = 2'-Omethylguanosine
  modified_base 65: mod_base = OTHER; note = 2'-Omethylguanosine
  modified_base 73: mod_base = OTHER; note = 2'-Omethylguanosine

SEQ ID NO: 1955 - RNA, 76 nt, synthetic construct; identical to SEQ ID NO: 625
  source 1..76: mol_type = other RNA
  modified_base 1: mod_base = OTHER; note = 2'-Omethylguanosine
  modified_base 2: mod_base = OTHER; note = 2'-Omethylguanosine
  modified_base 3: mod_base = OTHER; note = 2'-Omethylcytosine
  modified_base 4: mod_base = OTHER; note = 2'-Omethyluridine
  modified_base 5: mod_base = OTHER; note = 2'-Omethylcytosine
  modified_base 6: mod_base = OTHER; note = 2'-Omethylcytosine
  modified_base 14: mod_base = OTHER; note = 2'-Omethyladenosine
  modified_base 15: mod_base = OTHER; note = 2'-fluoroadenosine
  modified_base 16: mod_base = OTHER; note = 2'-Omethyluridine
  modified_base 17: mod_base = OTHER; note = 2'-Omethylguanosine
  modified_base 18: mod_base = OTHER; note = 2'-Omethylguanosine
  modified_base 19: mod_base = OTHER; note = 2'-fluoroadenosine
  modified_base 20: mod_base = OTHER; note = 2'-Omethyluridine
  modified_base 73: mod_base = OTHER; note = 2'-Omethylguanosine

SEQ ID NO: 1956 - RNA, 76 nt, synthetic construct; identical to SEQ ID NO: 625
  source 1..76: mol_type = other RNA
  modified_base 1: mod_base = OTHER; note = 2'-Omethylguanosine
  modified_base 2: mod_base = OTHER; note = 2'-Omethylguanosine
  modified_base 3: mod_base = OTHER; note = 2'-Omethylcytosine
  modified_base 4: mod_base = OTHER; note = 2'-Omethyluridine
  modified_base 5: mod_base = OTHER; note = 2'-Omethylcytosine
  modified_base 6: mod_base = OTHER; note = 2'-Omethylcytosine
  modified_base 14: mod_base = OTHER; note = 2'-Omethyladenosine
  modified_base 15: mod_base = OTHER; note = 2'-fluoroadenosine
  modified_base 16: mod_base = OTHER; note = 2'-Omethyluridine
  modified_base 17: mod_base = OTHER; note = 2'-Omethylguanosine
  modified_base 18: mod_base = OTHER; note = 2'-Omethylguanosine
  modified_base 19: mod_base = OTHER; note = 2'-fluoroadenosine
  modified_base 20: mod_base = OTHER; note = 2'-Omethyluridine
  modified_base 21: mod_base = OTHER; note = 2'-fluoroadenosine
  modified_base 73: mod_base = OTHER; note = 2'-Omethylguanosine

SEQ ID NO: 1957 - RNA, 76 nt, synthetic construct; identical to SEQ ID NO: 625
  source 1..76: mol_type = other RNA
  modified_base 1: mod_base = OTHER; note = 2'-Omethylguanosine
  modified_base 2: mod_base = OTHER; note = 2'-Omethylguanosine
  modified_base 3: mod_base = OTHER; note = 2'-Omethylcytosine
  modified_base 4: mod_base = OTHER; note = 2'-Omethyluridine
  modified_base 5: mod_base = OTHER; note = 2'-Omethylcytosine
  modified_base 6: mod_base = OTHER; note = 2'-Omethylcytosine
  modified_base 14: mod_base = OTHER; note = 2'-Omethyladenosine
  modified_base 15: mod_base = OTHER; note = 2'-fluoroadenosine
  modified_base 16: mod_base = OTHER; note = 2'-Omethyluridine
  modified_base 17: mod_base = OTHER; note = 2'-Omethylguanosine
  modified_base 18: mod_base = OTHER; note = 2'-Omethylguanosine
  modified_base 19: mod_base = OTHER; note = 2'-fluoroadenosine
  modified_base 20: mod_base = OTHER; note = 2'-Omethyluridine phosphorothiorate
  modified_base 73: mod_base = OTHER; note = 2'-Omethylguanosine

SEQ ID NO: 1958 - RNA, 76 nt, synthetic construct; identical to SEQ ID NO: 625
  source 1..76: mol_type = other RNA
  modified_base 1: mod_base = OTHER; note = 2'-Omethylguanosine
  modified_base 2: mod_base = OTHER; note = 2'-Omethylguanosine
  modified_base 3: mod_base = OTHER; note = 2'-Omethylcytosine
  modified_base 4: mod_base = OTHER; note = 2'-Omethyluridine
  modified_base 5: mod_base = OTHER; note = 2'-Omethylcytosine
  modified_base 6: mod_base = OTHER; note = 2'-Omethylcytosine
  modified_base 14: mod_base = OTHER; note = 2'-Omethyladenosine
  modified_base 15: mod_base = OTHER; note = 2'-fluoroadenosine
  modified_base 16: mod_base = OTHER; note = 2'-Omethyluridine
  modified_base 17: mod_base = OTHER; note = 2'-Omethylguanosine
  modified_base 18: mod_base = OTHER; note = 2'-Omethylguanosine
  modified_base 19: mod_base = OTHER; note = 2'-fluoroadenosine
  modified_base 20: mod_base = OTHER; note = 2'-Omethyluridine phosphorothiorate
  modified_base 21: mod_base = OTHER; note = 2'-fluoroadenosine
  modified_base 73: mod_base = OTHER; note = 2'-Omethylguanosine

SEQ ID NO: 1959 - RNA, 76 nt, synthetic construct; identical to SEQ ID NO: 625
  source 1..76: mol_type = other RNA
  modified_base 1: mod_base = OTHER; note = 2'-Omethylguanosine
  modified_base 2: mod_base = OTHER; note = 2'-Omethylguanosine
  modified_base 3: mod_base = OTHER; note = 2'-Omethylcytosine
  modified_base 4: mod_base = OTHER; note = 2'-Omethyluridine
  modified_base 5: mod_base = OTHER; note = 2'-Omethylcytosine
  modified_base 6: mod_base = OTHER; note = 2'-Omethylcytosine
  modified_base 10: mod_base = OTHER; note = 2'-Omethylguanosine
  modified_base 11: mod_base = OTHER; note = 2'-Omethylcytosine
  modified_base 12: mod_base = OTHER; note = 2'-Omethylguanosine
  modified_base 13: mod_base = OTHER; note = 2'-Omethylcytosine
  modified_base 14: mod_base = OTHER; note = 2'-Omethyladenosine
  modified_base 15: mod_base = OTHER; note = 2'-fluoroadenosine
  modified_base 16: mod_base = OTHER; note = 2'-Omethyluridine
  modified_base 17: mod_base = OTHER; note = 2'-Omethylguanosine
  modified_base 18: mod_base = OTHER; note = 2'-Omethylguanosine
  modified_base 19: mod_base = OTHER; note = 2'-fluoroadenosine
  modified_base 20: mod_base = OTHER; note = 2'-Omethyluridine
  modified_base 73: mod_base = OTHER; note = 2'-Omethylguanosine

SEQ ID NO: 1960 - RNA, 76 nt, synthetic construct; identical to SEQ ID NO: 625
  source 1..76: mol_type = other RNA
  modified_base 1: mod_base = OTHER; note = 2'-Omethylguanosine
  modified_base 2: mod_base = OTHER; note = 2'-Omethylguanosine
  modified_base 3: mod_base = OTHER; note = 2'-Omethylcytosine
  modified_base 4: mod_base = OTHER; note = 2'-Omethyluridine
  modified_base 5: mod_base = OTHER; note = 2'-Omethylcytosine
  modified_base 6: mod_base = OTHER; note = 2'-Omethylcytosine
  modified_base 14: mod_base = OTHER; note = 2'-Omethyladenosine
  modified_base 15: mod_base = OTHER; note = 2'-fluoroadenosine
  modified_base 16: mod_base = OTHER; note = 2'-Omethyluridine
  modified_base 17: mod_base = OTHER; note = 2'-Omethylguanosine
  modified_base 18: mod_base = OTHER; note = 2'-Omethylguanosine
  modified_base 19: mod_base = OTHER; note = 2'-fluoroadenosine
  modified_base 20: mod_base = OTHER; note = 2'-Omethyluridine
  modified_base 22: mod_base = OTHER; note = 2'-Omethylguanosine
  modified_base 23: mod_base = OTHER; note = 2'-Omethylcytosine
  modified_base 24: mod_base = OTHER; note = 2'-Omethylguanosine
  modified_base 25: mod_base = OTHER; note = 2'-Omethylcytosine
  modified_base 73: mod_base = OTHER; note = 2'-Omethylguanosine

SEQ ID NO: 1961 - RNA, 76 nt, synthetic construct; identical to SEQ ID NO: 625
  source 1..76: mol_type = other RNA
  modified_base 1: mod_base = OTHER; note = 2'-Omethylguanosine
  modified_base 2: mod_base = OTHER; note = 2'-Omethylguanosine
  modified_base 3: mod_base = OTHER; note = 2'-Omethylcytosine
  modified_base 4: mod_base = OTHER; note = 2'-Omethyluridine
  modified_base 5: mod_base = OTHER; note = 2'-Omethylcytosine
  modified_base 6: mod_base = OTHER; note = 2'-Omethylcytosine
  modified_base 10: mod_base = OTHER; note = 2'-Omethylguanosine
  modified_base 11: mod_base = OTHER; note = 2'-Omethylcytosine
  modified_base 12: mod_base = OTHER; note = 2'-Omethylguanosine
  modified_base 13: mod_base = OTHER; note = 2'-Omethylcytosine
  modified_base 14: mod_base = OTHER; note = 2'-Omethyladenosine
  modified_base 15: mod_base = OTHER; note = 2'-fluoroadenosine
  modified_base 16: mod_base = OTHER; note = 2'-Omethyluridine
  modified_base 17: mod_base = OTHER; note = 2'-Omethylguanosine
  modified_base 18: mod_base = OTHER; note = 2'-Omethylguanosine
  modified_base 19: mod_base = OTHER; note = 2'-fluoroadenosine
  modified_base 20: mod_base = OTHER; note = 2'-Omethyluridine
  modified_base 22: mod_base = OTHER; note = 2'-Omethylguanosine
  modified_base 23: mod_base = OTHER; note = 2'-Omethylcytosine
  modified_base 24: mod_base = OTHER; note = 2'-Omethylguanosine
  modified_base 25: mod_base = OTHER; note = 2'-Omethylcytosine
  modified_base 73: mod_base = OTHER; note = 2'-Omethylguanosine

SEQ ID NO: 1962 - RNA, 76 nt, synthetic construct; identical to SEQ ID NO: 625
  source 1..76: mol_type = other RNA
  modified_base 1: mod_base = OTHER; note = 2'-Omethylguanosine
  modified_base 2: mod_base = OTHER; note = 2'-Omethylguanosine
  modified_base 3: mod_base = OTHER; note = 2'-Omethylcytosine
  modified_base 4: mod_base = OTHER; note = 2'-Omethyluridine
  modified_base 5: mod_base = OTHER; note = 2'-Omethylcytosine
  modified_base 6: mod_base = OTHER; note = 2'-Omethylcytosine
  modified_base 10: mod_base = OTHER; note = 2'-Omethylguanosine
  modified_base 11: mod_base = OTHER; note = 2'-Omethylcytosine
  modified_base 12: mod_base = OTHER; note = 2'-Omethylguanosine
  modified_base 13: mod_base = OTHER; note = 2'-Omethylcytosine
  modified_base 16: mod_base = OTHER; note = 2'-Omethyluridine
  modified_base 17: mod_base = OTHER; note = 2'-Omethylguanosine
  modified_base 18: mod_base = OTHER; note = 2'-Omethylguanosine
  modified_base 20: mod_base = OTHER; note = 2'-Omethyluridine
  modified_base 22: mod_base = OTHER; note = 2'-Omethylguanosine
  modified_base 23: mod_base = OTHER; note = 2'-Omethylcytosine
  modified_base 24: mod_base = OTHER; note = 2'-Omethylguanosine
  modified_base 25: mod_base = OTHER; note = 2'-Omethylcytosine
  modified_base 73: mod_base = OTHER; note = 2'-Omethylguanosine

SEQ ID NO: 1963 - RNA, 76 nt, synthetic construct; identical to SEQ ID NO: 625
  source 1..76: mol_type = other RNA
  modified_base 1: mod_base = OTHER; note = 2'-Omethylguanosine
  modified_base 14: mod_base = OTHER; note = 2'-Omethyladenosine
  modified_base 15: mod_base = OTHER; note = 2'-fluoroadenosine
  modified_base 16: mod_base = OTHER; note = 2'-Omethyluridine
  modified_base 17: mod_base = OTHER; note = 2'-Omethylguanosine
  modified_base 18: mod_base = OTHER; note = 2'-Omethylguanosine
  modified_base 19: mod_base = OTHER; note = 2'-fluoroadenosine
  modified_base 20: mod_base = OTHER; note = 2'-Omethyluridine
  modified_base 54: mod_base = OTHER; note = 2'-Omethyluridine
  modified_base 56: mod_base = OTHER; note = 2'-Omethylcytosine
  modified_base 59: mod_base = OTHER; note = 2'-Omethylguanosine
  modified_base 73: mod_base = OTHER; note = 2'-Omethylguanosine

SEQ ID NO: 1964 - RNA, 76 nt, synthetic construct; identical to SEQ ID NO: 625
  source 1..76: mol_type = other RNA
  modified_base 1: mod_base = OTHER; note = 2'-Omethylguanosine
  modified_base 14: mod_base = OTHER; note = 2'-Omethyladenosine
  modified_base 15: mod_base = OTHER; note = 2'-fluoroadenosine
  modified_base 16: mod_base = OTHER; note = 2'-Omethyluridine
  modified_base 17: mod_base = OTHER; note = 2'-Omethylguanosine
  modified_base 18: mod_base = OTHER; note = 2'-Omethylguanosine
  modified_base 19: mod_base = OTHER; note = 2'-fluoroadenosine
  modified_base 20: mod_base = OTHER; note = 2'-Omethyluridine
  modified_base 54: mod_base = OTHER; note = 2'-Omethyluridine
  modified_base 56: mod_base = OTHER; note = 2'-Omethylcytosine
  modified_base 57: mod_base = OTHER; note = 2'-Omethylguanosine
  modified_base 59: mod_base = OTHER; note = 2'-Omethylguanosine
  modified_base 73: mod_base = OTHER; note = 2'-Omethylguanosine

SEQ ID NO: 1965 - RNA, 76 nt, synthetic construct; identical to SEQ ID NO: 625
  source 1..76: mol_type = other RNA
  modified_base 1: mod_base = OTHER; note = 2'-Omethylguanosine
  modified_base 14: mod_base = OTHER; note = 2'-Omethyladenosine
  modified_base 15: mod_base = OTHER; note = 2'-fluoroadenosine
  modified_base 16: mod_base = OTHER; note = 2'-Omethyluridine
  modified_base 17: mod_base = OTHER; note = 2'-Omethylguanosine
  modified_base 18: mod_base = OTHER; note = 2'-Omethylguanosine
  modified_base 19: mod_base = OTHER; note = 2'-fluoroadenosine
  modified_base 20: mod_base = OTHER; note = 2'-Omethyluridine
  modified_base 54: mod_base = OTHER; note = 2'-Omethyluridine
  modified_base 55: mod_base = OTHER; note = Uridine phosphorothiorate
  modified_base 56: mod_base = OTHER; note = 2'-Omethylcytosine
  modified_base 57: mod_base = OTHER; note = 2'-Omethylguanosine
  modified_base 59: mod_base = OTHER; note = 2'-Omethylguanosine
  modified_base 73: mod_base = OTHER; note = 2'-Omethylguanosine

SEQ ID NO: 1966 - RNA, 76 nt, synthetic construct; identical to SEQ ID NO: 625
  source 1..76: mol_type = other RNA
  modified_base 1: mod_base = OTHER; note = 2'-Omethylguanosine
  modified_base 14: mod_base = OTHER; note = 2'-Omethyladenosine
  modified_base 15: mod_base = OTHER; note = 2'-fluoroadenosine
  modified_base 16: mod_base = OTHER; note = 2'-Omethyluridine
  modified_base 17: mod_base = OTHER; note = 2'-Omethylguanosine
  modified_base 18: mod_base = OTHER; note = 2'-Omethylguanosine
  modified_base 19: mod_base = OTHER; note = 2'-fluoroadenosine
  modified_base 20: mod_base = OTHER; note = 2'-Omethyluridine
  modified_base 54: mod_base = OTHER; note = 2'-Omethyluridine phosphorothiorate
  modified_base 55: mod_base = OTHER; note = Uridine phosphorothiorate
  modified_base 56: mod_base = OTHER; note = 2'-Omethylcytosine
  modified_base 57: mod_base = OTHER; note = 2'-Omethylguanosine
  modified_base 59: mod_base = OTHER; note = 2'-Omethylguanosine
  modified_base 73: mod_base = OTHER; note = 2'-Omethylguanosine

SEQ ID NO: 1967 - RNA, 76 nt, synthetic construct; identical to SEQ ID NO: 625
  source 1..76: mol_type = other RNA
  modified_base 1: mod_base = OTHER; note = 2'-Omethylguanosine
  modified_base 16: mod_base = OTHER; note = 2'-Omethyluridine
  modified_base 17: mod_base = OTHER; note = 2'-Omethylguanosine
  modified_base 18: mod_base = OTHER; note = 2'-Omethylguanosine
  modified_base 44: mod_base = OTHER; note = 2'-Omethyladenosine
  modified_base 45: mod_base = OTHER; note = 2'-Omethylguanosine
  modified_base 46: mod_base = OTHER; note = 2'-fluoroguanosine
  modified_base 47: mod_base = OTHER; note = 2'-fluorouridine
  modified_base 48: mod_base = OTHER; note = 2'-fluorouridine
  modified_base 73: mod_base = OTHER; note = 2'-Omethylguanosine

SEQ ID NO: 1968 - RNA, 76 nt, synthetic construct; identical to SEQ ID NO: 625
  source 1..76: mol_type = other RNA
  modified_base 1: mod_base = OTHER; note = 2'-Omethylguanosine
  modified_base 2: mod_base = OTHER; note = 2'-Omethylguanosine
  modified_base 3: mod_base = OTHER; note = 2'-Omethylcytosine
  modified_base 4: mod_base = OTHER; note = 2'-Omethyluridine
  modified_base 5: mod_base = OTHER; note = 2'-Omethylcytosine
  modified_base 6: mod_base = OTHER; note = 2'-Omethylcytosine
  modified_base 44: mod_base = OTHER; note = 2'-Omethyladenosine
  modified_base 45: mod_base = OTHER; note = 2'-Omethylguanosine
  modified_base 46: mod_base = OTHER; note = 2'-fluoroguanosine
  modified_base 47: mod_base = OTHER; note = 2'-fluorouridine
  modified_base 48: mod_base = OTHER; note = 2'-fluorouridine
  modified_base 73: mod_base = OTHER; note = 2'-Omethylguanosine

SEQ ID NO: 1969 - RNA, 76 nt, synthetic construct; identical to SEQ ID NO: 625
  source 1..76: mol_type = other RNA
  modified_base 1: mod_base = OTHER; note = 2'-Omethylguanosine
  modified_base 2: mod_base = OTHER; note = 2'-Omethylguanosine
  modified_base 3: mod_base = OTHER; note = 2'-Omethylcytosine
  modified_base 4: mod_base = OTHER; note = 2'-Omethyluridine
  modified_base 5: mod_base = OTHER; note = 2'-Omethylcytosine
  modified_base 6: mod_base = OTHER; note = 2'-Omethylcytosine
  modified_base 16: mod_base = OTHER; note = 2'-Omethyluridine
  modified_base 17: mod_base = OTHER; note = 2'-Omethylguanosine
  modified_base 18: mod_base = OTHER; note = 2'-Omethylguanosine
  modified_base 44: mod_base = OTHER; note = 2'-Omethyladenosine
  modified_base 45: mod_base = OTHER; note = 2'-Omethylguanosine
  modified_base 46: mod_base = OTHER; note = 2'-fluoroguanosine
  modified_base 47: mod_base = OTHER; note = 2'-fluorouridine
  modified_base 48: mod_base = OTHER; note = 2'-fluorouridine
  modified_base 73: mod_base = OTHER; note = 2'-Omethylguanosine

SEQ ID NO: 1970 - RNA, 76 nt, synthetic construct; identical to SEQ ID NO: 625
  source 1..76: mol_type = other RNA
  modified_base 1: mod_base = OTHER; note = 2'-Omethylguanosine
  modified_base 10: mod_base = OTHER; note = 2'-Omethylguanosine
  modified_base 11: mod_base = OTHER; note = 2'-Omethylcytosine
  modified_base 12: mod_base = OTHER; note = 2'-Omethylguanosine
  modified_base 13: mod_base = OTHER; note = 2'-Omethylcytosine
  modified_base 44: mod_base = OTHER; note = 2'-Omethyladenosine
  modified_base 45: mod_base = OTHER; note = 2'-Omethylguanosine
  modified_base 46: mod_base = OTHER; note = 2'-fluoroguanosine
  modified_base 47: mod_base = OTHER; note = 2'-fluorouridine
  modified_base 48: mod_base = OTHER; note = 2'-fluorouridine
  modified_base 73: mod_base = OTHER; note = 2'-Omethylguanosine

SEQ ID NO: 1971 - RNA, 76 nt, synthetic construct; identical to SEQ ID NO: 625
  source 1..76: mol_type = other RNA
  modified_base 1: mod_base = OTHER; note = 2'-Omethylguanosine
  modified_base 22: mod_base = OTHER; note = 2'-Omethylguanosine
  modified_base 23: mod_base = OTHER; note = 2'-Omethylcytosine
  modified_base 24: mod_base = OTHER; note = 2'-Omethylguanosine
  modified_base 25: mod_base = OTHER; note = 2'-Omethylcytosine
  modified_base 44: mod_base = OTHER; note = 2'-Omethyladenosine
  modified_base 45: mod_base = OTHER; note = 2'-Omethylguanosine
  modified_base 46: mod_base = OTHER; note = 2'-fluoroguanosine
  modified_base 47: mod_base = OTHER; note = 2'-fluorouridine
  modified_base 48: mod_base = OTHER; note = 2'-fluorouridine
  modified_base 73: mod_base = OTHER; note = 2'-Omethylguanosine

SEQ ID NO: 1972 - RNA, 76 nt, synthetic construct; identical to SEQ ID NO: 625
  source 1..76: mol_type = other RNA
  modified_base 1: mod_base = OTHER; note = 2'-Omethylguanosine
  modified_base 10: mod_base = OTHER; note = 2'-Omethylguanosine
  modified_base 11: mod_base = OTHER; note = 2'-Omethylcytosine
  modified_base 12: mod_base = OTHER; note = 2'-Omethylguanosine
  modified_base 13: mod_base = OTHER; note = 2'-Omethylcytosine
  modified_base 16: mod_base = OTHER; note = 2'-Omethyluridine
  modified_base 17: mod_base = OTHER; note = 2'-Omethylguanosine
  modified_base 18: mod_base = OTHER; note = 2'-Omethylguanosine
  modified_base 22: mod_base = OTHER; note = 2'-Omethylguanosine
  modified_base 23: mod_base = OTHER; note = 2'-Omethylcytosine
  modified_base 24: mod_base = OTHER; note = 2'-Omethylguanosine
  modified_base 25: mod_base = OTHER; note = 2'-Omethylcytosine
  modified_base 44: mod_base = OTHER; note = 2'-Omethyladenosine
  modified_base 45: mod_base = OTHER; note = 2'-Omethylguanosine
  modified_base 46: mod_base = OTHER; note = 2'-fluoroguanosine
  modified_base 47: mod_base = OTHER; note = 2'-fluorouridine
  modified_base 48: mod_base = OTHER; note = 2'-fluorouridine
  modified_base 73: mod_base = OTHER; note = 2'-Omethylguanosine

SEQ ID NO: 1973 - RNA, 76 nt, synthetic construct; identical to SEQ ID NO: 625
  source 1..76: mol_type = other RNA
  modified_base 1: mod_base = OTHER; note = 2'-Omethylguanosine
  modified_base 2: mod_base = OTHER; note = 2'-Omethylguanosine
  modified_base 3: mod_base = OTHER; note = 2'-Omethylcytosine
  modified_base 4: mod_base = OTHER; note = 2'-Omethyluridine
  modified_base 5: mod_base = OTHER; note = 2'-Omethylcytosine
  modified_base 6: mod_base = OTHER; note = 2'-Omethylcytosine
  modified_base 40: mod_base = OTHER; note = 2'-fluorouridine
  modified_base 41: mod_base = OTHER; note = 2'-Omethylcytosine
  modified_base 42: mod_base = OTHER; note = 2'-Omethyladenosine
  modified_base 43: mod_base = OTHER; note = 2'-Omethyladenosine
  modified_base 73: mod_base = OTHER; note = 2'-Omethylguanosine

SEQ ID NO: 1974 - RNA, 76 nt, synthetic construct; identical to SEQ ID NO: 625
  source 1..76: mol_type = other RNA
  modified_base 1: mod_base = OTHER; note = 2'-Omethylguanosine
  modified_base 2: mod_base = OTHER; note = 2'-Omethylguanosine
  modified_base 3: mod_base = OTHER; note = 2'-Omethylcytosine
  modified_base 4: mod_base = OTHER; note = 2'-Omethyluridine
  modified_base 5: mod_base = OTHER; note = 2'-Omethylcytosine
  modified_base 6: mod_base = OTHER; note = 2'-Omethylcytosine
  modified_base 40: mod_base = OTHER; note = 2'-fluorouridine
  modified_base 41: mod_base = OTHER; note = 2'-Omethylcytosine
  modified_base 42: mod_base = OTHER; note = 2'-Omethyladenosine
  modified_base 43: mod_base = OTHER; note = 2'-Omethyladenosine
  modified_base 44: mod_base = OTHER; note = 2'-Omethyladenosine
  modified_base 45: mod_base = OTHER; note = 2'-Omethylguanosine
  modified_base 46: mod_base = OTHER; note = 2'-fluoroguanosine
  modified_base 47: mod_base = OTHER; note = 2'-fluorouridine
  modified_base 48: mod_base = OTHER; note = 2'-fluorouridine
  modified_base 49: mod_base = OTHER; note = 2'-Omethylcytosine
  modified_base 50: mod_base = OTHER; note = 2'-Omethylcytosine
  modified_base 51: mod_base = OTHER; note = 2'-Omethylguanosine
  modified_base 52: mod_base = OTHER; note = 2'-Omethylguanosine
  modified_base 53: mod_base = OTHER; note = 2'-Omethylguanosine
  modified_base 61: mod_base = OTHER; note = 2'-Omethylcytosine
  modified_base 62: mod_base = OTHER; note = 2'-Omethylcytosine
  modified_base 63: mod_base = OTHER; note = 2'-fluorocytosine
  modified_base 64: mod_base = OTHER; note = 2'-Omethylguanosine
  modified_base 65: mod_base = OTHER; note = 2'-Omethylguanosine
  modified_base 73: mod_base = OTHER; note = 2'-Omethylguanosine

SEQ ID NO: 1975 - RNA, 76 nt, synthetic construct; identical to SEQ ID NO: 625
  source 1..76: mol_type = other RNA
  modified_base 1: mod_base = OTHER; note = 2'-Omethylguanosine
  modified_base 33: mod_base = OTHER; note = 2'-fluorouridine
  modified_base 35: mod_base = OTHER; note = Cytosine phosphorothiorate
  modified_base 37: mod_base = OTHER; note = Adenosine phosphorothiorate
  modified_base 38: mod_base = OTHER; note = Adenosine phosphorothiorate
  modified_base 40: mod_base = OTHER; note = 2'-fluorouridine
  modified_base 41: mod_base = OTHER; note = 2'-Omethylcytosine
  modified_base 42: mod_base = OTHER; note = 2'-Omethyladenosine
  modified_base 43: mod_base = OTHER; note = 2'-Omethyladenosine
  modified_base 73: mod_base = OTHER; note = 2'-Omethylguanosine

SEQ ID NO: 1976 - RNA, 76 nt, synthetic construct; identical to SEQ ID NO: 625
  source 1..76: mol_type = other RNA
  modified_base 1: mod_base = OTHER; note = 2'-Omethylguanosine
  modified_base 28: mod_base = OTHER; note = 2'-Omethyluridine
  modified_base 29: mod_base = OTHER; note = 2'-Omethylguanosine
  modified_base 30: mod_base = OTHER; note = 2'-Omethylguanosine
  modified_base 33: mod_base = OTHER; note = 2'-fluorouridine
  modified_base 35: mod_base = OTHER; note = Cytosine phosphorothiorate
  modified_base 37: mod_base = OTHER; note = Adenosine phosphorothiorate
  modified_base 38: mod_base = OTHER; note = Adenosine phosphorothiorate
  modified_base 40: mod_base = OTHER; note = 2'-fluorouridine
  modified_base 41: mod_base = OTHER; note = 2'-Omethylcytosine
  modified_base 42: mod_base = OTHER; note = 2'-Omethyladenosine
  modified_base 43: mod_base = OTHER; note = 2'-Omethyladenosine
  modified_base 73: mod_base = OTHER; note = 2'-Omethylguanosine

SEQ ID NO: 1977 - DNA, 76 bp, synthetic construct; identical to SEQ ID NO: 1924
  source 1..76: mol_type = other DNA
  modified_base 1: mod_base = OTHER; note = 2'-Omethylguanosine phosphorothiorate
  modified_base 2: mod_base = OTHER; note = 2'-Omethylguanosine phosphorothiorate
  modified_base 45: mod_base = OTHER; note = Guanosine phosphorothiorate
  modified_base 65: mod_base = OTHER; note = 2'-Omethylguanosine
  modified_base 74: mod_base = OTHER; note = Cytosine phosphorothiorate
  modified_base 75: mod_base = OTHER; note = 2'-Omethylcytosine phosphorothiorate
  modified_base 76: mod_base = OTHER; note = 2'-Omethyladenosine
  misc_feature 1..45: note = RNA
  misc_feature 46: note = DNA
  misc_feature 47..76: note = RNA

SEQ ID NO: 1978 - skipped

SEQ ID NO: 1979 - DNA, 76 bp, synthetic construct; identical to SEQ ID NO: 1924
  source 1..76: mol_type = other DNA
  modified_base 1: mod_base = OTHER; note = 2'-Omethylguanosine phosphorothiorate
  modified_base 2: mod_base = OTHER; note = 2'-Omethylguanosine phosphorothiorate
  modified_base 20: mod_base = OTHER; note = 2'-O-(2-Methoxyethyl) thymine
  modified_base 23: mod_base = OTHER; note = Cytosine phosphorothiorate
  modified_base 31: mod_base = OTHER; note = Adenosine phosphorothiorate
  modified_base 59: mod_base = OTHER; note = 2'-Omethylguanosine
  modified_base 74: mod_base = OTHER; note = Cytosine phosphorothiorate
  modified_base 75: mod_base = OTHER; note = 2'-Omethylcytosine
  misc_feature 1..23: note = RNA
  misc_feature 24: note = DNA
  misc_feature 25..76: note = RNA

SEQ ID NO: 1980 - DNA, 76 bp, synthetic construct; identical to SEQ ID NO: 1924
  source 1..76: mol_type = other DNA
  modified_base 1: mod_base = OTHER; note = 2'-Omethylguanosine phosphorothiorate
  modified_base 2: mod_base = OTHER; note = 2'-Omethylguanosine phosphorothiorate
  modified_base 14: mod_base = OTHER; note = Adenosine phosphorothiorate
  modified_base 44: mod_base = OTHER; note = Adenosine phosphorothiorate
  modified_base 64: mod_base = OTHER; note = Guanosine phosphorothiorate
  modified_base 65: mod_base = OTHER; note = 2'-O-(2-Methoxyethyl) guanosine
  modified_base 74: mod_base = OTHER; note = Cytosine phosphorothiorate
  modified_base 75: mod_base = OTHER; note = 2'-Omethylcytosine
  misc_feature 1..44: note = RNA
  misc_feature 45: note = DNA
  misc_feature 46..76: note = RNA

SEQ ID NO: 1981 - DNA, 76 bp, synthetic construct; identical to SEQ ID NO: 1924
  source 1..76: mol_type = other DNA
  modified_base 1: mod_base = OTHER; note = 2'-Omethylguanosine phosphorothiorate
  modified_base 2: mod_base = OTHER; note = 2'-Omethylguanosine phosphorothiorate
  modified_base 15: mod_base = OTHER; note = Adenosine phosphorothiorate
  modified_base 37: mod_base = OTHER; note = Adenosine phosphorothiorate
  modified_base 56: mod_base = OTHER; note = Cytosine phosphorothiorate
  modified_base 57: mod_base = OTHER; note = 2'-O-(2-Methoxyethyl) guanosine
  modified_base 66: mod_base = OTHER; note = Cytosine phosphorothiorate
  modified_base 74: mod_base = OTHER; note = Cytosine phosphorothiorate
  modified_base 75: mod_base = OTHER; note = 2'-Omethylcytosine phosphorothiorate
  modified_base 76: mod_base = OTHER; note = 2'-Omethyladenosine
  misc_feature 1..15: note = RNA
  misc_feature 16: note = DNA
  misc_feature 17..66: note = RNA
  misc_feature 67: note = DNA
  misc_feature 68..76: note = RNA

SEQ ID NO: 1982 - skipped

SEQ ID NO: 1983 - DNA, 76 bp, synthetic construct; identical to SEQ ID NO: 1924
  source 1..76: mol_type = other DNA
  modified_base 1: mod_base = OTHER; note = 2'-Omethylguanosine phosphorothiorate
  modified_base 2: mod_base = OTHER; note = 2'-Omethylguanosine phosphorothiorate
  modified_base 23: mod_base = OTHER; note = Cytosine phosphorothiorate
  modified_base 24: mod_base = OTHER; note = 2'-O-(2-Methoxyethyl) guanosine
  modified_base 30: mod_base = OTHER; note = Guanosine phosphorothiorate
  modified_base 31: mod_base = OTHER; note = 2'-Omethyladenosine
  modified_base 43: mod_base = OTHER; note = 2'-fluoroadenosine
  modified_base 74: mod_base = OTHER; note = Cytosine phosphorothiorate
  modified_base 75: mod_base = OTHER; note = 2'-Omethylcytosine phosphorothiorate
  modified_base 76: mod_base = OTHER; note = 2'-Omethyladenosine
  misc_feature 1..64: note = RNA
  misc_feature 65: note = DNA
  misc_feature 66..76: note = RNA

SEQ ID NO: 1984 - RNA, 76 nt, synthetic construct; identical to SEQ ID NO: 625
  source 1..76: mol_type = other RNA
  modified_base 1: mod_base = OTHER; note = 2'-Omethylguanosine phosphorothiorate
  modified_base 2: mod_base = OTHER; note = 2'-Omethylguanosine phosphorothiorate
  modified_base 41: mod_base = OTHER; note = 2'-fluorocytosine
  modified_base 49: mod_base = OTHER; note = 2'-fluorocytosine phosphorothiorate
  modified_base 58: mod_base = OTHER; note = Adenosine phosphorothiorate
  modified_base 59: mod_base = OTHER; note = 2'-O-(2-Methoxyethyl) guanosine
  modified_base 74: mod_base = OTHER; note = Cytosine phosphorothiorate
  modified_base 75: mod_base = OTHER; note = 2'-Omethylcytosine phosphorothiorate
  modified_base 76: mod_base = OTHER; note = 2'-Omethyladenosine

SEQ ID NO: 1985 - DNA, 76 bp, synthetic construct; identical to SEQ ID NO: 1924
  source 1..76: mol_type = other DNA
  modified_base 1: mod_base = OTHER; note = 2'-Omethylguanosine phosphorothiorate
  modified_base 2: mod_base = OTHER; note = 2'-Omethylguanosine phosphorothiorate
  modified_base 14: mod_base = OTHER; note = 2'-fluoroadenosine
  modified_base 19: mod_base = OTHER; note = Adenosine phosphorothiorate
  modified_base 38: mod_base = OTHER; note = Adenosine phosphorothiorate
  modified_base 49: mod_base = OTHER; note = Cytosine phosphorothiorate
  modified_base 50: mod_base = OTHER; note = 2'-Omethylcytosine
  modified_base 74: mod_base = OTHER; note = Cytosine phosphorothiorate
  modified_base 75: mod_base = OTHER; note = 2'-Omethylcytosine
  misc_feature 1..38: note = RNA
  misc_feature 39: note = DNA
  misc_feature 40..60: note = RNA
  misc_feature 61: note = DNA
  misc_feature 62..76: note = RNA

SEQ ID NO: 1986 - DNA, 76 bp, synthetic construct; identical to SEQ ID NO: 1924
  source 1..76: mol_type = other DNA
  modified_base 1: mod_base = OTHER; note = 2'-Omethylguanosine phosphorothiorate
  modified_base 2: mod_base = OTHER; note = 2'-Omethylguanosine
  modified_base 13: mod_base = OTHER; note = Cytosine phosphorothiorate
  modified_base 14: mod_base = OTHER; note = 2'-fluoroadenosine
  modified_base 27: mod_base = OTHER; note = Uridine phosphorothiorate
  modified_base 28: mod_base = OTHER; note = 2'-fluorouridine
  modified_base 32: mod_base = OTHER; note = Cytosine phosphorothiorate
  modified_base 39: mod_base = OTHER; note = 2'-O-(2-Methoxyethyl) thymine
  modified_base 52: mod_base = OTHER; note = 2'-O-(2-Methoxyethyl) guanosine
  modified_base 63: mod_base = OTHER; note = Cytosine phosphorothiorate
  modified_base 74: mod_base = OTHER; note = Cytosine phosphorothiorate
  modified_base 75: mod_base = OTHER; note = 2'-Omethylcytosine phosphorothiorate
  modified_base 76: mod_base = OTHER; note = 2'-Omethyladenosine
  misc_feature 1..32: note = RNA
  misc_feature 33: note = DNA
  misc_feature 34..76: note = RNA

SEQ ID NO: 1987 - DNA, 76 bp, synthetic construct; identical to SEQ ID NO: 1924
  source 1..76: mol_type = other DNA
  modified_base 1: mod_base = OTHER; note = 2'-Omethylguanosine phosphorothiorate
  modified_base 2: mod_base = OTHER; note = 2'-Omethylguanosine phosphorothiorate
  modified_base 13: mod_base = OTHER; note = Cytosine phosphorothiorate
  modified_base 14: mod_base = OTHER; note = 2'-Omethyladenosine
  modified_base 22: mod_base = OTHER; note = Guanosine phosphorothiorate
  modified_base 23: mod_base = OTHER; note = 2'-Omethylcytosine
  modified_base 25: mod_base = OTHER; note = Cytosine phosphorothiorate
  modified_base 26: mod_base = OTHER; note = 2'-Omethyladenosine
  modified_base 41: mod_base = OTHER; note = Cytosine phosphorothiorate
  modified_base 42: mod_base = OTHER; note = 2'-Omethyladenosine
  modified_base 47: mod_base = OTHER; note = Uridine phosphorothiorate
  modified_base 74: mod_base = OTHER; note = Cytosine phosphorothiorate
  modified_base 75: mod_base = OTHER; note = 2'-Omethylcytosine phosphorothiorate
  modified_base 76: mod_base = OTHER; note = 2'-Omethyladenosine
  misc_feature 1..47: note = RNA
  misc_feature 48: note = DNA
  misc_feature 49..76: note = RNA

SEQ ID NO: 1988 - DNA, 76 bp, synthetic construct; identical to SEQ ID NO: 1924
  source 1..76: mol_type = other DNA
  modified_base 1: mod_base = OTHER; note = 2'-Omethylguanosine phosphorothiorate
  modified_base 2: mod_base = OTHER; note = 2'-Omethylguanosine
  modified_base 14: mod_base = OTHER; note = Adenosine phosphorothiorate
  modified_base 74: mod_base = OTHER; note = Cytosine phosphorothiorate
  modified_base 75: mod_base = OTHER; note = 2'-Omethylcytosine
  misc_feature 1..47: note = RNA
  misc_feature 48: note = DNA
  misc_feature 49..76: note = RNA

SEQ ID NO: 1989 - RNA, 76 nt, synthetic construct; identical to SEQ ID NO: 625
  source 1..76: mol_type = other RNA
  modified_base 1: mod_base = OTHER; note = 2'-Omethylguanosine phosphorothiorate
  modified_base 2: mod_base = OTHER; note = 2'-Omethylguanosine phosphorothiorate
  modified_base 16: mod_base = OTHER; note = 2'-fluorouridine
  modified_base 22: mod_base = OTHER; note = 2'-Omethylguanosine
  modified_base 28: mod_base = OTHER; note = 2'-O-(2-Methoxyethyl) thymine
  modified_base 39: mod_base = OTHER; note = 2'-fluorouridine
  modified_base 58: mod_base = OTHER; note = Adenosine phosphorothiorate
  modified_base 62: mod_base = OTHER; note = Cytosine phosphorothiorate
  modified_base 74: mod_base = OTHER; note = Cytosine phosphorothiorate
  modified_base 75: mod_base = OTHER; note = 2'-Omethylcytosine phosphorothiorate
  modified_base 76: mod_base = OTHER; note = 2'-Omethyladenosine

SEQ ID NO: 1990 - RNA, 76 nt, synthetic construct; identical to SEQ ID NO: 625
  source 1..76: mol_type = other RNA
  modified_base 1: mod_base = OTHER; note = 2'-Omethylguanosine phosphorothiorate
  modified_base 2: mod_base = OTHER; note = 2'-Omethylguanosine
  modified_base 30: mod_base = OTHER; note = 2'-fluoroguanosine
  modified_base 45: mod_base = OTHER; note = Guanosine phosphorothiorate
  modified_base 51: mod_base = OTHER; note = Guanosine phosphorothiorate
  modified_base 52: mod_base = OTHER; note = 2'-fluoroguanosine

SEQ ID NO: 1991 - RNA, 76 nt, synthetic construct; identical to SEQ ID NO: 625
  source 1..76: mol_type = other RNA
  modified_base 1: mod_base = OTHER; note = 2'-Omethylguanosine phosphorothiorate
  modified_base 2: mod_base = OTHER; note = 2'-Omethylguanosine phosphorothiorate
  modified_base 18: mod_base = OTHER; note = Guanosine phosphorothiorate
  modified_base 19: mod_base = OTHER; note = 2'-O-(2-Methoxyethyl) adenosine
  modified_base 47: mod_base = OTHER; note = Uridine phosphorothiorate
  modified_base 48: mod_base = OTHER; note = 2'-fluorouridine
  modified_base 54: mod_base = OTHER; note = 2'-Omethyluridine
  modified_base 74: mod_base = OTHER; note = Cytosine phosphorothiorate
  modified_base 75: mod_base = OTHER; note = 2'-Omethylcytosine

SEQ ID NO: 1992 - RNA, 76 nt, synthetic construct; identical to SEQ ID NO: 625
  source 1..76: mol_type = other RNA
  modified_base 1: mod_base = OTHER; note = 2'-Omethylguanosine phosphorothiorate
  modified_base 2: mod_base = OTHER; note = 2'-Omethylguanosine phosphorothiorate
  modified_base 9: mod_base = OTHER; note = Guanosine phosphorothiorate
  modified_base 10: mod_base = OTHER; note = 2'-fluoroguanosine
  modified_base 29: mod_base = OTHER; note = Guanosine phosphorothiorate
  modified_base 30: mod_base = OTHER; note = 2'-Omethylguanosine
  modified_base 64: mod_base = OTHER; note = Guanosine phosphorothiorate
  modified_base 74: mod_base = OTHER; note = Cytosine phosphorothiorate
  modified_base 75: mod_base = OTHER; note = 2'-Omethylcytosine

SEQ ID NO: 1993 - DNA, 76 bp, synthetic construct; identical to SEQ ID NO: 1924
  source 1..76: mol_type = other DNA
  modified_base 1: mod_base = OTHER; note = 2'-Omethylguanosine phosphorothiorate
  modified_base 2: mod_base = OTHER; note = 2'-Omethylguanosine phosphorothiorate
  modified_base 13: mod_base = OTHER; note = 2'-Omethylcytosine
  modified_base 30: mod_base = OTHER; note = Guanosine phosphorothiorate
  modified_base 38: mod_base = OTHER; note = Adenosine phosphorothiorate
  modified_base 39: mod_base = OTHER; note = 2'-Omethyluridine
  modified_base 54: mod_base = OTHER; note = Uridine phosphorothiorate
  modified_base 55: mod_base = OTHER; note = Uridine phosphorothiorate
  modified_base 74: mod_base = OTHER; note = Cytosine phosphorothiorate
  modified_base 75: mod_base = OTHER; note = 2'-Omethylcytosine
  misc_feature 1..30: note = RNA
  misc_feature 31: note = DNA
  misc_feature 32..76: note = RNA

SEQ ID NO: 1994 - RNA, 76 nt, synthetic construct; identical to SEQ ID NO: 625
  source 1..76: mol_type = other RNA
  modified_base 1: mod_base = OTHER; note = 2'-Omethylguanosine phosphorothiorate
  modified_base 2: mod_base = OTHER; note = 2'-Omethylguanosine phosphorothiorate
  modified_base 15: mod_base = OTHER; note = Adenosine phosphorothiorate
  modified_base 16: mod_base = OTHER; note = 2'-Omethyluridine
  modified_base 38: mod_base = OTHER; note = Adenosine phosphorothiorate
  modified_base 46: mod_base = OTHER; note = 2'-O-(2-Methoxyethyl) guanosine
  modified_base 63: mod_base = OTHER; note = Cytosine phosphorothiorate
  modified_base 64: mod_base = OTHER; note = 2'-fluoroguanosine
  modified_base 74: mod_base = OTHER; note = Cytosine phosphorothiorate
  modified_base 75: mod_base = OTHER; note = 2'-Omethylcytosine
  modified_base 76: mod_base = OTHER; note = 2'-O-(2-Methoxyethyl) adenosine

SEQ ID NO: 1995 - skipped

SEQ ID NO: 1996 - DNA, 76 bp, synthetic construct; identical to SEQ ID NO: 1924
  source 1..76: mol_type = other DNA
  modified_base 1: mod_base = OTHER; note = 2'-Omethylguanosine phosphorothiorate
  modified_base 2: mod_base = OTHER; note = 2'-Omethylguanosine phosphorothiorate
  modified_base 20: mod_base = OTHER; note = Uridine phosphorothiorate
  modified_base 30: mod_base = OTHER; note = Guanosine phosphorothiorate
  modified_base 41: mod_base = OTHER; note = Cytosine phosphorothiorate
  modified_base 42: mod_base = OTHER; note = 2'-fluoroadenosine
  modified_base 52: mod_base = OTHER; note = 2'-O-(2-Methoxyethyl) guanosine
  modified_base 74: mod_base = OTHER; note = Cytosine phosphorothiorate
  modified_base 75: mod_base = OTHER; note = 2'-Omethylcytosine
  misc_feature 1..10: note = RNA
  misc_feature 11: note = DNA
  misc_feature 12..30: note = RNA
  misc_feature 31: note = DNA
  misc_feature 32: note = RNA
  misc_feature 33: note = DNA
  misc_feature 34..76: note = RNA

SEQ ID NO: 1997-1998 - skipped (2 entries)

SEQ ID NO: 1999 - DNA, 76 bp, synthetic construct; identical to SEQ ID NO: 1924
  source 1..76: mol_type = other DNA
  modified_base 1: mod_base = OTHER; note = 2'-Omethylguanosine phosphorothiorate
  modified_base 2: mod_base = OTHER; note = 2'-Omethylguanosine
  modified_base 21: mod_base = OTHER; note = Adenosine phosphorothiorate
  modified_base 29: mod_base = OTHER; note = Guanosine phosphorothiorate
  modified_base 38: mod_base = OTHER; note = Adenosine phosphorothiorate
  modified_base 65: mod_base = OTHER; note = 2'-O-(2-Methoxyethyl) guanosine
  modified_base 74: mod_base = OTHER; note = Cytosine phosphorothiorate
  modified_base 75: mod_base = OTHER; note = 2'-Omethylcytosine phosphorothiorate
  modified_base 76: mod_base = OTHER; note = 2'-Omethyladenosine
  misc_feature 1..29: note = RNA
  misc_feature 30: note = DNA
  misc_feature 31..76: note = RNA

SEQ ID NO: 2000 - skipped

SEQ ID NO: 2001 - DNA, 76 bp, synthetic construct; identical to SEQ ID NO: 1924
  source 1..76: mol_type = other DNA
  modified_base 1: mod_base = OTHER; note = 2'-Omethylguanosine phosphorothiorate
  modified_base 2: mod_base = OTHER; note = 2'-Omethylguanosine
  modified_base 20: mod_base = OTHER; note = Uridine phosphorothiorate
  modified_base 21: mod_base = OTHER; note = 2'-fluoroadenosine
  modified_base 22: mod_base = OTHER; note = deoxyguanosine phosphorothiorate
  modified_base 45: mod_base = OTHER; note = 2'-fluoroguanosine
  modified_base 47: mod_base = OTHER; note = 2'-fluorouridine
  modified_base 74: mod_base = OTHER; note = Cytosine phosphorothiorate
  modified_base 75: mod_base = OTHER; note = 2'-Omethylcytosine
  misc_feature 1..21: note = RNA
  misc_feature 22: note = DNA
  misc_feature 23..76: note = RNA

SEQ ID NO: 2002 - DNA, 76 bp, synthetic construct; identical to SEQ ID NO: 1924
  source 1..76: mol_type = other DNA
  modified_base 1: mod_base = OTHER; note = 2'-Omethylguanosine phosphorothiorate
  modified_base 2: mod_base = OTHER; note = 2'-Omethylguanosine phosphorothiorate
  modified_base 20: mod_base = OTHER; note = Uridine phosphorothiorate
  modified_base 21: mod_base = OTHER; note = 2'-O-(2-Methoxyethyl) adenosine
  modified_base 30: mod_base = OTHER; note = Guanosine phosphorothiorate
  modified_base 39: mod_base = OTHER; note = Uridine phosphorothiorate
  modified_base 50: mod_base = OTHER; note = Cytosine phosphorothiorate
  modified_base 51: mod_base = OTHER; note = 2'-fluoroguanosine
  modified_base 54: mod_base = OTHER; note = 2'-fluorouridine
  modified_base 74: mod_base = OTHER; note = Cytosine phosphorothiorate
  modified_base 75: mod_base = OTHER; note = 2'-Omethylcytosine
  misc_feature 1..26: note = RNA
  misc_feature 27: note = DNA
  misc_feature 28..30: note = RNA
  misc_feature 31: note = DNA
  misc_feature 32..76: note = RNA

SEQ ID NO: 2003 - skipped

SEQ ID NO: 2004 - RNA, 76 nt, synthetic construct; identical to SEQ ID NO: 625
  source 1..76: mol_type = other RNA
  modified_base 1: mod_base = OTHER; note = 2'-Omethylguanosine phosphorothiorate
  modified_base 2: mod_base = OTHER; note = 2'-Omethylguanosine phosphorothiorate
  modified_base 18: mod_base = OTHER; note = Guanosine phosphorothiorate
  modified_base 26: mod_base = OTHER; note = Adenosine phosphorothiorate
  modified_base 50: mod_base = OTHER; note = Cytosine phosphorothiorate
  modified_base 51: mod_base = OTHER; note = 2'-Omethylguanosine
  modified_base 62: mod_base = OTHER; note = Cytosine phosphorothiorate
  modified_base 63: mod_base = OTHER; note = 2'-Omethylcytosine
  modified_base 74: mod_base = OTHER; note = Cytosine phosphorothiorate
  modified_base 75: mod_base = OTHER; note = 2'-Omethylcytosine

SEQ ID NO: 2005 - DNA, 76 bp, synthetic construct; identical to SEQ ID NO: 1924
  source 1..76: mol_type = other DNA
  modified_base 1: mod_base = OTHER; note = 2'-Omethylguanosine phosphorothiorate
  modified_base 2: mod_base = OTHER; note = 2'-Omethylguanosine phosphorothiorate
  modified_base 25: mod_base = OTHER; note = Cytosine phosphorothiorate
  modified_base 26: mod_base = OTHER; note = 2'-Omethyladenosine
  modified_base 41: mod_base = OTHER; note = Cytosine phosphorothiorate
  modified_base 49: mod_base = OTHER; note = 2'-fluorocytosine
  modified_base 61: mod_base = OTHER; note = Cytosine phosphorothiorate
  modified_base 65: mod_base = OTHER; note = Guanosine phosphorothiorate
  modified_base 74: mod_base = OTHER; note = Cytosine phosphorothiorate
  modified_base 75: mod_base = OTHER; note = 2'-Omethylcytosine phosphorothiorate
  misc_feature 1..41: note = RNA
  misc_feature 42: note = DNA
  misc_feature 43..61: note = RNA
  misc_feature 62: note = DNA
  misc_feature 63..65: note = RNA
  misc_feature 66: note = DNA
  misc_feature 67..76: note = RNA

SEQ ID NO: 2006 - RNA, 76 nt, synthetic construct; identical to SEQ ID NO: 625
  source 1..76: mol_type = other RNA
  modified_base 1: mod_base = OTHER; note = 2'-Omethylguanosine phosphorothiorate
  modified_base 2: mod_base = OTHER; note = 2'-Omethylguanosine phosphorothiorate
  modified_base 26: mod_base = OTHER; note = 2'-Omethyladenosine
  modified_base 42: mod_base = OTHER; note = Adenosine phosphorothiorate
  modified_base 43: mod_base = OTHER; note = 2'-fluoroadenosine
  modified_base 66: mod_base = OTHER; note = Cytosine phosphorothiorate
  modified_base 67: mod_base = OTHER; note = 2'-fluoroguanosine
  modified_base 70: mod_base = OTHER; note = 2'-fluoroguanosine
  modified_base 74: mod_base = OTHER; note = Cytosine phosphorothiorate
  modified_base 75: mod_base = OTHER; note = 2'-Omethylcytosine phosphorothiorate
  modified_base 76: mod_base = OTHER; note = 2'-Omethyladenosine

SEQ ID NO: 2007 - RNA, 76 nt, synthetic construct; identical to SEQ ID NO: 625
  source 1..76: mol_type = other RNA
  modified_base 1: mod_base = OTHER; note = 2'-Omethylguanosine phosphorothiorate
  modified_base 2: mod_base = OTHER; note = 2'-Omethylguanosine phosphorothiorate
  modified_base 19: mod_base = OTHER; note = Adenosine phosphorothiorate
  modified_base 40: mod_base = OTHER; note = Uridine phosphorothiorate
  modified_base 41: mod_base = OTHER; note = 2'-Omethylcytosine

SEQ ID NO: 2008 - DNA, 76 bp, synthetic construct; identical to SEQ ID NO: 1924
  source 1..76: mol_type = other DNA
  modified_base 1: mod_base = OTHER; note = 2'-Omethylguanosine phosphorothiorate
  modified_base 2: mod_base = OTHER; note = 2'-Omethylguanosine phosphorothiorate
  modified_base 10: mod_base = OTHER; note = 2'-O-(2-Methoxyethyl) guanosine
  modified_base 33: mod_base = OTHER; note = Uridine phosphorothiorate
  modified_base 34: mod_base = OTHER; note = 2'-O-(2-Methoxyethyl) thymine
  modified_base 43: mod_base = OTHER; note = Adenosine phosphorothiorate
  modified_base 44: mod_base = OTHER; note = 2'-O-(2-Methoxyethyl) adenosine
  modified_base 74: mod_base = OTHER; note = Cytosine phosphorothiorate
  modified_base 75: mod_base = OTHER; note = 2'-Omethylcytosine
  misc_feature 1..47: note = RNA
  misc_feature 48: note = DNA
  misc_feature 49..76: note = RNA

SEQ ID NO: 2009 - DNA, 76 bp, synthetic construct; identical to SEQ ID NO: 1924
  source 1..76: mol_type = other DNA
  modified_base 1: mod_base = OTHER; note = 2'-Omethylguanosine phosphorothiorate
  modified_base 2: mod_base = OTHER; note = 2'-Omethylguanosine phosphorothiorate
  modified_base 12: mod_base = OTHER; note = Guanosine phosphorothiorate
  modified_base 20: mod_base = OTHER; note = Uridine phosphorothiorate
  modified_base 25: mod_base = OTHER; note = Cytosine phosphorothiorate
  modified_base 26: mod_base = OTHER; note = 2'-O-(2-Methoxyethyl) adenosine
  modified_base 39: mod_base = OTHER; note = Uridine phosphorothiorate
  modified_base 40: mod_base = OTHER; note = Uridine phosphorothiorate
  modified_base 74: mod_base = OTHER; note = Cytosine phosphorothiorate
  modified_base 75: mod_base = OTHER; note = 2'-Omethylcytosine
  misc_feature 1..20: note = RNA
  misc_feature 21: note = DNA
  misc_feature 22..40: note = RNA
  misc_feature 41: note = DNA
  misc_feature 42..76: note = RNA

SEQ ID NO: 2010 - DNA, 76 bp, synthetic construct; identical to SEQ ID NO: 1924
  source 1..76: mol_type = other DNA
  modified_base 1: mod_base = OTHER; note = 2'-Omethylguanosine phosphorothiorate
  modified_base 2: mod_base = OTHER; note = 2'-Omethylguanosine phosphorothiorate
  modified_base 18: mod_base = OTHER; note = 2'-Omethylguanosine
  modified_base 38: mod_base = OTHER; note = Adenosine phosphorothiorate
  modified_base 53: mod_base = OTHER; note = 2'-fluoroguanosine
  modified_base 75: mod_base = OTHER; note = Cytosine phosphorothiorate
  modified_base 76: mod_base = OTHER; note = 2'-Omethyladenosine
  misc_feature 1..20: note = RNA
  misc_feature 21: note = DNA
  misc_feature 22..76: note = RNA

SEQ ID NO: 2011 - skipped

SEQ ID NO: 2012 - DNA, 76 bp, synthetic construct; identical to SEQ ID NO: 1924
  source 1..76: mol_type = other DNA
  modified_base 1: mod_base = OTHER; note = 2'-Omethylguanosine phosphorothiorate
  modified_base 2: mod_base = OTHER; note = 2'-Omethylguanosine phosphorothiorate
  modified_base 11: mod_base = OTHER; note = 2'-fluorocytosine
  modified_base 29: mod_base = OTHER; note = Guanosine phosphorothiorate
  modified_base 33: mod_base = OTHER; note = Uridine phosphorothiorate
  modified_base 34: mod_base = OTHER; note = 2'-Omethyluridine
  modified_base 39: mod_base = OTHER; note = Uridine phosphorothiorate
  modified_base 40: mod_base = OTHER; note = 2'-Omethyluridine
  modified_base 46: mod_base = OTHER; note = Guanosine phosphorothiorate
  modified_base 53: mod_base = OTHER; note = 2'-Omethylguanosine
  modified_base 58: mod_base = OTHER; note = Adenosine phosphorothiorate
  modified_base 74: mod_base = OTHER; note = Cytosine phosphorothiorate
  modified_base 75: mod_base = OTHER; note = 2'-Omethylcytosine phosphorothiorate
  modified_base 76: mod_base = OTHER; note = 2'-Omethyladenosine
  misc_feature 1..46: note = RNA
  misc_feature 47: note = DNA
  misc_feature 48..76: note = RNA

SEQ ID NO: 2013-2014 - skipped (2 entries)

SEQ ID NO: 2015 - DNA, 76 bp, synthetic construct; identical to SEQ ID NO: 1924
  source 1..76: mol_type = other DNA
  modified_base 1: mod_base = OTHER; note = 2'-Omethylguanosine phosphorothiorate
  modified_base 2: mod_base = OTHER; note = 2'-Omethylguanosine phosphorothiorate
  modified_base 10: mod_base = OTHER; note = 2'-Omethylguanosine
  modified_base 25: mod_base = OTHER; note = Cytosine phosphorothiorate
  modified_base 38: mod_base = OTHER; note = Adenosine phosphorothiorate
  modified_base 39: mod_base = OTHER; note = Uridine phosphorothiorate
  modified_base 40: mod_base = OTHER; note = 2'-O-(2-Methoxyethyl) thymine
  modified_base 46: mod_base = OTHER; note = Guanosine phosphorothiorate
  modified_base 47: mod_base = OTHER; note = 2'-Omethyluridine
  modified_base 62: mod_base = OTHER; note = Cytosine phosphorothiorate
  modified_base 63: mod_base = OTHER; note = 2'-fluorocytosine phosphorothiorate
  modified_base 74: mod_base = OTHER; note = Cytosine phosphorothiorate
  modified_base 75: mod_base = OTHER; note = 2'-Omethylcytosine phosphorothiorate
  modified_base 76: mod_base = OTHER; note = 2'-Omethyladenosine
  misc_feature 1..55: note = RNA
  misc_feature 56: note = DNA
  misc_feature 57..76: note = RNA

SEQ ID NO: 2016 - DNA, 76 bp, synthetic construct; identical to SEQ ID NO: 1924
  source 1..76: mol_type = other DNA
  modified_base 1: mod_base = OTHER; note = 2'-Omethylguanosine phosphorothiorate
  modified_base 2: mod_base = OTHER; note = 2'-Omethylguanosine phosphorothiorate
  modified_base 30: mod_base = OTHER; note = Guanosine phosphorothiorate
  modified_base 44: mod_base = OTHER; note = Adenosine phosphorothiorate
  modified_base 61: mod_base = OTHER; note = 2'-Omethylcytosine
  modified_base 74: mod_base = OTHER; note = Cytosine phosphorothiorate
  modified_base 75: mod_base = OTHER; note = deoxycytosine phosphorothiorate
  modified_base 76: mod_base = OTHER; note = 2'-Omethyladenosine
  misc_feature 1..44: note = RNA
  misc_feature 45: note = DNA
  misc_feature 46..74: note = RNA
  misc_feature 75: note = DNA
  misc_feature 76: note = RNA

SEQ ID NO: 2017 - DNA, 76 bp, synthetic construct; identical to SEQ ID NO: 1924
  source 1..76: mol_type = other DNA
  modified_base 1: mod_base = OTHER; note = 2'-Omethylguanosine phosphorothiorate
  modified_base 2: mod_base = OTHER; note = 2'-Omethylguanosine phosphorothiorate
  modified_base 18: mod_base = OTHER; note = Guanosine phosphorothiorate
  modified_base 45: mod_base = OTHER; note = deoxyguanosine phosphorothiorate
  modified_base 46: mod_base = OTHER; note = deoxyguanosine phosphorothiorate
  modified_base 62: mod_base = OTHER; note = Cytosine phosphorothiorate
  modified_base 63: mod_base = OTHER; note = 2'-fluorocytosine
  modified_base 74: mod_base = OTHER; note = Cytosine phosphorothiorate
  modified_base 75: mod_base = OTHER; note = 2'-Omethylcytosine phosphorothiorate
  modified_base 76: mod_base = OTHER; note = 2'-Omethyladenosine
  misc_feature 1..44: note = RNA
  misc_feature 45..47: note = DNA
  misc_feature 48..76: note = RNA

SEQ ID NO: 2018 - DNA, 76 bp, synthetic construct; identical to SEQ ID NO: 1924
  source 1..76: mol_type = other DNA
  modified_base 1: mod_base = OTHER; note = 2'-Omethylguanosine phosphorothiorate
  modified_base 2: mod_base = OTHER; note = 2'-Omethylguanosine
  modified_base 3: mod_base = OTHER; note = Cytosine phosphorothiorate
  modified_base 4: mod_base = OTHER; note = 2'-fluorouridine
  modified_base 18: mod_base = OTHER; note = 2'-Omethylguanosine
  modified_base 37: mod_base = OTHER; note = Adenosine phosphorothiorate
  modified_base 38: mod_base = OTHER; note = 2'-O-(2-Methoxyethyl) adenosine
  modified_base 50: mod_base = OTHER; note = 2'-fluorocytosine
  modified_base 52: mod_base = OTHER; note = 2'-O-(2-Methoxyethyl) guanosine
  modified_base 60: mod_base = OTHER; note = Uridine phosphorothiorate
  modified_base 74: mod_base = OTHER; note = Cytosine phosphorothiorate
  modified_base 75: mod_base = OTHER; note = 2'-Omethylcytosine phosphorothiorate
  modified_base 76: mod_base = OTHER; note = 2'-Omethyladenosine
  misc_feature 1..41: note = RNA
  misc_feature 42: note = DNA
  misc_feature 43..76: note = RNA

SEQ ID NO: 2019 - skipped

SEQ ID NO: 2020 - RNA, 76 nt, synthetic construct; identical to SEQ ID NO: 625
  source 1..76: mol_type = other RNA
  modified_base 1: mod_base = OTHER; note = 2'-Omethylguanosine phosphorothiorate
  modified_base 2: mod_base = OTHER; note = 2'-Omethylguanosine
  modified_base 48: mod_base = OTHER; note = Uridine phosphorothiorate
  modified_base 73: mod_base = OTHER; note = Guanosine phosphorothiorate
  modified_base 75: mod_base = OTHER; note = Cytosine phosphorothiorate
  modified_base 76: mod_base = OTHER; note = 2'-Omethyladenosine

SEQ ID NO: 2021 - DNA, 76 bp, synthetic construct; identical to SEQ ID NO: 1924
  source 1..76: mol_type = other DNA
  modified_base 1: mod_base = OTHER; note = 2'-Omethylguanosine phosphorothiorate
  modified_base 2: mod_base = OTHER; note = 2'-Omethylguanosine
  modified_base 26: mod_base = OTHER; note = Adenosine phosphorothiorate
  modified_base 42: mod_base = OTHER; note = Adenosine phosphorothiorate
  modified_base 43: mod_base = OTHER; note = 2'-O-(2-Methoxyethyl) adenosine
  modified_base 50: mod_base = OTHER; note = Cytosine phosphorothiorate
  modified_base 51: mod_base = OTHER; note = 2'-Omethylguanosine
  modified_base 69: mod_base = OTHER; note = Adenosine phosphorothiorate
  modified_base 74: mod_base = OTHER; note = Cytosine phosphorothiorate
  modified_base 75: mod_base = OTHER; note = 2'-Omethylcytosine
  modified_base 76: mod_base = OTHER; note = 2'-fluoroadenosine
  misc_feature 1..26: note = RNA
  misc_feature 27: note = DNA
  misc_feature 28..53: note = RNA
  misc_feature 54: note = DNA
  misc_feature 55..69: note = RNA
  misc_feature 70: note = DNA
  misc_feature 71..76: note = RNA

SEQ ID NO: 2022 - skipped

SEQ ID NO: 2023 - DNA, 76 bp, synthetic construct; identical to SEQ ID NO: 1924
  source 1..76: mol_type = other DNA
  modified_base 1: mod_base = OTHER; note = 2'-Omethylguanosine phosphorothiorate
  modified_base 2: mod_base = OTHER; note = 2'-Omethylguanosine
  modified_base 14: mod_base = OTHER; note = Adenosine phosphorothiorate
  modified_base 19: mod_base = OTHER; note = Adenosine phosphorothiorate
  modified_base 26: mod_base = OTHER; note = Adenosine phosphorothiorate
  modified_base 27: mod_base = OTHER; note = 2'-fluorouridine
  modified_base 58: mod_base = OTHER; note = Adenosine phosphorothiorate
  modified_base 59: mod_base = OTHER; note = 2'-Omethylguanosine
  modified_base 62: mod_base = OTHER; note = Cytosine phosphorothiorate
  modified_base 63: mod_base = OTHER; note = 2'-Omethylcytosine
  modified_base 73: mod_base = OTHER; note = Guanosine phosphorothiorate
  modified_base 74: mod_base = OTHER; note = Cytosine phosphorothiorate
  modified_base 75: mod_base = OTHER; note = 2'-Omethylcytosine
  misc_feature 1..19: note = RNA
  misc_feature 20: note = DNA
  misc_feature 21..52: note = RNA
  misc_feature 53: note = DNA
  misc_feature 54..76: note = RNA

SEQ ID NO: 2024 - RNA, 76 nt, synthetic construct; identical to SEQ ID NO: 625
  source 1..76: mol_type = other RNA
  modified_base 1: mod_base = OTHER; note = 2'-Omethylguanosine phosphorothiorate
  modified_base 2: mod_base = OTHER; note = 2'-Omethylguanosine
  modified_base 13: mod_base = OTHER; note = 2'-Omethylcytosine
  modified_base 17: mod_base = OTHER; note = Guanosine phosphorothiorate
  modified_base 18: mod_base = OTHER; note = 2'-O-(2-Methoxyethyl) guanosine
  modified_base 19: mod_base = OTHER; note = Adenosine phosphorothiorate
  modified_base 20: mod_base = OTHER; note = 2'-O-(2-Methoxyethyl) thymine
  modified_base 30: mod_base = OTHER; note = Guanosine phosphorothiorate
  modified_base 39: mod_base = OTHER; note = Uridine phosphorothiorate
  modified_base 40: mod_base = OTHER; note = 2'-O-(2-Methoxyethyl) thymine
  modified_base 55: mod_base = OTHER; note = Uridine phosphorothiorate
  modified_base 59: mod_base = OTHER; note = 2'-O-(2-Methoxyethyl) guanosine
  modified_base 64: mod_base = OTHER; note = Guanosine phosphorothiorate
  modified_base 65: mod_base = OTHER; note = 2'-Omethylguanosine
  modified_base 69: mod_base = OTHER; note = Adenosine phosphorothiorate
  modified_base 75: mod_base = OTHER; note = Cytosine phosphorothiorate
  modified_base 76: mod_base = OTHER; note = 2'-Omethyladenosine

SEQ ID NO: 2025 - DNA, 76 bp, synthetic construct; identical to SEQ ID NO: 1924
  source 1..76: mol_type = other DNA
  modified_base 1: mod_base = OTHER; note = 2'-Omethylguanosine phosphorothiorate
  modified_base 2: mod_base = OTHER; note = 2'-Omethylguanosine phosphorothiorate
  modified_base 3: mod_base = OTHER; note = Cytosine phosphorothiorate
  modified_base 11: mod_base = OTHER; note = Cytosine phosphorothiorate
  modified_base 18: mod_base = OTHER; note = Guanosine phosphorothiorate
  modified_base 74: mod_base = OTHER; note = Cytosine phosphorothiorate
  modified_base 75: mod_base = OTHER; note = 2'-Omethylcytosine phosphorothiorate
  modified_base 76: mod_base = OTHER; note = 2'-Omethyladenosine
  misc_feature 1..3: note = RNA
  misc_feature 4: note = DNA
  misc_feature 5..11: note = RNA
  misc_feature 12: note = DNA
  misc_feature 13..76: note = RNA

SEQ ID NO: 2026 - skipped

SEQ ID NO: 2027 - RNA, 76 nt, synthetic construct; identical to SEQ ID NO: 625
  source 1..76: mol_type = other RNA
  modified_base 1: mod_base = OTHER; note = 2'-Omethylguanosine phosphorothiorate
  modified_base 2: mod_base = OTHER; note = 2'-Omethylguanosine
  modified_base 13: mod_base = OTHER; note = 2'-Omethylcytosine
  modified_base 23: mod_base = OTHER; note = Cytosine phosphorothiorate
  modified_base 24: mod_base = OTHER; note = 2'-fluoroguanosine
  modified_base 31: mod_base = OTHER; note = 2'-fluoroadenosine
  modified_base 43: mod_base = OTHER; note = Adenosine phosphorothiorate
  modified_base 61: mod_base = OTHER; note = 2'-fluorocytosine

SEQ ID NO: 2028 - DNA, 76 bp, synthetic construct; identical to SEQ ID NO: 1924
  source 1..76: mol_type = other DNA
  modified_base 1: mod_base = OTHER; note = 2'-Omethylguanosine phosphorothiorate
  modified_base 2: mod_base = OTHER; note = 2'-Omethylguanosine phosphorothiorate
  modified_base 10: mod_base = OTHER; note = Guanosine phosphorothiorate
  modified_base 11: mod_base = OTHER; note = 2'-Omethylcytosine
  modified_base 25: mod_base = OTHER; note = Cytosine phosphorothiorate
  modified_base 45: mod_base = OTHER; note = Guanosine phosphorothiorate
  modified_base 46: mod_base = OTHER; note = 2'-O-(2-Methoxyethyl) guanosine
  modified_base 56: mod_base = OTHER; note = Cytosine phosphorothiorate
  modified_base 66: mod_base = OTHER; note = 2'-fluorocytosine
  modified_base 75: mod_base = OTHER; note = Cytosine phosphorothiorate
  modified_base 76: mod_base = OTHER; note = 2'-Omethyladenosine
  misc_feature 1..56: note = RNA
  misc_feature 57: note = DNA
  misc_feature 58..76: note = RNA

SEQ ID NO: 2029 - skipped

SEQ ID NO: 2030 - RNA, 76 nt, synthetic construct; identical to SEQ ID NO: 625
  source 1..76: mol_type = other RNA
  modified_base 1: mod_base = OTHER; note = 2'-Omethylguanosine phosphorothiorate
  modified_base 2: mod_base = OTHER; note = 2'-Omethylguanosine
  modified_base 15: mod_base = OTHER; note = Adenosine phosphorothiorate
  modified_base 16: mod_base = OTHER; note = 2'-fluorouridine
  modified_base 22: mod_base = OTHER; note = Guanosine phosphorothiorate
  modified_base 23: mod_base = OTHER; note = 2'-Omethylcytosine
  modified_base 39: mod_base = OTHER; note = Uridine phosphorothiorate
  modified_base 40: mod_base = OTHER; note = 2'-fluorouridine
  modified_base 42: mod_base = OTHER; note = 2'-Omethyladenosine
  modified_base 64: mod_base = OTHER; note = Guanosine phosphorothiorate
  modified_base 73: mod_base = OTHER; note = Guanosine phosphorothiorate
  modified_base 74: mod_base = OTHER; note = Cytosine phosphorothiorate
  modified_base 75: mod_base = OTHER; note = 2'-Omethylcytosine phosphorothiorate
  modified_base 76: mod_base = OTHER; note = 2'-Omethyladenosine

SEQ ID NO: 2031 - RNA, 76 nt, synthetic construct; identical to SEQ ID NO: 625
  source 1..76: mol_type = other RNA
  modified_base 1: mod_base = OTHER; note = 2'-Omethylguanosine phosphorothiorate
  modified_base 2: mod_base = OTHER; note = 2'-Omethylguanosine
  modified_base 15: mod_base = OTHER; note = Adenosine phosphorothiorate
  modified_base 32: mod_base = OTHER; note = 2'-fluorocytosine
  modified_base 37: mod_base = OTHER; note = Adenosine phosphorothiorate
  modified_base 46: mod_base = OTHER; note = Guanosine phosphorothiorate
  modified_base 47: mod_base = OTHER; note = 2'-Omethyluridine
  modified_base 55: mod_base = OTHER; note = Uridine phosphorothiorate
  modified_base 75: mod_base = OTHER; note = Cytosine phosphorothiorate
  modified_base 76: mod_base = OTHER; note = 2'-O-(2-Methoxyethyl) adenosine

SEQ ID NO: 2032 - RNA, 76 nt, synthetic construct; identical to SEQ ID NO: 625
  source 1..76: mol_type = other RNA
  modified_base 1: mod_base = OTHER; note = 2'-Omethylguanosine phosphorothiorate
  modified_base 2: mod_base = OTHER; note = 2'-Omethylguanosine phosphorothiorate
  modified_base 18: mod_base = OTHER; note = Guanosine phosphorothiorate
  modified_base 33: mod_base = OTHER; note = Uridine phosphorothiorate
  modified_base 34: mod_base = OTHER; note = 2'-fluorouridine
  modified_base 43: mod_base = OTHER; note = 2'-fluoroadenosine
  modified_base 71: mod_base = OTHER; note = Uridine phosphorothiorate
  modified_base 74: mod_base = OTHER; note = Cytosine phosphorothiorate
  modified_base 75: mod_base = OTHER; note = 2'-Omethylcytosine phosphorothiorate
  modified_base 76: mod_base = OTHER; note = 2'-Omethyladenosine

SEQ ID NO: 2033 - DNA, 76 bp, synthetic construct; identical to SEQ ID NO: 1924
  source 1..76: mol_type = other DNA
  modified_base 1: mod_base = OTHER; note = 2'-Omethylguanosine phosphorothiorate
  modified_base 2: mod_base = OTHER; note = 2'-Omethylguanosine phosphorothiorate
  modified_base 30: mod_base = OTHER; note = Guanosine phosphorothiorate
  modified_base 38: mod_base = OTHER; note = Adenosine phosphorothiorate
  modified_base 39: mod_base = OTHER; note = 2'-Omethyluridine
  modified_base 61: mod_base = OTHER; note = 2'-Omethylcytosine
  misc_feature 1..30: note = RNA
  misc_feature 31: note = DNA
  misc_feature 32..74: note = RNA
  misc_feature 75: note = DNA
  misc_feature 76: note = RNA

SEQ ID NO: 2034 - DNA, 76 bp, synthetic construct; identical to SEQ ID NO: 1924
  source 1..76: mol_type = other DNA
  modified_base 1: mod_base = OTHER; note = 2'-Omethylguanosine phosphorothiorate
  modified_base 2: mod_base = OTHER; note = 2'-Omethylguanosine phosphorothiorate
  modified_base 23: mod_base = OTHER; note = Cytosine phosphorothiorate
  modified_base 24: mod_base = OTHER; note = 2'-fluoroguanosine
  modified_base 52: mod_base = OTHER; note = 2'-fluoroguanosine
  modified_base 66: mod_base = OTHER; note = 2'-Omethylcytosine
  modified_base 74: mod_base = OTHER; note = Cytosine phosphorothiorate
  modified_base 75: mod_base = OTHER; note = 2'-Omethylcytosine
  misc_feature 1..45: note = RNA
  misc_feature 46: note = DNA
  misc_feature 47..76: note = RNA

SEQ ID NO: 2035 - DNA, 76 bp, synthetic construct; identical to SEQ ID NO: 1924
  source 1..76: mol_type = other DNA
  modified_base 1: mod_base = OTHER; note = 2'-Omethylguanosine phosphorothiorate
  modified_base 2: mod_base = OTHER; note = 2'-Omethylguanosine
  modified_base 10: mod_base = OTHER; note = 2'-O-(2-Methoxyethyl) guanosine
  modified_base 12: mod_base = OTHER; note = 2'-fluoroguanosine
  modified_base 21: mod_base = OTHER; note = Adenosine phosphorothiorate
  modified_base 29: mod_base = OTHER; note = Guanosine phosphorothiorate
  modified_base 30: mod_base = OTHER; note = 2'-fluoroguanosine
  modified_base 31: mod_base = OTHER; note = Adenosine phosphorothiorate
  modified_base 32: mod_base = OTHER; note = 2'-Omethylcytosine
  modified_base 39: mod_base = OTHER; note = 2'-O-(2-Methoxyethyl) thymine
  modified_base 44: mod_base = OTHER; note = 2'-O-(2-Methoxyethyl) adenosine
  modified_base 56: mod_base = OTHER; note = Cytosine phosphorothiorate
  modified_base 74: mod_base = OTHER; note = Cytosine phosphorothiorate
  modified_base 75: mod_base = OTHER; note = 2'-Omethylcytosine
  misc_feature 1..71: note = RNA
  misc_feature 72: note = DNA
  misc_feature 73..76: note = RNA

SEQ ID NO: 2036 - DNA, 76 bp, synthetic construct; identical to SEQ ID NO: 1924
  source 1..76: mol_type = other DNA
  modified_base 1: mod_base = OTHER; note = 2'-Omethylguanosine phosphorothiorate
  modified_base 2: mod_base = OTHER; note = 2'-Omethylguanosine
  modified_base 12: mod_base = OTHER; note = Guanosine phosphorothiorate
  modified_base 13: mod_base = OTHER; note = 2'-fluorocytosine
  modified_base 25: mod_base = OTHER; note = Cytosine phosphorothiorate
  modified_base 44: mod_base = OTHER; note = Adenosine phosphorothiorate
  modified_base 45: mod_base = OTHER; note = 2'-O-(2-Methoxyethyl) guanosine
  modified_base 51: mod_base = OTHER; note = Guanosine phosphorothiorate
  modified_base 75: mod_base = OTHER; note = 2'-Omethylcytosine
  misc_feature 1..51: note = RNA
  misc_feature 52: note = DNA
  misc_feature 53..76: note = RNA

SEQ ID NO: 2037 - RNA, 76 nt, synthetic construct; identical to SEQ ID NO: 625
  source 1..76: mol_type = other RNA
  modified_base 1: mod_base = OTHER; note = 2'-Omethylguanosine phosphorothiorate
  modified_base 2: mod_base = OTHER; note = 2'-Omethylguanosine
  modified_base 3: mod_base = OTHER; note = 2'-Omethylcytosine
  modified_base 44: mod_base = OTHER; note = Adenosine phosphorothiorate
  modified_base 50: mod_base = OTHER; note = 2'-Omethylcytosine
  modified_base 75: mod_base = OTHER; note = Cytosine phosphorothiorate
  modified_base 76: mod_base = OTHER; note = 2'-Omethyladenosine

SEQ ID NO: 2038 - skipped

SEQ ID NO: 2039 - DNA, 76 bp, synthetic construct; identical to SEQ ID NO: 1924
  source 1..76: mol_type = other DNA
  modified_base 1: mod_base = OTHER; note = 2'-Omethylguanosine phosphorothiorate
  modified_base 2: mod_base = OTHER; note = 2'-Omethylguanosine phosphorothiorate
  modified_base 19: mod_base = OTHER; note = Adenosine phosphorothiorate
  modified_base 29: mod_base = OTHER; note = 2'-O-(2-Methoxyethyl) guanosine
  modified_base 68: mod_base = OTHER; note = 2'-fluoroguanosine
  modified_base 72: mod_base = OTHER; note = 2'-fluorocytosine
  modified_base 74: mod_base = OTHER; note = Cytosine phosphorothiorate
  modified_base 75: mod_base = OTHER; note = 2'-Omethylcytosine
  misc_feature 1..19: note = RNA
  misc_feature 20: note = DNA
  misc_feature 21..43: note = RNA
  misc_feature 44: note = DNA
  misc_feature 45..76: note = RNA

SEQ ID NO: 2040-2042 - skipped (3 entries)

SEQ ID NO: 2043 - DNA, 76 bp, synthetic construct; identical to SEQ ID NO: 1924
  source 1..76: mol_type = other DNA
  modified_base 1: mod_base = OTHER; note = 2'-Omethylguanosine phosphorothiorate
  modified_base 2: mod_base = OTHER; note = 2'-Omethylguanosine
  modified_base 10: mod_base = OTHER; note = Guanosine phosphorothiorate
  modified_base 11: mod_base = OTHER; note = 2'-fluorocytosine
  modified_base 17: mod_base = OTHER; note = 2'-fluoroguanosine
  modified_base 45: mod_base = OTHER; note = Guanosine phosphorothiorate
  modified_base 53: mod_base = OTHER; note = Guanosine phosphorothiorate
  modified_base 54: mod_base = OTHER; note = 2'-fluorouridine
  modified_base 65: mod_base = OTHER; note = Guanosine phosphorothiorate
  modified_base 74: mod_base = OTHER; note = Cytosine phosphorothiorate
  modified_base 75: mod_base = OTHER; note = 2'-Omethylcytosine phosphorothiorate
  modified_base 76: mod_base = OTHER; note = 2'-Omethyladenosine
  misc_feature 1..45: note = RNA
  misc_feature 46: note = DNA
  misc_feature 47..65: note = RNA
  misc_feature 66: note = DNA
  misc_feature 67..76: note = RNA

SEQ ID NO: 2044 - DNA, 76 bp, synthetic construct; identical to SEQ ID NO: 1924
  source 1..76: mol_type = other DNA
  modified_base 1: mod_base = OTHER; note = 2'-Omethylguanosine phosphorothiorate
  modified_base 2: mod_base = OTHER; note = 2'-Omethylguanosine phosphorothiorate
  modified_base 4: mod_base = OTHER; note = Uridine phosphorothiorate
  modified_base 5: mod_base = OTHER; note = 2'-Omethylcytosine
  modified_base 14: mod_base = OTHER; note = 2'-fluoroadenosine
  modified_base 15: mod_base = OTHER; note = Adenosine phosphorothiorate
  modified_base 18: mod_base = OTHER; note = Guanosine phosphorothiorate
  modified_base 19: mod_base = OTHER; note = 2'-O-(2-Methoxyethyl) adenosine
  modified_base 21: mod_base = OTHER; note = 2'-fluoroadenosine
  modified_base 64: mod_base = OTHER; note = 2'-fluoroguanosine
  modified_base 74: mod_base = OTHER; note = Cytosine phosphorothiorate
  modified_base 75: mod_base = OTHER; note = 2'-Omethylcytosine
  misc_feature 1..15: note = RNA
  misc_feature 16: note = DNA
  misc_feature 17..76: note = RNA

SEQ ID NO: 2045 - DNA, 76 bp, synthetic construct; identical to SEQ ID NO: 1924
  source 1..76: mol_type = other DNA
  modified_base 1: mod_base = OTHER; note = 2'-Omethylguanosine phosphorothiorate
  modified_base 2: mod_base = OTHER; note = 2'-Omethylguanosine
  modified_base 9: mod_base = OTHER; note = Guanosine phosphorothiorate
  modified_base 18: mod_base = OTHER; note = 2'-fluoroguanosine
  modified_base 22: mod_base = OTHER; note = 2'-Omethylguanosine
  modified_base 38: mod_base = OTHER; note = Adenosine phosphorothiorate
  modified_base 39: mod_base = OTHER; note = 2'-Omethyluridine
  modified_base 75: mod_base = OTHER; note = Cytosine phosphorothiorate
  modified_base 76: mod_base = OTHER; note = 2'-Omethyladenosine
  misc_feature 1..9: note = RNA
  misc_feature 10: note = DNA
  misc_feature 11..76: note = RNA

SEQ ID NO: 2046-2048 - skipped (3 entries)

SEQ ID NO: 2049 - DNA, 76 bp, synthetic construct; identical to SEQ ID NO: 1924
  source 1..76: mol_type = other DNA
  modified_base 1: mod_base = OTHER; note = 2'-Omethylguanosine phosphorothiorate
  modified_base 2: mod_base = OTHER; note = 2'-Omethylguanosine
  modified_base 23: mod_base = OTHER; note = deoxycytosine phosphorothiorate
  modified_base 24: mod_base = OTHER; note = 2'-O-(2-Methoxyethyl) guanosine
  modified_base 46: mod_base = OTHER; note = Guanosine phosphorothiorate
  modified_base 56: mod_base = OTHER; note = Cytosine phosphorothiorate
  modified_base 57: mod_base = OTHER; note = 2'-Omethylguanosine
  modified_base 60: mod_base = OTHER; note = Uridine phosphorothiorate
  modified_base 61: mod_base = OTHER; note = 2'-fluorocytosine
  modified_base 74: mod_base = OTHER; note = Cytosine phosphorothiorate
  modified_base 75: mod_base = OTHER; note = 2'-Omethylcytosine
  misc_feature 1..22: note = RNA
  misc_feature 23: note = DNA
  misc_feature 24..69: note = RNA
  misc_feature 70: note = DNA
  misc_feature 71..76: note = RNA

SEQ ID NO: 2050 - DNA, 76 bp, synthetic construct; identical to SEQ ID NO: 1924
  source 1..76: mol_type = other DNA
  modified_base 1: mod_base = OTHER; note = 2'-Omethylguanosine phosphorothiorate
  modified_base 2: mod_base = OTHER; note = 2'-Omethylguanosine
  modified_base 46: mod_base = OTHER; note = Guanosine phosphorothiorate
  modified_base 63: mod_base = OTHER; note = Cytosine phosphorothiorate
  modified_base 64: mod_base = OTHER; note = 2'-fluoroguanosine
  modified_base 74: mod_base = OTHER; note = Cytosine phosphorothiorate
  modified_base 75: mod_base = OTHER; note = 2'-Omethylcytosine
  misc_feature 1..41: note = RNA
  misc_feature 42: note = DNA
  misc_feature 43..46: note = RNA
  misc_feature 47: note = DNA
  misc_feature 48..51: note = RNA
  misc_feature 52: note = DNA
  misc_feature 53..76: note = RNA

SEQ ID NO: 2051 - skipped

SEQ ID NO: 2052 - RNA, 76 nt, synthetic construct; identical to SEQ ID NO: 625
  source 1..76: mol_type = other RNA
  modified_base 1: mod_base = OTHER; note = 2'-Omethylguanosine phosphorothiorate
  modified_base 2: mod_base = OTHER; note = 2'-Omethylguanosine phosphorothiorate
  modified_base 33: mod_base = OTHER; note = Uridine phosphorothiorate
  modified_base 42: mod_base = OTHER; note = 2'-fluoroadenosine
  modified_base 47: mod_base = OTHER; note = Uridine phosphorothiorate
  modified_base 48: mod_base = OTHER; note = 2'-O-(2-Methoxyethyl) thymine

SEQ ID NO: 2053-2055 - skipped (3 entries)

SEQ ID NO: 2056 - RNA, 76 nt, synthetic construct; identical to SEQ ID NO: 625
  source 1..76: mol_type = other RNA
  modified_base 1: mod_base = OTHER; note = 2'-Omethylguanosine phosphorothiorate
  modified_base 2: mod_base = OTHER; note = 2'-Omethylguanosine
  modified_base 17: mod_base = OTHER; note = 2'-fluoroguanosine
  modified_base 25: mod_base = OTHER; note = Cytosine phosphorothiorate
  modified_base 30: mod_base = OTHER; note = 2'-O-(2-Methoxyethyl) guanosine
  modified_base 44: mod_base = OTHER; note = 2'-O-(2-Methoxyethyl) adenosine
  modified_base 46: mod_base = OTHER; note = Guanosine phosphorothiorate
  modified_base 47: mod_base = OTHER; note = 2'-O-(2-Methoxyethyl) thymine
  modified_base 74: mod_base = OTHER; note = Cytosine phosphorothiorate
  modified_base 75: mod_base = OTHER; note = 2'-Omethylcytosine phosphorothiorate
  modified_base 76: mod_base = OTHER; note = 2'-Omethyladenosine

SEQ ID NO: 2057-2059 - skipped (3 entries)

SEQ ID NO: 2060 - DNA, 76 bp, synthetic construct; identical to SEQ ID NO: 1924
  source 1..76: mol_type = other DNA
  modified_base 1: mod_base = OTHER; note = 2'-Omethylguanosine phosphorothiorate
  modified_base 2: mod_base = OTHER; note = 2'-Omethylguanosine phosphorothiorate
  modified_base 12: mod_base = OTHER; note = Guanosine phosphorothiorate
  modified_base 14: mod_base = OTHER; note = Adenosine phosphorothiorate
  modified_base 19: mod_base = OTHER; note = Adenosine phosphorothiorate
  modified_base 20: mod_base = OTHER; note = 2'-fluorouridine
  modified_base 75: mod_base = OTHER; note = 2'-fluorocytosine phosphorothiorate
  modified_base 76: mod_base = OTHER; note = 2'-Omethyladenosine
  misc_feature 1..25: note = RNA
  misc_feature 26: note = DNA
  misc_feature 27..76: note = RNA

SEQ ID NO: 2061 - skipped

SEQ ID NO: 2062 - DNA, 76 bp, synthetic construct; identical to SEQ ID NO: 1924
  source 1..76: mol_type = other DNA
  modified_base 1: mod_base = OTHER; note = 2'-Omethylguanosine phosphorothiorate
  modified_base 2: mod_base = OTHER; note = 2'-Omethylguanosine phosphorothiorate
  modified_base 40: mod_base = OTHER; note = Uridine phosphorothiorate
  modified_base 41: mod_base = OTHER; note = 2'-Omethylcytosine
  modified_base 49: mod_base = OTHER; note = 2'-Omethylcytosine
  modified_base 65: mod_base = OTHER; note = Guanosine phosphorothiorate
  modified_base 75: mod_base = OTHER; note = Cytosine phosphorothiorate
  modified_base 76: mod_base = OTHER; note = 2'-Omethyladenosine
  misc_feature 1..5: note = RNA
  misc_feature 6: note = DNA
  misc_feature 7..65: note = RNA
  misc_feature 66: note = DNA
  misc_feature 67..76: note = RNA

SEQ ID NO: 2063 - skipped

SEQ ID NO: 2064 - DNA, 76 bp, synthetic construct; identical to SEQ ID NO: 1924
  source 1..76: mol_type = other DNA
  modified_base 1: mod_base = OTHER; note = 2'-Omethylguanosine phosphorothiorate
  modified_base 2: mod_base = OTHER; note = 2'-Omethylguanosine phosphorothiorate
  modified_base 22: mod_base = OTHER; note = Guanosine phosphorothiorate
  modified_base 23: mod_base = OTHER; note = 2'-Omethylcytosine
  modified_base 26: mod_base = OTHER; note = Adenosine phosphorothiorate
  modified_base 27: mod_base = OTHER; note = deoxyuridine phosphorothiorate
  modified_base 47: mod_base = OTHER; note = Uridine phosphorothiorate
  modified_base 50: mod_base = OTHER; note = 2'-Omethylcytosine
  modified_base 74: mod_base = OTHER; note = Cytosine phosphorothiorate
  modified_base 75: mod_base = OTHER; note = 2'-Omethylcytosine
  misc_feature 1..26: note = RNA
  misc_feature 27: note = DNA
  misc_feature 28..37: note = RNA
  misc_feature 38: note = DNA
  misc_feature 39..76: note = RNA

SEQ ID NO: 2065 - skipped

SEQ ID NO: 2066 - RNA, 76 nt, synthetic construct; identical to SEQ ID NO: 625
  source 1..76: mol_type = other RNA
  modified_base 1: mod_base = OTHER; note = 2'-Omethylguanosine phosphorothiorate
  modified_base 2: mod_base = OTHER; note = 2'-Omethylguanosine phosphorothiorate
  modified_base 74: mod_base = OTHER; note = Cytosine phosphorothiorate
  modified_base 75: mod_base = OTHER; note = 2'-Omethylcytosine

SEQ ID NO: 2067 - RNA, 76 nt, synthetic construct; identical to SEQ ID NO: 625
  source 1..76: mol_type = other RNA
  modified_base 1: mod_base = OTHER; note = 2'-Omethylguanosine phosphorothiorate
  modified_base 2: mod_base = OTHER; note = 2'-Omethylguanosine phosphorothiorate
  modified_base 20: mod_base = OTHER; note = 2'-fluorouridine
  modified_base 50: mod_base = OTHER; note = Cytosine phosphorothiorate
  modified_base 51: mod_base = OTHER; note = 2'-fluoroguanosine
  modified_base 74: mod_base = OTHER; note = Cytosine phosphorothiorate
  modified_base 75: mod_base = OTHER; note = 2'-Omethylcytosine phosphorothiorate
  modified_base 76: mod_base = OTHER; note = 2'-Omethyladenosine

SEQ ID NO: 2068 - skipped

SEQ ID NO: 2069 - RNA, 76 nt, synthetic construct; identical to SEQ ID NO: 625
  source 1..76: mol_type = other RNA
  modified_base 1: mod_base = OTHER; note = 2'-Omethylguanosine phosphorothiorate
  modified_base 2: mod_base = OTHER; note = 2'-Omethylguanosine
  modified_base 74: mod_base = OTHER; note = Cytosine phosphorothiorate
  modified_base 75: mod_base = OTHER; note = 2'-Omethylcytosine

SEQ ID NO: 2070 - skipped

SEQ ID NO: 2071 - RNA, 76 nt, synthetic construct; identical to SEQ ID NO: 625
  source 1..76: mol_type = other RNA
  modified_base 1: mod_base = OTHER; note = 2'-Omethylguanosine phosphorothiorate
  modified_base 2: mod_base = OTHER; note = 2'-Omethylguanosine phosphorothiorate
  modified_base 12: mod_base = OTHER; note = Guanosine phosphorothiorate
  modified_base 13: mod_base = OTHER; note = 2'-Omethylcytosine
  modified_base 74: mod_base = OTHER; note = Cytosine phosphorothiorate
  modified_base 75: mod_base = OTHER; note = 2'-Omethylcytosine phosphorothiorate
  modified_base 76: mod_base = OTHER; note = 2'-Omethyladenosine

SEQ ID NO: 2072 - RNA, 76 nt, synthetic construct; identical to SEQ ID NO: 625
  source 1..76: mol_type = other RNA
  modified_base 1: mod_base = OTHER; note = 2'-Omethylguanosine phosphorothiorate
  modified_base 2: mod_base = OTHER; note = 2'-Omethylguanosine phosphorothiorate
  modified_base 44: mod_base = OTHER; note = Adenosine phosphorothiorate
  modified_base 45: mod_base = OTHER; note = 2'-O-(2-Methoxyethyl) guanosine
  modified_base 74: mod_base = OTHER; note = Cytosine phosphorothiorate
  modified_base 75: mod_base = OTHER; note = 2'-Omethylcytosine phosphorothiorate
  modified_base 76: mod_base = OTHER; note = 2'-Omethyladenosine

SEQ ID NO: 2073 - RNA, 76 nt, synthetic construct; identical to SEQ ID NO: 625
  source 1..76: mol_type = other RNA
  modified_base 1: mod_base = OTHER; note = 2'-Omethylguanosine phosphorothiorate
  modified_base 2: mod_base = OTHER; note = 2'-Omethylguanosine phosphorothiorate
  modified_base 56: mod_base = OTHER; note = Cytosine phosphorothiorate
  modified_base 57: mod_base = OTHER; note = 2'-O-(2-Methoxyethyl) guanosine
  modified_base 74: mod_base = OTHER; note = Cytosine phosphorothiorate
  modified_base 75: mod_base = OTHER; note = 2'-Omethylcytosine phosphorothiorate
  modified_base 76: mod_base = OTHER; note = 2'-Omethyladenosine

SEQ ID NO: 2074 - DNA, 76 bp, synthetic construct; identical to SEQ ID NO: 1924
  source 1..76: mol_type = other DNA
  modified_base 1: mod_base = OTHER; note = 2'-Omethylguanosine phosphorothiorate
  modified_base 2: mod_base = OTHER; note = 2'-Omethylguanosine phosphorothiorate
  modified_base 51: mod_base = OTHER; note = Guanosine phosphorothiorate
  modified_base 74: mod_base = OTHER; note = Cytosine phosphorothiorate
  modified_base 75: mod_base = OTHER; note = 2'-Omethylcytosine
  misc_feature 1..51: note = RNA
  misc_feature 52: note = DNA
  misc_feature 53..76: note = RNA

SEQ ID NO: 2075 - RNA, 76 nt, synthetic construct; identical to SEQ ID NO: 625
  source 1..76: mol_type = other RNA
  modified_base 1: mod_base = OTHER; note = 2'-Omethylguanosine phosphorothiorate
  modified_base 2: mod_base = OTHER; note = 2'-Omethylguanosine
  modified_base 11: mod_base = OTHER; note = 2'-fluorocytosine
  modified_base 74: mod_base = OTHER; note = Cytosine phosphorothiorate
  modified_base 75: mod_base = OTHER; note = 2'-Omethylcytosine phosphorothiorate
  modified_base 76: mod_base = OTHER; note = 2'-Omethyladenosine

SEQ ID NO: 2076 - skipped

SEQ ID NO: 2077 - RNA, 76 nt, synthetic construct; identical to SEQ ID NO: 625
  source 1..76: mol_type = other RNA
  modified_base 1: mod_base = OTHER; note = 2'-Omethylguanosine phosphorothiorate
  modified_base 2: mod_base = OTHER; note = 2'-Omethylguanosine phosphorothiorate
  modified_base 16: mod_base = OTHER; note = Uridine phosphorothiorate
  modified_base 17: mod_base = OTHER; note = 2'-O-(2-Methoxyethyl) guanosine
  modified_base 74: mod_base = OTHER; note = Cytosine phosphorothiorate
  modified_base 75: mod_base = OTHER; note = 2'-Omethylcytosine

SEQ ID NO: 2078 - RNA, 76 nt, synthetic construct; identical to SEQ ID NO: 625
  source 1..76: mol_type = other RNA
  modified_base 1: mod_base = OTHER; note = 2'-Omethylguanosine phosphorothiorate
  modified_base 2: mod_base = OTHER; note = 2'-Omethylguanosine phosphorothiorate
  modified_base 52: mod_base = OTHER; note = Guanosine phosphorothiorate
  modified_base 74: mod_base = OTHER; note = Cytosine phosphorothiorate
  modified_base 75: mod_base = OTHER; note = 2'-Omethylcytosine

SEQ ID NO: 2079 - skipped

SEQ ID NO: 2080 - RNA, 76 nt, synthetic construct; identical to SEQ ID NO: 625
  source 1..76: mol_type = other RNA
  modified_base 1: mod_base = OTHER; note = 2'-Omethylguanosine phosphorothiorate
  modified_base 2: mod_base = OTHER; note = 2'-Omethylguanosine
  modified_base 53: mod_base = OTHER; note = 2'-fluoroguanosine
  modified_base 74: mod_base = OTHER; note = Cytosine phosphorothiorate
  modified_base 75: mod_base = OTHER; note = 2'-Omethylcytosine

SEQ ID NO: 2081 - RNA, 76 nt, synthetic construct; identical to SEQ ID NO: 625
  source 1..76: mol_type = other RNA
  modified_base 1: mod_base = OTHER; note = 2'-Omethylguanosine phosphorothiorate
  modified_base 2: mod_base = OTHER; note = 2'-Omethylguanosine phosphorothiorate
  modified_base 41: mod_base = OTHER; note = Cytosine phosphorothiorate
  modified_base 42: mod_base = OTHER; note = 2'-fluoroadenosine
  modified_base 54: mod_base = OTHER; note = 2'-fluorouridine
  modified_base 69: mod_base = OTHER; note = 2'-fluoroadenosine
  modified_base 74: mod_base = OTHER; note = Cytosine phosphorothiorate
  modified_base 75: mod_base = OTHER; note = 2'-Omethylcytosine

SEQ ID NO: 2082 - RNA, 76 nt, synthetic construct; identical to SEQ ID NO: 625
  source 1..76: mol_type = other RNA
  modified_base 1: mod_base = OTHER; note = 2'-Omethylguanosine phosphorothiorate
  modified_base 2: mod_base = OTHER; note = 2'-Omethylguanosine phosphorothiorate
  modified_base 50: mod_base = OTHER; note = Cytosine phosphorothiorate
  modified_base 51: mod_base = OTHER; note = 2'-O-(2-Methoxyethyl) guanosine
  modified_base 74: mod_base = OTHER; note = Cytosine phosphorothiorate
  modified_base 75: mod_base = OTHER; note = 2'-Omethylcytosine phosphorothiorate
  modified_base 76: mod_base = OTHER; note = 2'-Omethyladenosine

SEQ ID NO: 2083 - DNA, 76 bp, synthetic construct; identical to SEQ ID NO: 1924
  source 1..76: mol_type = other DNA
  modified_base 1: mod_base = OTHER; note = 2'-Omethylguanosine phosphorothiorate
  modified_base 2: mod_base = OTHER; note = 2'-Omethylguanosine phosphorothiorate
  modified_base 31: mod_base = OTHER; note = Adenosine phosphorothiorate
  modified_base 32: mod_base = OTHER; note = 2'-Omethylcytosine
  modified_base 52: mod_base = OTHER; note = 2'-O-(2-Methoxyethyl) guanosine phosphorothiorate
  modified_base 53: mod_base = OTHER; note = 2'-O-(2-Methoxyethyl) guanosine
  modified_base 74: mod_base = OTHER; note = Cytosine phosphorothiorate
  modified_base 75: mod_base = OTHER; note = 2'-Omethylcytosine
  misc_feature 1..53: note = RNA
  misc_feature 54: note = DNA
  misc_feature 55..76: note = RNA

SEQ ID NO: 2084 - RNA, 76 nt, synthetic construct; identical to SEQ ID NO: 625
  source 1..76: mol_type = other RNA
  modified_base 1: mod_base = OTHER; note = 2'-Omethylguanosine phosphorothiorate
  modified_base 2: mod_base = OTHER; note = 2'-Omethylguanosine phosphorothiorate
  modified_base 38: mod_base = OTHER; note = 2'-fluoroadenosine
  modified_base 74: mod_base = OTHER; note = Cytosine phosphorothiorate
  modified_base 75: mod_base = OTHER; note = 2'-Omethylcytosine phosphorothiorate
  modified_base 76: mod_base = OTHER; note = 2'-Omethyladenosine

SEQ ID NO: 2085 - RNA, 76 nt, synthetic construct; identical to SEQ ID NO: 625
  source 1..76: mol_type = other RNA
  modified_base 1: mod_base = OTHER; note = 2'-Omethylguanosine phosphorothiorate
  modified_base 2: mod_base = OTHER; note = 2'-Omethylguanosine phosphorothiorate
  modified_base 75: mod_base = OTHER; note = Cytosine phosphorothiorate
  modified_base 76: mod_base = OTHER; note = 2'-Omethyladenosine

SEQ ID NO: 2086 - DNA, 76 bp, synthetic construct; identical to SEQ ID NO: 1924
  source 1..76: mol_type = other DNA
  modified_base 1: mod_base = OTHER; note = 2'-Omethylguanosine phosphorothiorate
  modified_base 2: mod_base = OTHER; note = 2'-Omethylguanosine
  modified_base 18: mod_base = OTHER; note = 2'-fluoroguanosine
  modified_base 46: mod_base = OTHER; note = Guanosine phosphorothiorate
  modified_base 52: mod_base = OTHER; note = Guanosine phosphorothiorate
  modified_base 53: mod_base = OTHER; note = 2'-Omethylguanosine
  modified_base 74: mod_base = OTHER; note = Cytosine phosphorothiorate
  modified_base 75: mod_base = OTHER; note = 2'-Omethylcytosine phosphorothiorate
  modified_base 76: mod_base = OTHER; note = 2'-Omethyladenosine
  misc_feature 1..2: note = RNA
  misc_feature 3: note = DNA
  misc_feature 4..46: note = RNA
  misc_feature 47: note = DNA
  misc_feature 48..76: note = RNA

SEQ ID NO: 2087 - RNA, 76 nt, synthetic construct; identical to SEQ ID NO: 625
  source 1..76: mol_type = other RNA
  modified_base 1: mod_base = OTHER; note = 2'-Omethylguanosine phosphorothiorate
  modified_base 2: mod_base = OTHER; note = 2'-Omethylguanosine phosphorothiorate
  modified_base 21: mod_base = OTHER; note = Adenosine phosphorothiorate
  modified_base 22: mod_base = OTHER; note = 2'-O-(2-Methoxyethyl) guanosine
  modified_base 56: mod_base = OTHER; note = Cytosine phosphorothiorate
  modified_base 57: mod_base = OTHER; note = 2'-Omethylguanosine
  modified_base 74: mod_base = OTHER; note = Cytosine phosphorothiorate
  modified_base 75: mod_base = OTHER; note = 2'-Omethylcytosine phosphorothiorate
  modified_base 76: mod_base = OTHER; note = 2'-Omethyladenosine

SEQ ID NO: 2088 - RNA, 76 nt, synthetic construct; identical to SEQ ID NO: 625
  source 1..76: mol_type = other RNA
  modified_base 1: mod_base = OTHER; note = 2'-Omethylguanosine phosphorothiorate
  modified_base 2: mod_base = OTHER; note = 2'-Omethylguanosine phosphorothiorate
  modified_base 25: mod_base = OTHER; note = 2'-Omethylcytosine
  modified_base 43: mod_base = OTHER; note = Adenosine phosphorothiorate
  modified_base 44: mod_base = OTHER; note = 2'-O-(2-Methoxyethyl) adenosine
  modified_base 74: mod_base = OTHER; note = Cytosine phosphorothiorate
  modified_base 75: mod_base = OTHER; note = 2'-Omethylcytosine phosphorothiorate
  modified_base 76: mod_base = OTHER; note = 2'-Omethyladenosine

SEQ ID NO: 2089 - RNA, 76 nt, synthetic construct; identical to SEQ ID NO: 625
  source 1..76: mol_type = other RNA
  modified_base 1: mod_base = OTHER; note = 2'-Omethylguanosine phosphorothiorate
  modified_base 2: mod_base = OTHER; note = 2'-Omethylguanosine phosphorothiorate
  modified_base 3: mod_base = OTHER; note = Cytosine phosphorothiorate
  modified_base 4: mod_base = OTHER; note = 2'-Omethyluridine
  modified_base 54: mod_base = OTHER; note = 2'-fluorouridine
  modified_base 58: mod_base = OTHER; note = Adenosine phosphorothiorate
  modified_base 74: mod_base = OTHER; note = Cytosine phosphorothiorate
  modified_base 75: mod_base = OTHER; note = 2'-Omethylcytosine phosphorothiorate
  modified_base 76: mod_base = OTHER; note = 2'-Omethyladenosine

SEQ ID NO: 2090 - RNA, 76 nt, synthetic construct; identical to SEQ ID NO: 625
  source 1..76: mol_type = other RNA
  modified_base 1: mod_base = OTHER; note = 2'-Omethylguanosine phosphorothiorate
  modified_base 2: mod_base = OTHER; note = 2'-Omethylguanosine phosphorothiorate
  modified_base 62: mod_base = OTHER; note = 2'-Omethylcytosine
  modified_base 74: mod_base = OTHER; note = Cytosine phosphorothiorate
  modified_base 75: mod_base = OTHER; note = 2'-Omethylcytosine phosphorothiorate
  modified_base 76: mod_base = OTHER; note = 2'-Omethyladenosine

SEQ ID NO: 2091 - RNA, 76 nt, synthetic construct; identical to SEQ ID NO: 625
  source 1..76: mol_type = other RNA
  modified_base 1: mod_base = OTHER; note = 2'-Omethylguanosine phosphorothiorate
  modified_base 2: mod_base = OTHER; note = 2'-Omethylguanosine
  modified_base 16: mod_base = OTHER; note = Uridine phosphorothiorate
  modified_base 17: mod_base = OTHER; note = 2'-O-(2-Methoxyethyl) guanosine
  modified_base 74: mod_base = OTHER; note = Cytosine phosphorothiorate
  modified_base 75: mod_base = OTHER; note = 2'-Omethylcytosine phosphorothiorate
  modified_base 76: mod_base = OTHER; note = 2'-Omethyladenosine

SEQ ID NO: 2092 - RNA, 76 nt, synthetic construct; identical to SEQ ID NO: 625
  source 1..76: mol_type = other RNA
  modified_base 1: mod_base = OTHER; note = 2'-Omethylguanosine phosphorothiorate
  modified_base 2: mod_base = OTHER; note = 2'-Omethylguanosine phosphorothiorate
  modified_base 25: mod_base = OTHER; note = Cytosine phosphorothiorate
  modified_base 59: mod_base = OTHER; note = 2'-O-(2-Methoxyethyl) guanosine
  modified_base 61: mod_base = OTHER; note = Cytosine phosphorothiorate
  modified_base 74: mod_base = OTHER; note = Cytosine phosphorothiorate
  modified_base 75: mod_base = OTHER; note = 2'-Omethylcytosine phosphorothiorate
  modified_base 76: mod_base = OTHER; note = 2'-Omethyladenosine

SEQ ID NO: 2093-2094 - skipped (2 entries)

SEQ ID NO: 2095 - RNA, 76 nt, synthetic construct; identical to SEQ ID NO: 625
  source 1..76: mol_type = other RNA
  modified_base 1: mod_base = OTHER; note = 2'-Omethylguanosine phosphorothiorate
  modified_base 2: mod_base = OTHER; note = 2'-Omethylguanosine phosphorothiorate
  modified_base 20: mod_base = OTHER; note = Uridine phosphorothiorate
  modified_base 21: mod_base = OTHER; note = 2'-fluoroadenosine phosphorothiorate
  modified_base 74: mod_base = OTHER; note = Cytosine phosphorothiorate
  modified_base 75: mod_base = OTHER; note = 2'-Omethylcytosine

SEQ ID NO: 2096 - RNA, 76 nt, synthetic construct; identical to SEQ ID NO: 625
  source 1..76: mol_type = other RNA
  modified_base 1: mod_base = OTHER; note = 2'-Omethylguanosine phosphorothiorate
  modified_base 2: mod_base = OTHER; note = 2'-Omethylguanosine phosphorothiorate
  modified_base 28: mod_base = OTHER; note = Uridine phosphorothiorate
  modified_base 29: mod_base = OTHER; note = 2'-O-(2-Methoxyethyl) guanosine
  modified_base 37: mod_base = OTHER; note = Adenosine phosphorothiorate
  modified_base 38: mod_base = OTHER; note = 2'-fluoroadenosine
  modified_base 45: mod_base = OTHER; note = 2'-fluoroguanosine
  modified_base 74: mod_base = OTHER; note = Cytosine phosphorothiorate
  modified_base 75: mod_base = OTHER; note = 2'-Omethylcytosine phosphorothiorate
  modified_base 76: mod_base = OTHER; note = 2'-Omethyladenosine

SEQ ID NO: 2097 - skipped

SEQ ID NO: 2098 - RNA, 76 nt, synthetic construct; identical to SEQ ID NO: 625
  source 1..76: mol_type = other RNA
  modified_base 1: mod_base = OTHER; note = 2'-Omethylguanosine phosphorothiorate
  modified_base 2: mod_base = OTHER; note = 2'-Omethylguanosine phosphorothiorate
  modified_base 59: mod_base = OTHER; note = 2'-Omethylguanosine
  modified_base 75: mod_base = OTHER; note = Cytosine phosphorothiorate
  modified_base 76: mod_base = OTHER; note = 2'-Omethyladenosine

SEQ ID NO: 2099 - DNA, 76 bp, synthetic construct; identical to SEQ ID NO: 1924
  source 1..76: mol_type = other DNA
  modified_base 1: mod_base = OTHER; note = 2'-Omethylguanosine phosphorothiorate
  modified_base 2: mod_base = OTHER; note = 2'-Omethylguanosine phosphorothiorate
  modified_base 15: mod_base = OTHER; note = Adenosine phosphorothiorate
  modified_base 32: mod_base = OTHER; note = Cytosine phosphorothiorate
  modified_base 43: mod_base = OTHER; note = Adenosine phosphorothiorate
  modified_base 44: mod_base = OTHER; note = 2'-Omethyladenosine
  modified_base 74: mod_base = OTHER; note = Cytosine phosphorothiorate
  modified_base 75: mod_base = OTHER; note = 2'-Omethylcytosine phosphorothiorate
  modified_base 76: mod_base = OTHER; note = 2'-Omethyladenosine
  misc_feature 1..32: note = RNA
  misc_feature 33: note = DNA
  misc_feature 34..76: note = RNA

SEQ ID NO: 2100 - RNA, 76 nt, synthetic construct; identical to SEQ ID NO: 625
  source 1..76: mol_type = other RNA
  modified_base 1: mod_base = OTHER; note = 2'-Omethylguanosine phosphorothiorate
  modified_base 2: mod_base = OTHER; note = 2'-Omethylguanosine phosphorothiorate
  modified_base 19: mod_base = OTHER; note = 2'-Omethyladenosine
  modified_base 51: mod_base = OTHER; note = Guanosine phosphorothiorate
  modified_base 52: mod_base = OTHER; note = 2'-Omethylguanosine
  modified_base 74: mod_base = OTHER; note = Cytosine phosphorothiorate
  modified_base 75: mod_base = OTHER; note = 2'-Omethylcytosine phosphorothiorate
  modified_base 76: mod_base = OTHER; note = 2'-Omethyladenosine

SEQ ID NO: 2101 - RNA, 76 nt, synthetic construct; identical to SEQ ID NO: 625
  source 1..76: mol_type = other RNA
  modified_base 1: mod_base = OTHER; note = 2'-Omethylguanosine phosphorothiorate
  modified_base 2: mod_base = OTHER; note = 2'-Omethylguanosine phosphorothiorate
  modified_base 73: mod_base = OTHER; note = Guanosine phosphorothiorate
  modified_base 74: mod_base = OTHER; note = 2'-fluorocytosine
  modified_base 75: mod_base = OTHER; note = Cytosine phosphorothiorate
  modified_base 76: mod_base = OTHER; note = 2'-Omethyladenosine

SEQ ID NO: 2102 - DNA, 76 bp, synthetic construct; identical to SEQ ID NO: 1924
  source 1..76: mol_type = other DNA
  modified_base 1: mod_base = OTHER; note = 2'-Omethylguanosine phosphorothiorate
  modified_base 2: mod_base = OTHER; note = 2'-Omethylguanosine phosphorothiorate
  modified_base 28: mod_base = OTHER; note = 2'-Omethyluridine
  modified_base 53: mod_base = OTHER; note = Guanosine phosphorothiorate
  modified_base 59: mod_base = OTHER; note = 2'-fluoroguanosine
  modified_base 74: mod_base = OTHER; note = Cytosine phosphorothiorate
  modified_base 75: mod_base = OTHER; note = 2'-Omethylcytosine
  misc_feature 1..53: note = RNA
  misc_feature 54: note = DNA
  misc_feature 55..76: note = RNA

SEQ ID NO: 2103 - RNA, 76 nt, synthetic construct; identical to SEQ ID NO: 625
  source 1..76: mol_type = other RNA
  modified_base 1: mod_base = OTHER; note = 2'-Omethylguanosine phosphorothiorate
  modified_base 2: mod_base = OTHER; note = 2'-Omethylguanosine phosphorothiorate
  modified_base 32: mod_base = OTHER; note = Cytosine phosphorothiorate
  modified_base 33: mod_base = OTHER; note = 2'-Omethyluridine
  modified_base 74: mod_base = OTHER; note = Cytosine phosphorothiorate
  modified_base 75: mod_base = OTHER; note = 2'-Omethylcytosine phosphorothiorate
  modified_base 76: mod_base = OTHER; note = 2'-Omethyladenosine

SEQ ID NO: 2104-2105 - skipped (2 entries)

SEQ ID NO: 2106 - RNA, 76 nt, synthetic construct; identical to SEQ ID NO: 625
  source 1..76: mol_type = other RNA
  modified_base 1: mod_base = OTHER; note = 2'-Omethylguanosine phosphorothiorate
  modified_base 2: mod_base = OTHER; note = 2'-Omethylguanosine
  modified_base 33: mod_base = OTHER; note = Uridine phosphorothiorate
  modified_base 34: mod_base = OTHER; note = 2'-O-(2-Methoxyethyl) thymine
  modified_base 74: mod_base = OTHER; note = Cytosine phosphorothiorate
  modified_base 75: mod_base = OTHER; note = 2'-Omethylcytosine phosphorothiorate
  modified_base 76: mod_base = OTHER; note = 2'-Omethyladenosine

SEQ ID NO: 2107 - RNA, 76 nt, synthetic construct; identical to SEQ ID NO: 625
  source 1..76: mol_type = other RNA
  modified_base 1: mod_base = OTHER; note = 2'-Omethylguanosine phosphorothiorate
  modified_base 2: mod_base = OTHER; note = 2'-Omethylguanosine
  modified_base 4: mod_base = OTHER; note = 2'-O-(2-Methoxyethyl) thymine
  modified_base 25: mod_base = OTHER; note = 2'-Omethylcytosine
  modified_base 54: mod_base = OTHER; note = 2'-Omethyluridine
  modified_base 74: mod_base = OTHER; note = Cytosine phosphorothiorate
  modified_base 75: mod_base = OTHER; note = 2'-Omethylcytosine phosphorothiorate
  modified_base 76: mod_base = OTHER; note = 2'-Omethyladenosine

SEQ ID NO: 2108 - DNA, 76 bp, synthetic construct; identical to SEQ ID NO: 1924
  source 1..76: mol_type = other DNA
  modified_base 1: mod_base = OTHER; note = 2'-Omethylguanosine phosphorothiorate
  modified_base 2: mod_base = OTHER; note = 2'-Omethylguanosine phosphorothiorate
  modified_base 15: mod_base = OTHER; note = Adenosine phosphorothiorate
  modified_base 66: mod_base = OTHER; note = Cytosine phosphorothiorate
  modified_base 67: mod_base = OTHER; note = 2'-Omethylguanosine
  modified_base 74: mod_base = OTHER; note = Cytosine phosphorothiorate
  modified_base 75: mod_base = OTHER; note = 2'-Omethylcytosine phosphorothiorate
  modified_base 76: mod_base = OTHER; note = 2'-Omethyladenosine
  misc_feature 1..15: note = RNA
  misc_feature 16: note = DNA
  misc_feature 17..76: note = RNA

SEQ ID NO: 2109 - RNA, 76 nt, synthetic construct; identical to SEQ ID NO: 625
  source 1..76: mol_type = other RNA
  modified_base 1: mod_base = OTHER; note = 2'-Omethylguanosine phosphorothiorate
  modified_base 2: mod_base = OTHER; note = 2'-Omethylguanosine phosphorothiorate
  modified_base 3: mod_base = OTHER; note = 2'-Omethylcytosine
  modified_base 74: mod_base = OTHER; note = Cytosine phosphorothiorate
  modified_base 75: mod_base = OTHER; note = 2'-Omethylcytosine

SEQ ID NO: 2110 - skipped

SEQ ID NO: 2111 - RNA, 76 nt, synthetic construct; identical to SEQ ID NO: 625
  source 1..76: mol_type = other RNA
  modified_base 1: mod_base = OTHER; note = 2'-Omethylguanosine phosphorothiorate
  modified_base 2: mod_base = OTHER; note = 2'-Omethylguanosine phosphorothiorate
  modified_base 14: mod_base = OTHER; note = Adenosine phosphorothiorate
  modified_base 20: mod_base = OTHER; note = Uridine phosphorothiorate
  modified_base 21: mod_base = OTHER; note = 2'-fluoroadenosine
  modified_base 74: mod_base = OTHER; note = Cytosine phosphorothiorate
  modified_base 75: mod_base = OTHER; note = 2'-Omethylcytosine phosphorothiorate
  modified_base 76: mod_base = OTHER; note = 2'-Omethyladenosine

SEQ ID NO: 2112 - skipped

SEQ ID NO: 2113 - DNA, 76 bp, synthetic construct; identical to SEQ ID NO: 1924
  source 1..76: mol_type = other DNA
  modified_base 1: mod_base = OTHER; note = 2'-Omethylguanosine phosphorothiorate
  modified_base 2: mod_base = OTHER; note = 2'-Omethylguanosine phosphorothiorate
  modified_base 74: mod_base = OTHER; note = Cytosine phosphorothiorate
  modified_base 75: mod_base = OTHER; note = 2'-Omethylcytosine
  misc_feature 1..64: note = RNA
  misc_feature 65: note = DNA
  misc_feature 66..76: note = RNA

SEQ ID NO: 2114 - RNA, 76 nt, synthetic construct; identical to SEQ ID NO: 625
  source 1..76: mol_type = other RNA
  modified_base 1: mod_base = OTHER; note = 2'-Omethylguanosine phosphorothiorate
  modified_base 2: mod_base = OTHER; note = 2'-Omethylguanosine phosphorothiorate
  modified_base 67: mod_base = OTHER; note = 2'-fluoroguanosine
  modified_base 75: mod_base = OTHER; note = 2'-Omethylcytosine phosphorothiorate
  modified_base 76: mod_base = OTHER; note = 2'-Omethyladenosine

SEQ ID NO: 2115 - RNA, 76 nt, synthetic construct; identical to SEQ ID NO: 625
  source 1..76: mol_type = other RNA
  modified_base 1: mod_base = OTHER; note = 2'-Omethylguanosine phosphorothiorate
  modified_base 2: mod_base = OTHER; note = 2'-Omethylguanosine phosphorothiorate
  modified_base 4: mod_base = OTHER; note = 2'-fluorouridine
  modified_base 74: mod_base = OTHER; note = Cytosine phosphorothiorate
  modified_base 75: mod_base = OTHER; note = 2'-Omethylcytosine phosphorothiorate
  modified_base 76: mod_base = OTHER; note = 2'-Omethyladenosine

SEQ ID NO: 2116 - RNA, 76 nt, synthetic construct; identical to SEQ ID NO: 625
  source 1..76: mol_type = other RNA
  modified_base 1: mod_base = OTHER; note = 2'-Omethylguanosine phosphorothiorate
  modified_base 2: mod_base = OTHER; note = 2'-Omethylguanosine phosphorothiorate
  modified_base 21: mod_base = OTHER; note = Adenosine phosphorothiorate
  modified_base 28: mod_base = OTHER; note = 2'-O-(2-Methoxyethyl) thymine
  modified_base 37: mod_base = OTHER; note = Adenosine phosphorothiorate
  modified_base 50: mod_base = OTHER; note = 2'-fluorocytosine
  modified_base 61: mod_base = OTHER; note = 2'-fluorocytosine
  modified_base 63: mod_base = OTHER; note = Cytosine phosphorothiorate
  modified_base 74: mod_base = OTHER; note = Cytosine phosphorothiorate
  modified_base 75: mod_base = OTHER; note = 2'-Omethylcytosine

SEQ ID NO: 2117 - RNA, 76 nt, synthetic construct; identical to SEQ ID NO: 625
  source 1..76: mol_type = other RNA
  modified_base 1: mod_base = OTHER; note = 2'-Omethylguanosine phosphorothiorate
  modified_base 2: mod_base = OTHER; note = 2'-Omethylguanosine
  modified_base 75: mod_base = OTHER; note = Cytosine phosphorothiorate
  modified_base 76: mod_base = OTHER; note = 2'-Omethyladenosine

SEQ ID NO: 2118 - RNA, 76 nt, synthetic construct; identical to SEQ ID NO: 625
  source 1..76: mol_type = other RNA
  modified_base 1: mod_base = OTHER; note = 2'-Omethylguanosine phosphorothiorate
  modified_base 2: mod_base = OTHER; note = 2'-Omethylguanosine phosphorothiorate
  modified_base 19: mod_base = OTHER; note = Adenosine phosphorothiorate
  modified_base 39: mod_base = OTHER; note = 2'-fluorouridine
  modified_base 49: mod_base = OTHER; note = 2'-fluorocytosine
  modified_base 52: mod_base = OTHER; note = Guanosine phosphorothiorate
  modified_base 74: mod_base = OTHER; note = Cytosine phosphorothiorate
  modified_base 75: mod_base = OTHER; note = 2'-Omethylcytosine phosphorothiorate
  modified_base 76: mod_base = OTHER; note = 2'-Omethyladenosine

SEQ ID NO: 2119 - RNA, 76 nt, synthetic construct; identical to SEQ ID NO: 625
  source 1..76: mol_type = other RNA
  modified_base 1: mod_base = OTHER; note = 2'-Omethylguanosine phosphorothiorate
  modified_base 2: mod_base = OTHER; note = 2'-Omethylguanosine
  modified_base 74: mod_base = OTHER; note = Cytosine phosphorothiorate
  modified_base 75: mod_base = OTHER; note = 2'-fluorocytosine phosphorothiorate
  modified_base 76: mod_base = OTHER; note = 2'-Omethyladenosine

SEQ ID NO: 2120 - RNA, 76 nt, synthetic construct; identical to SEQ ID NO: 625
  source 1..76: mol_type = other RNA
  modified_base 1: mod_base = OTHER; note = 2'-Omethylguanosine phosphorothiorate
  modified_base 2: mod_base = OTHER; note = 2'-Omethylguanosine phosphorothiorate
  modified_base 9: mod_base = OTHER; note = Guanosine phosphorothiorate
  modified_base 10: mod_base = OTHER; note = 2'-O-(2-Methoxyethyl) guanosine
  modified_base 62: mod_base = OTHER; note = 2'-Omethylcytosine
  modified_base 74: mod_base = OTHER; note = Cytosine phosphorothiorate
  modified_base 75: mod_base = OTHER; note = 2'-Omethylcytosine phosphorothiorate
  modified_base 76: mod_base = OTHER; note = 2'-Omethyladenosine

SEQ ID NO: 2121 - DNA, 76 bp, synthetic construct; identical to SEQ ID NO: 1924
  source 1..76: mol_type = other DNA
  modified_base 1: mod_base = OTHER; note = 2'-Omethylguanosine phosphorothiorate
  modified_base 2: mod_base = OTHER; note = 2'-Omethylguanosine
  modified_base 42: mod_base = OTHER; note = Adenosine phosphorothiorate
  modified_base 74: mod_base = OTHER; note = Cytosine phosphorothiorate
  modified_base 75: mod_base = OTHER; note = 2'-Omethylcytosine phosphorothiorate
  modified_base 76: mod_base = OTHER; note = 2'-Omethyladenosine
  misc_feature 1..42: note = RNA
  misc_feature 43: note = DNA
  misc_feature 44..76: note = RNA

SEQ ID NO: 2122 - DNA, 76 bp, synthetic construct; identical to SEQ ID NO: 1924
  source 1..76: mol_type = other DNA
  modified_base 1: mod_base = OTHER; note = 2'-Omethylguanosine phosphorothiorate
  modified_base 2: mod_base = OTHER; note = 2'-Omethylguanosine
  modified_base 26: mod_base = OTHER; note = Adenosine phosphorothiorate
  modified_base 74: mod_base = OTHER; note = Cytosine phosphorothiorate
  modified_base 75: mod_base = OTHER; note = 2'-Omethylcytosine
  misc_feature 1..26: note = RNA
  misc_feature 27: note = DNA
  misc_feature 28..76: note = RNA

SEQ ID NO: 2123 - RNA, 76 nt, synthetic construct; identical to SEQ ID NO: 625
  source 1..76: mol_type = other RNA
  modified_base 1: mod_base = OTHER; note = 2'-Omethylguanosine phosphorothiorate
  modified_base 2: mod_base = OTHER; note = 2'-Omethylguanosine phosphorothiorate
  modified_base 25: mod_base = OTHER; note = Cytosine phosphorothiorate
  modified_base 26: mod_base = OTHER; note = 2'-fluoroadenosine
  modified_base 42: mod_base = OTHER; note = Adenosine phosphorothiorate
  modified_base 43: mod_base = OTHER; note = 2'-Omethyladenosine
  modified_base 74: mod_base = OTHER; note = Cytosine phosphorothiorate
  modified_base 75: mod_base = OTHER; note = 2'-Omethylcytosine phosphorothiorate
  modified_base 76: mod_base = OTHER; note = 2'-Omethyladenosine

SEQ ID NO: 2124 - DNA, 76 bp, synthetic construct; identical to SEQ ID NO: 1924
  source 1..76: mol_type = other DNA
  modified_base 1: mod_base = OTHER; note = 2'-Omethylguanosine phosphorothiorate
  modified_base 2: mod_base = OTHER; note = 2'-Omethylguanosine phosphorothiorate
  modified_base 25: mod_base = OTHER; note = Cytosine phosphorothiorate
  modified_base 65: mod_base = OTHER; note = Guanosine phosphorothiorate
  modified_base 66: mod_base = OTHER; note = 2'-Omethylcytosine
  modified_base 74: mod_base = OTHER; note = Cytosine phosphorothiorate
  modified_base 75: mod_base = OTHER; note = 2'-Omethylcytosine phosphorothiorate
  modified_base 76: mod_base = OTHER; note = 2'-Omethyladenosine
  misc_feature 1..3: note = RNA
  misc_feature 4: note = DNA
  misc_feature 5..25: note = RNA
  misc_feature 26: note = DNA
  misc_feature 27..76: note = RNA

SEQ ID NO: 2125 - RNA, 76 nt, synthetic construct; identical to SEQ ID NO: 625
  source 1..76: mol_type = other RNA
  modified_base 1: mod_base = OTHER; note = 2'-Omethylguanosine phosphorothiorate
  modified_base 2: mod_base = OTHER; note = 2'-Omethylguanosine phosphorothiorate
  modified_base 10: mod_base = OTHER; note = 2'-Omethylguanosine
  modified_base 23: mod_base = OTHER; note = Cytosine phosphorothiorate
  modified_base 24: mod_base = OTHER; note = 2'-O-(2-Methoxyethyl) guanosine
  modified_base 37: mod_base = OTHER; note = Adenosine phosphorothiorate
  modified_base 38: mod_base = OTHER; note = 2'-O-(2-Methoxyethyl) adenosine
  modified_base 44: mod_base = OTHER; note = 2'-fluoroadenosine
  modified_base 74: mod_base = OTHER; note = Cytosine phosphorothiorate
  modified_base 75: mod_base = OTHER; note = 2'-Omethylcytosine phosphorothiorate
  modified_base 76: mod_base = OTHER; note = 2'-Omethyladenosine

SEQ ID NO: 2126 - RNA, 76 nt, synthetic construct; identical to SEQ ID NO: 625
  source 1..76: mol_type = other RNA
  modified_base 1: mod_base = OTHER; note = 2'-Omethylguanosine phosphorothiorate
  modified_base 2: mod_base = OTHER; note = 2'-Omethylguanosine phosphorothiorate
  modified_base 15: mod_base = OTHER; note = Adenosine phosphorothiorate
  modified_base 16: mod_base = OTHER; note = 2'-Omethyluridine
  modified_base 30: mod_base = OTHER; note = Guanosine phosphorothiorate
  modified_base 31: mod_base = OTHER; note = 2'-O-(2-Methoxyethyl) adenosine
  modified_base 74: mod_base = OTHER; note = Cytosine phosphorothiorate
  modified_base 75: mod_base = OTHER; note = 2'-Omethylcytosine phosphorothiorate
  modified_base 76: mod_base = OTHER; note = 2'-fluoroadenosine

SEQ ID NO: 2127 - DNA, 76 bp, synthetic construct; identical to SEQ ID NO: 1924
  source 1..76: mol_type = other DNA
  modified_base 1: mod_base = OTHER; note = 2'-Omethylguanosine phosphorothiorate
  modified_base 2: mod_base = OTHER; note = 2'-Omethylguanosine phosphorothiorate
  modified_base 17: mod_base = OTHER; note = Guanosine phosphorothiorate
  modified_base 45: mod_base = OTHER; note = Guanosine phosphorothiorate
  modified_base 74: mod_base = OTHER; note = Cytosine phosphorothiorate
  modified_base 75: mod_base = OTHER; note = 2'-Omethylcytosine phosphorothiorate
  modified_base 76: mod_base = OTHER; note = 2'-Omethyladenosine
  misc_feature 1..17: note = RNA
  misc_feature 18: note = DNA
  misc_feature 19..20: note = RNA
  misc_feature 21: note = DNA
  misc_feature 22..76: note = RNA

SEQ ID NO: 2128 - RNA, 76 nt, synthetic construct; identical to SEQ ID NO: 625
  source 1..76: mol_type = other RNA
  modified_base 1: mod_base = OTHER; note = 2'-Omethylguanosine phosphorothiorate
  modified_base 2: mod_base = OTHER; note = 2'-Omethylguanosine
  modified_base 13: mod_base = OTHER; note = Cytosine phosphorothiorate
  modified_base 14: mod_base = OTHER; note = 2'-Omethyladenosine
  modified_base 55: mod_base = OTHER; note = Uridine phosphorothiorate
  modified_base 74: mod_base = OTHER; note = Cytosine phosphorothiorate
  modified_base 75: mod_base = OTHER; note = 2'-Omethylcytosine

SEQ ID NO: 2129 - skipped

SEQ ID NO: 2130 - RNA, 76 nt, synthetic construct; identical to SEQ ID NO: 625
  source 1..76: mol_type = other RNA
  modified_base 1: mod_base = OTHER; note = 2'-Omethylguanosine phosphorothiorate
  modified_base 2: mod_base = OTHER; note = 2'-Omethylguanosine
  modified_base 42: mod_base = OTHER; note = 2'-fluoroadenosine
  modified_base 45: mod_base = OTHER; note = Guanosine phosphorothiorate
  modified_base 46: mod_base = OTHER; note = 2'-fluoroguanosine
  modified_base 52: mod_base = OTHER; note = Guanosine phosphorothiorate
  modified_base 74: mod_base = OTHER; note = Cytosine phosphorothiorate
  modified_base 75: mod_base = OTHER; note = 2'-Omethylcytosine

SEQ ID NO: 2131 - skipped

SEQ ID NO: 2132 - RNA, 76 nt, synthetic construct; identical to SEQ ID NO: 625
  source 1..76: mol_type = other RNA
  modified_base 1: mod_base = OTHER; note = 2'-Omethylguanosine phosphorothiorate
  modified_base 2: mod_base = OTHER; note = 2'-Omethylguanosine
  modified_base 46: mod_base = OTHER; note = 2'-fluoroguanosine
  modified_base 59: mod_base = OTHER; note = 2'-Omethylguanosine
  modified_base 75: mod_base = OTHER; note = Cytosine phosphorothiorate
  modified_base 76: mod_base = OTHER; note = 2'-Omethyladenosine

SEQ ID NO: 2133 - RNA, 76 nt, synthetic construct; identical to SEQ ID NO: 625
  source 1..76: mol_type = other RNA
  modified_base 1: mod_base = OTHER; note = 2'-Omethylguanosine phosphorothiorate
  modified_base 2: mod_base = OTHER; note = 2'-Omethylguanosine phosphorothiorate
  modified_base 47: mod_base = OTHER; note = 2'-O-(2-Methoxyethyl) thymine
  modified_base 74: mod_base = OTHER; note = Cytosine phosphorothiorate
  modified_base 75: mod_base = OTHER; note = 2'-Omethylcytosine phosphorothiorate
  modified_base 76: mod_base = OTHER; note = 2'-Omethyladenosine

SEQ ID NO: 2134 - RNA, 76 nt, synthetic construct; identical to SEQ ID NO: 625
  source 1..76: mol_type = other RNA
  modified_base 1: mod_base = OTHER; note = 2'-Omethylguanosine phosphorothiorate
  modified_base 2: mod_base = OTHER; note = 2'-Omethylguanosine

SEQ ID NO: 2135 - DNA, 76 bp, synthetic construct; identical to SEQ ID NO: 1924
  source 1..76: mol_type = other DNA
  modified_base 1: mod_base = OTHER; note = 2'-Omethylguanosine phosphorothiorate
  modified_base 2: mod_base = OTHER; note = 2'-Omethylguanosine phosphorothiorate
  modified_base 13: mod_base = OTHER; note = Cytosine phosphorothiorate
  modified_base 21: mod_base = OTHER; note = Adenosine phosphorothiorate
  modified_base 40: mod_base = OTHER; note = Uridine phosphorothiorate
  modified_base 41: mod_base = OTHER; note = 2'-Omethylcytosine
  modified_base 74: mod_base = OTHER; note = Cytosine phosphorothiorate
  modified_base 75: mod_base = OTHER; note = 2'-Omethylcytosine phosphorothiorate
  modified_base 76: mod_base = OTHER; note = 2'-Omethyladenosine
  misc_feature 1..13: note = RNA
  misc_feature 14: note = DNA
  misc_feature 15..76: note = RNA

SEQ ID NO: 2136 - DNA, 76 bp, synthetic construct; identical to SEQ ID NO: 1924
  source 1..76: mol_type = other DNA
  modified_base 1: mod_base = OTHER; note = 2'-Omethylguanosine phosphorothiorate
  modified_base 2: mod_base = OTHER; note = 2'-Omethylguanosine phosphorothiorate
  modified_base 4: mod_base = OTHER; note = 2'-Omethyluridine
  modified_base 48: mod_base = OTHER; note = Uridine phosphorothiorate
  modified_base 74: mod_base = OTHER; note = Cytosine phosphorothiorate
  modified_base 75: mod_base = OTHER; note = 2'-Omethylcytosine
  misc_feature 1..21: note = RNA
  misc_feature 22: note = DNA
  misc_feature 23..48: note = RNA
  misc_feature 49: note = DNA
  misc_feature 50..76: note = RNA

SEQ ID NO: 2137 - DNA, 76 bp, synthetic construct; identical to SEQ ID NO: 1924
  source 1..76: mol_type = other DNA
  modified_base 1: mod_base = OTHER; note = 2'-Omethylguanosine phosphorothiorate
  modified_base 2: mod_base = OTHER; note = 2'-Omethylguanosine phosphorothiorate
  modified_base 12: mod_base = OTHER; note = Guanosine phosphorothiorate
  modified_base 67: mod_base = OTHER; note = 2'-Omethylguanosine
  modified_base 74: mod_base = OTHER; note = Cytosine phosphorothiorate
  modified_base 75: mod_base = OTHER; note = 2'-Omethylcytosine phosphorothiorate
  modified_base 76: mod_base = OTHER; note = 2'-Omethyladenosine
  misc_feature 1..12: note = RNA
  misc_feature 13: note = DNA
  misc_feature 14..76: note = RNA

SEQ ID NO: 2138 - RNA, 76 nt, synthetic construct; identical to SEQ ID NO: 625
  source 1..76: mol_type = other RNA
  modified_base 1: mod_base = OTHER; note = 2'-Omethylguanosine phosphorothiorate
  modified_base 2: mod_base = OTHER; note = 2'-Omethylguanosine phosphorothiorate
  modified_base 14: mod_base = OTHER; note = 2'-O-(2-Methoxyethyl) adenosine
  modified_base 31: mod_base = OTHER; note = 2'-Omethyladenosine
  modified_base 74: mod_base = OTHER; note = Cytosine phosphorothiorate
  modified_base 75: mod_base = OTHER; note = 2'-Omethylcytosine

SEQ ID NO: 2139 - DNA, 76 bp, synthetic construct; identical to SEQ ID NO: 1924
  source 1..76: mol_type = other DNA
  modified_base 1: mod_base = OTHER; note = 2'-Omethylguanosine phosphorothiorate
  modified_base 2: mod_base = OTHER; note = 2'-Omethylguanosine phosphorothiorate
  modified_base 11: mod_base = OTHER; note = 2'-fluorocytosine
  modified_base 26: mod_base = OTHER; note = 2'-fluoroadenosine
  modified_base 74: mod_base = OTHER; note = Cytosine phosphorothiorate
  modified_base 75: mod_base = OTHER; note = 2'-Omethylcytosine phosphorothiorate
  misc_feature 1..75: note = RNA
  misc_feature 76: note = DNA

SEQ ID NO: 2140 - DNA, 76 bp, synthetic construct; identical to SEQ ID NO: 1924
  source 1..76: mol_type = other DNA
  modified_base 1: mod_base = OTHER; note = 2'-Omethylguanosine phosphorothiorate
  modified_base 2: mod_base = OTHER; note = 2'-Omethylguanosine phosphorothiorate
  modified_base 45: mod_base = OTHER; note = 2'-Omethylguanosine
  modified_base 65: mod_base = OTHER; note = Guanosine phosphorothiorate
  modified_base 74: mod_base = OTHER; note = Cytosine phosphorothiorate
  modified_base 75: mod_base = OTHER; note = 2'-Omethylcytosine
  misc_feature 1..65: note = RNA
  misc_feature 66: note = DNA
  misc_feature 67..76: note = RNA

SEQ ID NO: 2141 - RNA, 76 nt, synthetic construct; identical to SEQ ID NO: 625
  source 1..76: mol_type = other RNA
  modified_base 1: mod_base = OTHER; note = 2'-Omethylguanosine phosphorothiorate
  modified_base 2: mod_base = OTHER; note = 2'-Omethylguanosine
  modified_base 26: mod_base = OTHER; note = Adenosine phosphorothiorate
  modified_base 27: mod_base = OTHER; note = 2'-O-(2-Methoxyethyl) thymine
  modified_base 51: mod_base = OTHER; note = Guanosine phosphorothiorate
  modified_base 52: mod_base = OTHER; note = 2'-fluoroguanosine
  modified_base 59: mod_base = OTHER; note = 2'-O-(2-Methoxyethyl) guanosine
  modified_base 74: mod_base = OTHER; note = Cytosine phosphorothiorate
  modified_base 75: mod_base = OTHER; note = 2'-Omethylcytosine

SEQ ID NO: 2142 - RNA, 76 nt, synthetic construct; identical to SEQ ID NO: 625
  source 1..76: mol_type = other RNA
  modified_base 1: mod_base = OTHER; note = 2'-Omethylguanosine phosphorothiorate
  modified_base 2: mod_base = OTHER; note = 2'-Omethylguanosine phosphorothiorate
  modified_base 52: mod_base = OTHER; note = Guanosine phosphorothiorate
  modified_base 53: mod_base = OTHER; note = 2'-Omethylguanosine
  modified_base 61: mod_base = OTHER; note = Cytosine phosphorothiorate
  modified_base 74: mod_base = OTHER; note = Cytosine phosphorothiorate
  modified_base 75: mod_base = OTHER; note = 2'-Omethylcytosine

SEQ ID NO: 2143 - RNA, 76 nt, synthetic construct; identical to SEQ ID NO: 625
  source 1..76: mol_type = other RNA
  modified_base 1: mod_base = OTHER; note = 2'-Omethylguanosine phosphorothiorate
  modified_base 2: mod_base = OTHER; note = 2'-Omethylguanosine phosphorothiorate
  modified_base 24: mod_base = OTHER; note = 2'-Omethylguanosine
  modified_base 38: mod_base = OTHER; note = Adenosine phosphorothiorate
  modified_base 44: mod_base = OTHER; note = 2'-fluoroadenosine phosphorothiorate
  modified_base 45: mod_base = OTHER; note = 2'-fluoroguanosine
  modified_base 56: mod_base = OTHER; note = Cytosine phosphorothiorate
  modified_base 57: mod_base = OTHER; note = 2'-Omethylguanosine
  modified_base 61: mod_base = OTHER; note = 2'-fluorocytosine
  modified_base 74: mod_base = OTHER; note = Cytosine phosphorothiorate
  modified_base 75: mod_base = OTHER; note = 2'-Omethylcytosine

SEQ ID NO: 2144 - skipped

SEQ ID NO: 2145 - DNA, 76 bp, synthetic construct; identical to SEQ ID NO: 1924
  source 1..76: mol_type = other DNA
  modified_base 1: mod_base = OTHER; note = 2'-Omethylguanosine phosphorothiorate
  modified_base 2: mod_base = OTHER; note = 2'-Omethylguanosine phosphorothiorate
  modified_base 11: mod_base = OTHER; note = Cytosine phosphorothiorate
  modified_base 12: mod_base = OTHER; note = 2'-O-(2-Methoxyethyl) guanosine phosphorothiorate
  modified_base 62: mod_base = OTHER; note = 2'-fluorocytosine phosphorothiorate
  modified_base 74: mod_base = OTHER; note = Cytosine phosphorothiorate
  modified_base 75: mod_base = OTHER; note = 2'-Omethylcytosine phosphorothiorate
  modified_base 76: mod_base = OTHER; note = 2'-Omethyladenosine
  misc_feature 1..12: note = RNA
  misc_feature 13: note = DNA
  misc_feature 14..76: note = RNA

SEQ ID NO: 2146 - skipped

SEQ ID NO: 2147 - RNA, 76 nt, synthetic construct; identical to SEQ ID NO: 625
  source 1..76: mol_type = other RNA
  modified_base 1: mod_base = OTHER; note = 2'-Omethylguanosine phosphorothiorate
  modified_base 2: mod_base = OTHER; note = 2'-Omethylguanosine phosphorothiorate
  modified_base 32: mod_base = OTHER; note = Cytosine phosphorothiorate
  modified_base 33: mod_base = OTHER; note = 2'-Omethyluridine
  modified_base 54: mod_base = OTHER; note = 2'-O-(2-Methoxyethyl) thymine
  modified_base 74: mod_base = OTHER; note = Cytosine phosphorothiorate
  modified_base 75: mod_base = OTHER; note = 2'-Omethylcytosine phosphorothiorate
  modified_base 76: mod_base = OTHER; note = 2'-Omethyladenosine

SEQ ID NO: 2148 - RNA, 76 nt, synthetic construct; identical to SEQ ID NO: 625
  source 1..76: mol_type = other RNA
  modified_base 1: mod_base = OTHER; note = 2'-Omethylguanosine phosphorothiorate
  modified_base 2: mod_base = OTHER; note = 2'-Omethylguanosine phosphorothiorate
  modified_base 21: mod_base = OTHER; note = Adenosine phosphorothiorate
  modified_base 22: mod_base = OTHER; note = 2'-fluoroguanosine
  modified_base 66: mod_base = OTHER; note = 2'-fluorocytosine phosphorothiorate
  modified_base 67: mod_base = OTHER; note = 2'-O-(2-Methoxyethyl) guanosine
  modified_base 74: mod_base = OTHER; note = Cytosine phosphorothiorate
  modified_base 75: mod_base = OTHER; note = 2'-Omethylcytosine phosphorothiorate
  modified_base 76: mod_base = OTHER; note = 2'-Omethyladenosine

SEQ ID NO: 2149 - DNA, 76 bp, synthetic construct; identical to SEQ ID NO: 1924
  source 1..76: mol_type = other DNA
  modified_base 1: mod_base = OTHER; note = 2'-Omethylguanosine phosphorothiorate
  modified_base 2: mod_base = OTHER; note = 2'-Omethylguanosine
  modified_base 50: mod_base = OTHER; note = 2'-fluorocytosine
  misc_feature 1..75: note = RNA
  misc_feature 76: note = DNA

SEQ ID NO: 2150 - skipped

SEQ ID NO: 2151 - RNA, 76 nt, synthetic construct; identical to SEQ ID NO: 625
  source 1..76: mol_type = other RNA
  modified_base 1: mod_base = OTHER; note = 2'-Omethylguanosine phosphorothiorate
  modified_base 2: mod_base = OTHER; note = 2'-Omethylguanosine phosphorothiorate
  modified_base 9: mod_base = OTHER; note = Guanosine phosphorothiorate
  modified_base 21: mod_base = OTHER; note = Adenosine phosphorothiorate
  modified_base 25: mod_base = OTHER; note = Cytosine phosphorothiorate
  modified_base 26: mod_base = OTHER; note = 2'-fluoroadenosine
  modified_base 38: mod_base = OTHER; note = Adenosine phosphorothiorate
  modified_base 39: mod_base = OTHER; note = 2'-O-(2-Methoxyethyl) thymine
  modified_base 74: mod_base = OTHER; note = Cytosine phosphorothiorate
  modified_base 75: mod_base = OTHER; note = 2'-Omethylcytosine phosphorothiorate
  modified_base 76: mod_base = OTHER; note = 2'-O-(2-Methoxyethyl) adenosine

SEQ ID NO: 2152 - DNA, 76 bp, synthetic construct; identical to SEQ ID NO: 1924
  source 1..76: mol_type = other DNA
  modified_base 1: mod_base = OTHER; note = 2'-Omethylguanosine phosphorothiorate
  modified_base 2: mod_base = OTHER; note = 2'-Omethylguanosine phosphorothiorate
  modified_base 13: mod_base = OTHER; note = Cytosine phosphorothiorate
  modified_base 14: mod_base = OTHER; note = 2'-Omethyladenosine phosphorothiorate
  modified_base 27: mod_base = OTHER; note = Uridine phosphorothiorate
  modified_base 45: mod_base = OTHER; note = Guanosine phosphorothiorate
  modified_base 74: mod_base = OTHER; note = Cytosine phosphorothiorate
  modified_base 75: mod_base = OTHER; note = 2'-Omethylcytosine phosphorothiorate
  modified_base 76: mod_base = OTHER; note = 2'-Omethyladenosine
  misc_feature 1..24: note = RNA
  misc_feature 25: note = DNA
  misc_feature 26..76: note = RNA

SEQ ID NO: 2153 - DNA, 76 bp, synthetic construct; identical to SEQ ID NO: 1924
  source 1..76: mol_type = other DNA
  modified_base 1: mod_base = OTHER; note = 2'-Omethylguanosine phosphorothiorate
  modified_base 2: mod_base = OTHER; note = 2'-Omethylguanosine
  modified_base 17: mod_base = OTHER; note = Guanosine phosphorothiorate
  modified_base 22: mod_base = OTHER; note = Guanosine phosphorothiorate
  modified_base 23: mod_base = OTHER; note = 2'-fluorocytosine
  modified_base 43: mod_base = OTHER; note = Adenosine phosphorothiorate
  modified_base 44: mod_base = OTHER; note = 2'-fluoroadenosine
  modified_base 67: mod_base = OTHER; note = 2'-fluoroguanosine
  modified_base 74: mod_base = OTHER; note = Cytosine phosphorothiorate
  modified_base 75: mod_base = OTHER; note = 2'-Omethylcytosine phosphorothiorate
  modified_base 76: mod_base = OTHER; note = 2'-Omethyladenosine
  misc_feature 1..17: note = RNA
  misc_feature 18: note = DNA
  misc_feature 19..76: note = RNA

SEQ ID NO: 2154 - DNA, 76 bp, synthetic construct; identical to SEQ ID NO: 1924
  source 1..76: mol_type = other DNA
  modified_base 1: mod_base = OTHER; note = 2'-Omethylguanosine phosphorothiorate
  modified_base 2: mod_base = OTHER; note = 2'-Omethylguanosine phosphorothiorate
  modified_base 38: mod_base = OTHER; note = Adenosine phosphorothiorate
  modified_base 48: mod_base = OTHER; note = Uridine phosphorothiorate
  modified_base 58: mod_base = OTHER; note = Adenosine phosphorothiorate
  modified_base 59: mod_base = OTHER; note = 2'-fluoroguanosine
  modified_base 65: mod_base = OTHER; note = 2'-Omethylguanosine
  modified_base 74: mod_base = OTHER; note = Cytosine phosphorothiorate
  modified_base 75: mod_base = OTHER; note = 2'-Omethylcytosine phosphorothiorate
  modified_base 76: mod_base = OTHER; note = 2'-Omethyladenosine
  misc_feature 1..26: note = RNA
  misc_feature 27: note = DNA
  misc_feature 28..48: note = RNA
  misc_feature 49: note = DNA
  misc_feature 50..76: note = RNA

SEQ ID NO: 2155 - RNA, 76 nt, synthetic construct; identical to SEQ ID NO: 625
  source 1..76: mol_type = other RNA
  modified_base 1: mod_base = OTHER; note = 2'-Omethylguanosine phosphorothiorate
  modified_base 2: mod_base = OTHER; note = 2'-Omethylguanosine phosphorothiorate
  modified_base 45: mod_base = OTHER; note = 2'-fluoroguanosine
  modified_base 57: mod_base = OTHER; note = 2'-fluoroguanosine
  modified_base 68: mod_base = OTHER; note = 2'-fluoroguanosine
  modified_base 74: mod_base = OTHER; note = Cytosine phosphorothiorate
  modified_base 75: mod_base = OTHER; note = 2'-Omethylcytosine phosphorothiorate
  modified_base 76: mod_base = OTHER; note = 2'-Omethyladenosine

SEQ ID NO: 2156 - skipped

SEQ ID NO: 2157 - RNA, 76 nt, synthetic construct; identical to SEQ ID NO: 625
  source 1..76: mol_type = other RNA
  modified_base 1: mod_base = OTHER; note = 2'-Omethylguanosine phosphorothiorate
  modified_base 2: mod_base = OTHER; note = 2'-Omethylguanosine phosphorothiorate
  modified_base 33: mod_base = OTHER; note = 2'-fluorouridine
  modified_base 74: mod_base = OTHER; note = Cytosine phosphorothiorate
  modified_base 75: mod_base = OTHER; note = 2'-Omethylcytosine phosphorothiorate
  modified_base 76: mod_base = OTHER; note = 2'-Omethyladenosine

SEQ ID NO: 2158 - RNA, 76 nt, synthetic construct; identical to SEQ ID NO: 625
  source 1..76: mol_type = other RNA
  modified_base 1: mod_base = OTHER; note = 2'-Omethylguanosine phosphorothiorate
  modified_base 2: mod_base = OTHER; note = 2'-Omethylguanosine
  modified_base 14: mod_base = OTHER; note = 2'-fluoroadenosine
  modified_base 20: mod_base = OTHER; note = 2'-fluorouridine
  modified_base 26: mod_base = OTHER; note = Adenosine phosphorothiorate
  modified_base 27: mod_base = OTHER; note = 2'-O-(2-Methoxyethyl) thymine
  modified_base 62: mod_base = OTHER; note = 2'-fluorocytosine
  modified_base 74: mod_base = OTHER; note = Cytosine phosphorothiorate
  modified_base 75: mod_base = OTHER; note = 2'-Omethylcytosine

SEQ ID NO: 2159 - RNA, 76 nt, synthetic construct; identical to SEQ ID NO: 625
  source 1..76: mol_type = other RNA
  modified_base 1: mod_base = OTHER; note = 2'-Omethylguanosine phosphorothiorate
  modified_base 2: mod_base = OTHER; note = 2'-Omethylguanosine
  modified_base 9: mod_base = OTHER; note = Guanosine phosphorothiorate
  modified_base 10: mod_base = OTHER; note = 2'-fluoroguanosine
  modified_base 22: mod_base = OTHER; note = 2'-Omethylguanosine
  modified_base 45: mod_base = OTHER; note = 2'-fluoroguanosine
  modified_base 47: mod_base = OTHER; note = Uridine phosphorothiorate
  modified_base 48: mod_base = OTHER; note = 2'-O-(2-Methoxyethyl) thymine
  modified_base 54: mod_base = OTHER; note = 2'-fluorouridine
  modified_base 65: mod_base = OTHER; note = 2'-fluoroguanosine
  modified_base 74: mod_base = OTHER; note = Cytosine phosphorothiorate
  modified_base 75: mod_base = OTHER; note = 2'-Omethylcytosine phosphorothiorate
  modified_base 76: mod_base = OTHER; note = 2'-Omethyladenosine

SEQ ID NO: 2160 - skipped

SEQ ID NO: 2161 - RNA, 76 nt, synthetic construct; identical to SEQ ID NO: 625
  source 1..76: mol_type = other RNA
  modified_base 1: mod_base = OTHER; note = 2'-Omethylguanosine phosphorothiorate
  modified_base 2: mod_base = OTHER; note = 2'-Omethylguanosine
  modified_base 74: mod_base = OTHER; note = Cytosine phosphorothiorate
  modified_base 75: mod_base = OTHER; note = 2'-Omethylcytosine phosphorothiorate
  modified_base 76: mod_base = OTHER; note = 2'-Omethyladenosine

SEQ ID NO: 2162 - skipped

SEQ ID NO: 2163 - RNA, 76 nt, synthetic construct; identical to SEQ ID NO: 625
  source 1..76: mol_type = other RNA
  modified_base 1: mod_base = OTHER; note = 2'-Omethylguanosine phosphorothiorate
  modified_base 2: mod_base = OTHER; note = 2'-Omethylguanosine phosphorothiorate
  modified_base 18: mod_base = OTHER; note = 2'-fluoroguanosine
  modified_base 74: mod_base = OTHER; note = Cytosine phosphorothiorate
  modified_base 75: mod_base = OTHER; note = 2'-Omethylcytosine phosphorothiorate
  modified_base 76: mod_base = OTHER; note = 2'-Omethyladenosine

SEQ ID NO: 2164 - DNA, 76 bp, synthetic construct; identical to SEQ ID NO: 1924
  source 1..76: mol_type = other DNA
  modified_base 1: mod_base = OTHER; note = 2'-Omethylguanosine phosphorothiorate
  modified_base 2: mod_base = OTHER; note = 2'-Omethylguanosine phosphorothiorate
  modified_base 4: mod_base = OTHER; note = 2'-O-(2-Methoxyethyl) thymine
  modified_base 24: mod_base = OTHER; note = 2'-fluoroguanosine
  modified_base 30: mod_base = OTHER; note = Guanosine phosphorothiorate
  modified_base 41: mod_base = OTHER; note = 2'-fluorocytosine
  modified_base 74: mod_base = OTHER; note = Cytosine phosphorothiorate
  modified_base 75: mod_base = OTHER; note = 2'-Omethylcytosine phosphorothiorate
  modified_base 76: mod_base = OTHER; note = 2'-Omethyladenosine
  misc_feature 1..30: note = RNA
  misc_feature 31: note = DNA
  misc_feature 32..76: note = RNA

SEQ ID NO: 2165 - RNA, 76 nt, synthetic construct; identical to SEQ ID NO: 625
  source 1..76: mol_type = other RNA
  modified_base 1: mod_base = OTHER; note = 2'-Omethylguanosine phosphorothiorate
  modified_base 2: mod_base = OTHER; note = 2'-Omethylguanosine
  modified_base 25: mod_base = OTHER; note = 2'-fluorocytosine
  modified_base 74: mod_base = OTHER; note = Cytosine phosphorothiorate
  modified_base 75: mod_base = OTHER; note = 2'-Omethylcytosine

SEQ ID NO: 2166 - DNA, 76 bp, synthetic construct; identical to SEQ ID NO: 1924
  source 1..76: mol_type = other DNA
  modified_base 1: mod_base = OTHER; note = 2'-Omethylguanosine phosphorothiorate
  modified_base 2: mod_base = OTHER; note = 2'-Omethylguanosine phosphorothiorate
  modified_base 20: mod_base = OTHER; note = 2'-fluorouridine
  modified_base 52: mod_base = OTHER; note = Guanosine phosphorothiorate
  modified_base 58: mod_base = OTHER; note = Adenosine phosphorothiorate
  modified_base 59: mod_base = OTHER; note = 2'-fluoroguanosine
  modified_base 74: mod_base = OTHER; note = Cytosine phosphorothiorate
  modified_base 75: mod_base = OTHER; note = 2'-Omethylcytosine
  modified_base 76: mod_base = OTHER; note = 2'-O-(2-Methoxyethyl) adenosine
  misc_feature 1..43: note = RNA
  misc_feature 44: note = DNA
  misc_feature 45..76: note = RNA

SEQ ID NO: 2167 - RNA, 76 nt, synthetic construct; identical to SEQ ID NO: 625
  source 1..76: mol_type = other RNA
  modified_base 1: mod_base = OTHER; note = 2'-Omethylguanosine phosphorothiorate
  modified_base 2: mod_base = OTHER; note = 2'-Omethylguanosine phosphorothiorate
  modified_base 44: mod_base = OTHER; note = 2'-O-(2-Methoxyethyl) adenosine
  modified_base 63: mod_base = OTHER; note = 2'-fluorocytosine
  modified_base 74: mod_base = OTHER; note = Cytosine phosphorothiorate
  modified_base 75: mod_base = OTHER; note = 2'-Omethylcytosine phosphorothiorate
  modified_base 76: mod_base = OTHER; note = 2'-Omethyladenosine

SEQ ID NO: 2168 - RNA, 76 nt, synthetic construct; identical to SEQ ID NO: 625
  source 1..76: mol_type = other RNA
  modified_base 1: mod_base = OTHER; note = 2'-Omethylguanosine phosphorothiorate
  modified_base 2: mod_base = OTHER; note = 2'-Omethylguanosine
  modified_base 16: mod_base = OTHER; note = 2'-fluorouridine
  modified_base 74: mod_base = OTHER; note = 2'-fluorocytosine phosphorothiorate
  modified_base 75: mod_base = OTHER; note = 2'-Omethylcytosine

SEQ ID NO: 2169 - DNA, 76 bp, synthetic construct; identical to SEQ ID NO: 1924
  source 1..76: mol_type = other DNA
  modified_base 1: mod_base = OTHER; note = 2'-Omethylguanosine phosphorothiorate
  modified_base 2: mod_base = OTHER; note = 2'-Omethylguanosine phosphorothiorate
  modified_base 52: mod_base = OTHER; note = Guanosine phosphorothiorate
  modified_base 74: mod_base = OTHER; note = Cytosine phosphorothiorate
  modified_base 75: mod_base = OTHER; note = 2'-Omethylcytosine phosphorothiorate
  modified_base 76: mod_base = OTHER; note = 2'-Omethyladenosine
  misc_feature 1..52: note = RNA
  misc_feature 53: note = DNA
  misc_feature 54..76: note = RNA

SEQ ID NO: 2170 - RNA, 76 nt, synthetic construct; identical to SEQ ID NO: 625
  source 1..76: mol_type = other RNA
  modified_base 1: mod_base = OTHER; note = 2'-Omethylguanosine phosphorothiorate
  modified_base 2: mod_base = OTHER; note = 2'-Omethylguanosine phosphorothiorate
  modified_base 34: mod_base = OTHER; note = 2'-fluorouridine
  modified_base 44: mod_base = OTHER; note = 2'-fluoroadenosine
  modified_base 74: mod_base = OTHER; note = Cytosine phosphorothiorate
  modified_base 75: mod_base = OTHER; note = 2'-Omethylcytosine phosphorothiorate
  modified_base 76: mod_base = OTHER; note = 2'-Omethyladenosine

SEQ ID NO: 2171 - RNA, 76 nt, synthetic construct; identical to SEQ ID NO: 625
  source 1..76: mol_type = other RNA
  modified_base 1: mod_base = OTHER; note = 2'-Omethylguanosine phosphorothiorate
  modified_base 2: mod_base = OTHER; note = 2'-Omethylguanosine phosphorothiorate
  modified_base 24: mod_base = OTHER; note = 2'-fluoroguanosine
  modified_base 52: mod_base = OTHER; note = 2'-fluoroguanosine
  modified_base 75: mod_base = OTHER; note = Cytosine phosphorothiorate
  modified_base 76: mod_base = OTHER; note = 2'-Omethyladenosine

SEQ ID NO: 2172 - RNA, 76 nt, synthetic construct; identical to SEQ ID NO: 625
  source 1..76: mol_type = other RNA
  modified_base 1: mod_base = OTHER; note = 2'-Omethylguanosine phosphorothiorate
  modified_base 2: mod_base = OTHER; note = 2'-Omethylguanosine phosphorothiorate
  modified_base 14: mod_base = OTHER; note = 2'-O-(2-Methoxyethyl) adenosine
  modified_base 44: mod_base = OTHER; note = 2'-O-(2-Methoxyethyl) adenosine
  modified_base 52: mod_base = OTHER; note = 2'-O-(2-Methoxyethyl) guanosine
  modified_base 75: mod_base = OTHER; note = 2'-fluorocytosine phosphorothiorate
  modified_base 76: mod_base = OTHER; note = 2'-Omethyladenosine

SEQ ID NO: 2173 - RNA, 76 nt, synthetic construct; identical to SEQ ID NO: 625
  source 1..76: mol_type = other RNA
  modified_base 1: mod_base = OTHER; note = 2'-Omethylguanosine phosphorothiorate
  modified_base 2: mod_base = OTHER; note = 2'-Omethylguanosine phosphorothiorate
  modified_base 13: mod_base = OTHER; note = Cytosine phosphorothiorate
  modified_base 14: mod_base = OTHER; note = 2'-fluoroadenosine
  modified_base 52: mod_base = OTHER; note = Guanosine phosphorothiorate
  modified_base 74: mod_base = OTHER; note = Cytosine phosphorothiorate
  modified_base 75: mod_base = OTHER; note = 2'-Omethylcytosine
  modified_base 76: mod_base = OTHER; note = 2'-fluoroadenosine

SEQ ID NO: 2174 - RNA, 76 nt, synthetic construct; identical to SEQ ID NO: 625
  source 1..76: mol_type = other RNA
  modified_base 1: mod_base = OTHER; note = 2'-Omethylguanosine phosphorothiorate
  modified_base 2: mod_base = OTHER; note = 2'-Omethylguanosine
  modified_base 19: mod_base = OTHER; note = 2'-fluoroadenosine
  modified_base 28: mod_base = OTHER; note = 2'-fluorouridine
  modified_base 52: mod_base = OTHER; note = 2'-fluoroguanosine
  modified_base 74: mod_base = OTHER; note = Cytosine phosphorothiorate
  modified_base 75: mod_base = OTHER; note = 2'-Omethylcytosine

SEQ ID NO: 2175 - RNA, 76 nt, synthetic construct; identical to SEQ ID NO: 625
  source 1..76: mol_type = other RNA
  modified_base 1: mod_base = OTHER; note = 2'-Omethylguanosine phosphorothiorate
  modified_base 2: mod_base = OTHER; note = 2'-Omethylguanosine phosphorothiorate
  modified_base 25: mod_base = OTHER; note = Cytosine phosphorothiorate
  modified_base 43: mod_base = OTHER; note = 2'-fluoroadenosine
  modified_base 55: mod_base = OTHER; note = Uridine phosphorothiorate
  modified_base 74: mod_base = OTHER; note = Cytosine phosphorothiorate
  modified_base 75: mod_base = OTHER; note = 2'-Omethylcytosine phosphorothiorate
  modified_base 76: mod_base = OTHER; note = 2'-Omethyladenosine

SEQ ID NO: 2176 - DNA, 76 bp, synthetic construct; identical to SEQ ID NO: 1924
  source 1..76: mol_type = other DNA
  modified_base 1: mod_base = OTHER; note = 2'-Omethylguanosine phosphorothiorate
  modified_base 2: mod_base = OTHER; note = 2'-Omethylguanosine phosphorothiorate
  modified_base 31: mod_base = OTHER; note = Adenosine phosphorothiorate
  modified_base 45: mod_base = OTHER; note = Guanosine phosphorothiorate
  modified_base 46: mod_base = OTHER; note = 2'-fluoroguanosine
  modified_base 74: mod_base = OTHER; note = Cytosine phosphorothiorate
  modified_base 75: mod_base = OTHER; note = 2'-Omethylcytosine phosphorothiorate
  modified_base 76: mod_base = OTHER; note = 2'-Omethyladenosine
  misc_feature 1..31: note = RNA
  misc_feature 32: note = DNA
  misc_feature 33..76: note = RNA

SEQ ID NO: 2177 - RNA, 76 nt, synthetic construct; identical to SEQ ID NO: 625
  source 1..76: mol_type = other RNA
  modified_base 1: mod_base = OTHER; note = 2'-Omethylguanosine phosphorothiorate
  modified_base 2: mod_base = OTHER; note = 2'-Omethylguanosine phosphorothiorate
  modified_base 13: mod_base = OTHER; note = 2'-fluorocytosine
  modified_base 14: mod_base = OTHER; note = 2'-O-(2-Methoxyethyl) adenosine
  modified_base 37: mod_base = OTHER; note = Adenosine phosphorothiorate
  modified_base 38: mod_base = OTHER; note = 2'-fluoroadenosine
  modified_base 59: mod_base = OTHER; note = 2'-Omethylguanosine
  modified_base 74: mod_base = OTHER; note = Cytosine phosphorothiorate
  modified_base 75: mod_base = OTHER; note = 2'-Omethylcytosine phosphorothiorate
  modified_base 76: mod_base = OTHER; note = 2'-Omethyladenosine

SEQ ID NO: 2178 - RNA, 76 nt, synthetic construct; identical to SEQ ID NO: 625
  source 1..76: mol_type = other RNA
  modified_base 1: mod_base = OTHER; note = 2'-Omethylguanosine phosphorothiorate
  modified_base 2: mod_base = OTHER; note = 2'-Omethylguanosine
  modified_base 22: mod_base = OTHER; note = 2'-Omethylguanosine
  modified_base 52: mod_base = OTHER; note = 2'-Omethylguanosine
  modified_base 74: mod_base = OTHER; note = Cytosine phosphorothiorate
  modified_base 75: mod_base = OTHER; note = 2'-Omethylcytosine

SEQ ID NO: 2179 - DNA, 76 bp, synthetic construct; identical to SEQ ID NO: 1924
  source 1..76: mol_type = other DNA
  modified_base 1: mod_base = OTHER; note = 2'-Omethylguanosine phosphorothiorate
  modified_base 2: mod_base = OTHER; note = 2'-Omethylguanosine phosphorothiorate
  modified_base 52: mod_base = OTHER; note = 2'-Omethylguanosine
  modified_base 63: mod_base = OTHER; note = Cytosine phosphorothiorate
  modified_base 74: mod_base = OTHER; note = Cytosine phosphorothiorate
  modified_base 75: mod_base = OTHER; note = 2'-Omethylcytosine phosphorothiorate
  modified_base 76: mod_base = OTHER; note = 2'-Omethyladenosine
  misc_feature 1..63: note = RNA
  misc_feature 64: note = DNA
  misc_feature 65..76: note = RNA

SEQ ID NO: 2180 - DNA, 76 bp, synthetic construct; identical to SEQ ID NO: 1924
  source 1..76: mol_type = other DNA
  modified_base 1: mod_base = OTHER; note = 2'-Omethylguanosine phosphorothiorate
  modified_base 2: mod_base = OTHER; note = 2'-Omethylguanosine phosphorothiorate
  modified_base 9: mod_base = OTHER; note = Guanosine phosphorothiorate
  modified_base 52: mod_base = OTHER; note = 2'-Omethylguanosine
  modified_base 59: mod_base = OTHER; note = 2'-O-(2-Methoxyethyl) guanosine
  modified_base 74: mod_base = OTHER; note = Cytosine phosphorothiorate
  modified_base 75: mod_base = OTHER; note = 2'-Omethylcytosine
  misc_feature 1..9: note = RNA
  misc_feature 10: note = DNA
  misc_feature 11..76: note = RNA

SEQ ID NO: 2181 - skipped

SEQ ID NO: 2182 - RNA, 76 nt, synthetic construct; identical to SEQ ID NO: 625
  source 1..76: mol_type = other RNA
  modified_base 1: mod_base = OTHER; note = 2'-Omethylguanosine phosphorothiorate
  modified_base 2: mod_base = OTHER; note = 2'-Omethylguanosine phosphorothiorate
  modified_base 37: mod_base = OTHER; note = Adenosine phosphorothiorate
  modified_base 56: mod_base = OTHER; note = 2'-fluorocytosine
  modified_base 74: mod_base = OTHER; note = Cytosine phosphorothiorate
  modified_base 75: mod_base = OTHER; note = 2'-Omethylcytosine

SEQ ID NO: 2183 - skipped

SEQ ID NO: 2184 - RNA, 76 nt, synthetic construct; identical to SEQ ID NO: 625
  source 1..76: mol_type = other RNA
  modified_base 1: mod_base = OTHER; note = 2'-Omethylguanosine phosphorothiorate
  modified_base 2: mod_base = OTHER; note = 2'-Omethylguanosine phosphorothiorate
  modified_base 30: mod_base = OTHER; note = Guanosine phosphorothiorate
  modified_base 31: mod_base = OTHER; note = 2'-O-(2-Methoxyethyl) adenosine
  modified_base 51: mod_base = OTHER; note = Guanosine phosphorothiorate
  modified_base 52: mod_base = OTHER; note = 2'-Omethylguanosine
  modified_base 74: mod_base = OTHER; note = Cytosine phosphorothiorate
  modified_base 75: mod_base = OTHER; note = 2'-Omethylcytosine phosphorothiorate
  modified_base 76: mod_base = OTHER; note = 2'-Omethyladenosine

SEQ ID NO: 2185 - DNA, 76 bp, synthetic construct; identical to SEQ ID NO: 1924
  source 1..76: mol_type = other DNA
  modified_base 1: mod_base = OTHER; note = 2'-Omethylguanosine phosphorothiorate
  modified_base 2: mod_base = OTHER; note = 2'-Omethylguanosine
  modified_base 58: mod_base = OTHER; note = Adenosine phosphorothiorate
  modified_base 74: mod_base = OTHER; note = Cytosine phosphorothiorate
  modified_base 75: mod_base = OTHER; note = 2'-Omethylcytosine
  modified_base 76: mod_base = OTHER; note = 2'-fluoroadenosine
  misc_feature 1..58: note = RNA
  misc_feature 59: note = DNA
  misc_feature 60..76: note = RNA

SEQ ID NO: 2186 - RNA, 76 nt, synthetic construct; identical to SEQ ID NO: 625
  source 1..76: mol_type = other RNA
  modified_base 1: mod_base = OTHER; note = 2'-Omethylguanosine phosphorothiorate
  modified_base 2: mod_base = OTHER; note = 2'-Omethylguanosine phosphorothiorate
  modified_base 13: mod_base = OTHER; note = 2'-fluorocytosine
  modified_base 14: mod_base = OTHER; note = 2'-fluoroadenosine
  modified_base 54: mod_base = OTHER; note = 2'-fluorouridine
  modified_base 59: mod_base = OTHER; note = 2'-Omethylguanosine
  modified_base 75: mod_base = OTHER; note = Cytosine phosphorothiorate
  modified_base 76: mod_base = OTHER; note = 2'-Omethyladenosine

SEQ ID NO: 2187 - DNA, 76 bp, synthetic construct; identical to SEQ ID NO: 1924
  source 1..76: mol_type = other DNA
  modified_base 1: mod_base = OTHER; note = 2'-Omethylguanosine phosphorothiorate
  modified_base 2: mod_base = OTHER; note = 2'-Omethylguanosine
  modified_base 22: mod_base = OTHER; note = Guanosine phosphorothiorate
  modified_base 23: mod_base = OTHER; note = 2'-Omethylcytosine
  modified_base 27: mod_base = OTHER; note = Uridine phosphorothiorate
  modified_base 28: mod_base = OTHER; note = 2'-O-(2-Methoxyethyl) thymine
  modified_base 43: mod_base = OTHER; note = Adenosine phosphorothiorate
  modified_base 45: mod_base = OTHER; note = 2'-fluoroguanosine
  modified_base 74: mod_base = OTHER; note = Cytosine phosphorothiorate
  modified_base 75: mod_base = OTHER; note = 2'-Omethylcytosine phosphorothiorate
  modified_base 76: mod_base = OTHER; note = 2'-Omethyladenosine
  misc_feature 1..2: note = RNA
  misc_feature 3: note = DNA
  misc_feature 4..43: note = RNA
  misc_feature 44: note = DNA
  misc_feature 45..76: note = RNA

SEQ ID NO: 2188 - skipped

SEQ ID NO: 2189 - DNA, 76 bp, synthetic construct; identical to SEQ ID NO: 1924
  source 1..76: mol_type = other DNA
  modified_base 1: mod_base = OTHER; note = 2'-Omethylguanosine phosphorothiorate
  modified_base 2: mod_base = OTHER; note = 2'-Omethylguanosine phosphorothiorate
  modified_base 27: mod_base = OTHER; note = Uridine phosphorothiorate
  modified_base 51: mod_base = OTHER; note = Guanosine phosphorothiorate
  modified_base 59: mod_base = OTHER; note = 2'-fluoroguanosine
  modified_base 74: mod_base = OTHER; note = Cytosine phosphorothiorate
  modified_base 75: mod_base = OTHER; note = 2'-Omethylcytosine
  misc_feature 1..51: note = RNA
  misc_feature 52: note = DNA
  misc_feature 53..76: note = RNA

SEQ ID NO: 2190 - RNA, 76 nt, synthetic construct; identical to SEQ ID NO: 625
  source 1..76: mol_type = other RNA
  modified_base 1: mod_base = OTHER; note = 2'-Omethylguanosine phosphorothiorate
  modified_base 2: mod_base = OTHER; note = 2'-Omethylguanosine phosphorothiorate
  modified_base 13: mod_base = OTHER; note = Cytosine phosphorothiorate
  modified_base 14: mod_base = OTHER; note = 2'-fluoroadenosine
  modified_base 21: mod_base = OTHER; note = Adenosine phosphorothiorate
  modified_base 22: mod_base = OTHER; note = 2'-O-(2-Methoxyethyl) guanosine
  modified_base 45: mod_base = OTHER; note = 2'-fluoroguanosine
  modified_base 62: mod_base = OTHER; note = 2'-fluorocytosine
  modified_base 74: mod_base = OTHER; note = Cytosine phosphorothiorate
  modified_base 75: mod_base = OTHER; note = 2'-fluorocytosine

SEQ ID NO: 2191 - RNA, 76 nt, synthetic construct; identical to SEQ ID NO: 625
  source 1..76: mol_type = other RNA
  modified_base 1: mod_base = OTHER; note = 2'-Omethylguanosine phosphorothiorate
  modified_base 2: mod_base = OTHER; note = 2'-Omethylguanosine phosphorothiorate
  modified_base 16: mod_base = OTHER; note = 2'-Omethyluridine
  modified_base 48: mod_base = OTHER; note = Uridine phosphorothiorate
  modified_base 49: mod_base = OTHER; note = 2'-Omethylcytosine
  modified_base 74: mod_base = OTHER; note = Cytosine phosphorothiorate
  modified_base 75: mod_base = OTHER; note = 2'-Omethylcytosine phosphorothiorate
  modified_base 76: mod_base = OTHER; note = 2'-Omethyladenosine

SEQ ID NO: 2192 - RNA, 76 nt, synthetic construct; identical to SEQ ID NO: 625
  source 1..76: mol_type = other RNA
  modified_base 1: mod_base = OTHER; note = 2'-Omethylguanosine phosphorothiorate
  modified_base 2: mod_base = OTHER; note = 2'-Omethylguanosine phosphorothiorate
  modified_base 18: mod_base = OTHER; note = 2'-Omethylguanosine
  modified_base 33: mod_base = OTHER; note = Uridine phosphorothiorate
  modified_base 34: mod_base = OTHER; note = 2'-fluorouridine
  modified_base 74: mod_base = OTHER; note = Cytosine phosphorothiorate
  modified_base 75: mod_base = OTHER; note = 2'-Omethylcytosine phosphorothiorate
  modified_base 76: mod_base = OTHER; note = 2'-Omethyladenosine

SEQ ID NO: 2193 - DNA, 76 bp, synthetic construct; identical to SEQ ID NO: 1924
  source 1..76: mol_type = other DNA
  modified_base 1: mod_base = OTHER; note = 2'-Omethylguanosine phosphorothiorate
  modified_base 2: mod_base = OTHER; note = 2'-Omethylguanosine phosphorothiorate
  modified_base 25: mod_base = OTHER; note = 2'-fluorocytosine
  modified_base 31: mod_base = OTHER; note = Adenosine phosphorothiorate
  modified_base 32: mod_base = OTHER; note = 2'-Omethylcytosine
  modified_base 59: mod_base = OTHER; note = 2'-O-(2-Methoxyethyl) guanosine
  modified_base 74: mod_base = OTHER; note = Cytosine phosphorothiorate
  modified_base 75: mod_base = OTHER; note = 2'-Omethylcytosine phosphorothiorate
  modified_base 76: mod_base = OTHER; note = 2'-Omethyladenosine
  misc_feature 1..47: note = RNA
  misc_feature 48: note = DNA
  misc_feature 49..76: note = RNA

SEQ ID NO: 2194 - RNA, 76 nt, synthetic construct; identical to SEQ ID NO: 625
  source 1..76: mol_type = other RNA
  modified_base 1: mod_base = OTHER; note = 2'-Omethylguanosine phosphorothiorate
  modified_base 2: mod_base = OTHER; note = 2'-Omethylguanosine phosphorothiorate
  modified_base 4: mod_base = OTHER; note = 2'-Omethyluridine
  modified_base 74: mod_base = OTHER; note = Cytosine phosphorothiorate
  modified_base 75: mod_base = OTHER; note = 2'-Omethylcytosine

SEQ ID NO: 2195 - RNA, 76 nt, synthetic construct; identical to SEQ ID NO: 625
  source 1..76: mol_type = other RNA
  modified_base 1: mod_base = OTHER; note = 2'-Omethylguanosine phosphorothiorate
  modified_base 2: mod_base = OTHER; note = 2'-Omethylguanosine phosphorothiorate
  modified_base 5: mod_base = OTHER; note = 2'-Omethylcytosine
  modified_base 61: mod_base = OTHER; note = 2'-fluorocytosine
  modified_base 74: mod_base = OTHER; note = Cytosine phosphorothiorate
  modified_base 75: mod_base = OTHER; note = 2'-Omethylcytosine phosphorothiorate
  modified_base 76: mod_base = OTHER; note = 2'-Omethyladenosine

SEQ ID NO: 2196 - DNA, 76 bp, synthetic construct; identical to SEQ ID NO: 1924
  source 1..76: mol_type = other DNA
  modified_base 1: mod_base = OTHER; note = 2'-Omethylguanosine phosphorothiorate
  modified_base 2: mod_base = OTHER; note = 2'-Omethylguanosine phosphorothiorate
  modified_base 9: mod_base = OTHER; note = Guanosine phosphorothiorate
  modified_base 16: mod_base = OTHER; note = Uridine phosphorothiorate
  modified_base 17: mod_base = OTHER; note = 2'-O-(2-Methoxyethyl) guanosine
  modified_base 37: mod_base = OTHER; note = Adenosine phosphorothiorate
  modified_base 38: mod_base = OTHER; note = 2'-fluoroadenosine
  modified_base 52: mod_base = OTHER; note = 2'-O-(2-Methoxyethyl) guanosine
  modified_base 59: mod_base = OTHER; note = 2'-Omethylguanosine
  modified_base 63: mod_base = OTHER; note = Cytosine phosphorothiorate
  modified_base 64: mod_base = OTHER; note = 2'-O-(2-Methoxyethyl) guanosine
  modified_base 74: mod_base = OTHER; note = 2'-fluorocytosine phosphorothiorate
  modified_base 75: mod_base = OTHER; note = 2'-Omethylcytosine phosphorothiorate
  modified_base 76: mod_base = OTHER; note = 2'-Omethyladenosine
  misc_feature 1..9: note = RNA
  misc_feature 10: note = DNA
  misc_feature 11..76: note = RNA

SEQ ID NO: 2197 - RNA, 76 nt, synthetic construct; identical to SEQ ID NO: 625
  source 1..76: mol_type = other RNA
  modified_base 1: mod_base = OTHER; note = 2'-Omethylguanosine phosphorothiorate
  modified_base 2: mod_base = OTHER; note = 2'-Omethylguanosine phosphorothiorate
  modified_base 16: mod_base = OTHER; note = 2'-O-(2-Methoxyethyl) thymine
  modified_base 54: mod_base = OTHER; note = 2'-fluorouridine
  modified_base 74: mod_base = OTHER; note = Cytosine phosphorothiorate
  modified_base 75: mod_base = OTHER; note = 2'-Omethylcytosine phosphorothiorate
  modified_base 76: mod_base = OTHER; note = 2'-Omethyladenosine

SEQ ID NO: 2198-2199 - skipped (2 entries)

SEQ ID NO: 2200 - RNA, 76 nt, synthetic construct; identical to SEQ ID NO: 625
  source 1..76: mol_type = other RNA
  modified_base 1: mod_base = OTHER; note = 2'-Omethylguanosine phosphorothiorate
  modified_base 2: mod_base = OTHER; note = 2'-Omethylguanosine
  modified_base 45: mod_base = OTHER; note = 2'-fluoroguanosine
  modified_base 49: mod_base = OTHER; note = Cytosine phosphorothiorate
  modified_base 50: mod_base = OTHER; note = 2'-fluorocytosine
  modified_base 56: mod_base = OTHER; note = Cytosine phosphorothiorate
  modified_base 57: mod_base = OTHER; note = 2'-fluoroguanosine
  modified_base 74: mod_base = OTHER; note = Cytosine phosphorothiorate
  modified_base 75: mod_base = OTHER; note = 2'-Omethylcytosine phosphorothiorate
  modified_base 76: mod_base = OTHER; note = 2'-Omethyladenosine

SEQ ID NO: 2201 - RNA, 76 nt, synthetic construct; identical to SEQ ID NO: 625
  source 1..76: mol_type = other RNA
  modified_base 1: mod_base = OTHER; note = 2'-Omethylguanosine phosphorothiorate
  modified_base 2: mod_base = OTHER; note = 2'-Omethylguanosine phosphorothiorate
  modified_base 11: mod_base = OTHER; note = 2'-fluorocytosine
  modified_base 20: mod_base = OTHER; note = 2'-fluorouridine
  modified_base 37: mod_base = OTHER; note = Adenosine phosphorothiorate
  modified_base 75: mod_base = OTHER; note = 2'-fluorocytosine phosphorothiorate
  modified_base 76: mod_base = OTHER; note = 2'-Omethyladenosine

SEQ ID NO: 2202 - RNA, 76 nt, synthetic construct; identical to SEQ ID NO: 625
  source 1..76: mol_type = other RNA
  modified_base 1: mod_base = OTHER; note = 2'-Omethylguanosine phosphorothiorate
  modified_base 2: mod_base = OTHER; note = 2'-Omethylguanosine phosphorothiorate
  modified_base 20: mod_base = OTHER; note = 2'-fluorouridine
  modified_base 37: mod_base = OTHER; note = Adenosine phosphorothiorate
  modified_base 48: mod_base = OTHER; note = 2'-Omethyluridine
  modified_base 74: mod_base = OTHER; note = Cytosine phosphorothiorate
  modified_base 75: mod_base = OTHER; note = 2'-Omethylcytosine phosphorothiorate
  modified_base 76: mod_base = OTHER; note = 2'-Omethyladenosine

SEQ ID NO: 2203 - RNA, 76 nt, synthetic construct; identical to SEQ ID NO: 625
  source 1..76: mol_type = other RNA
  modified_base 1: mod_base = OTHER; note = 2'-Omethylguanosine phosphorothiorate
  modified_base 2: mod_base = OTHER; note = 2'-Omethylguanosine phosphorothiorate
  modified_base 20: mod_base = OTHER; note = 2'-O-(2-Methoxyethyl) thymine
  modified_base 48: mod_base = OTHER; note = Uridine phosphorothiorate
  modified_base 49: mod_base = OTHER; note = 2'-Omethylcytosine
  modified_base 55: mod_base = OTHER; note = Uridine phosphorothiorate
  modified_base 63: mod_base = OTHER; note = Cytosine phosphorothiorate
  modified_base 64: mod_base = OTHER; note = 2'-fluoroguanosine
  modified_base 74: mod_base = OTHER; note = Cytosine phosphorothiorate
  modified_base 75: mod_base = OTHER; note = 2'-Omethylcytosine phosphorothiorate
  modified_base 76: mod_base = OTHER; note = 2'-Omethyladenosine

SEQ ID NO: 2204 - RNA, 76 nt, synthetic construct; identical to SEQ ID NO: 625
  source 1..76: mol_type = other RNA
  modified_base 1: mod_base = OTHER; note = 2'-Omethylguanosine phosphorothiorate
  modified_base 2: mod_base = OTHER; note = 2'-Omethylguanosine phosphorothiorate
  modified_base 16: mod_base = OTHER; note = 2'-O-(2-Methoxyethyl) thymine
  modified_base 41: mod_base = OTHER; note = 2'-fluorocytosine
  modified_base 56: mod_base = OTHER; note = 2'-fluorocytosine
  modified_base 59: mod_base = OTHER; note = 2'-fluoroguanosine
  modified_base 74: mod_base = OTHER; note = Cytosine phosphorothiorate
  modified_base 75: mod_base = OTHER; note = 2'-Omethylcytosine phosphorothiorate
  modified_base 76: mod_base = OTHER; note = 2'-Omethyladenosine

SEQ ID NO: 2205 - DNA, 76 bp, synthetic construct; identical to SEQ ID NO: 1924
  source 1..76: mol_type = other DNA
  modified_base 1: mod_base = OTHER; note = 2'-Omethylguanosine phosphorothiorate
  modified_base 2: mod_base = OTHER; note = 2'-Omethylguanosine phosphorothiorate
  modified_base 10: mod_base = OTHER; note = Guanosine phosphorothiorate
  modified_base 11: mod_base = OTHER; note = 2'-fluorocytosine
  modified_base 46: mod_base = OTHER; note = Guanosine phosphorothiorate
  modified_base 52: mod_base = OTHER; note = 2'-Omethylguanosine
  modified_base 74: mod_base = OTHER; note = Cytosine phosphorothiorate
  modified_base 75: mod_base = OTHER; note = 2'-Omethylcytosine phosphorothiorate
  modified_base 76: mod_base = OTHER; note = 2'-Omethyladenosine
  misc_feature 1..46: note = RNA
  misc_feature 47: note = DNA
  misc_feature 48..76: note = RNA

SEQ ID NO: 2206 - DNA, 76 bp, synthetic construct; identical to SEQ ID NO: 1924
  source 1..76: mol_type = other DNA
  modified_base 1: mod_base = OTHER; note = 2'-Omethylguanosine phosphorothiorate
  modified_base 2: mod_base = OTHER; note = 2'-Omethylguanosine phosphorothiorate
  modified_base 12: mod_base = OTHER; note = Guanosine phosphorothiorate
  modified_base 13: mod_base = OTHER; note = 2'-Omethylcytosine
  modified_base 20: mod_base = OTHER; note = 2'-fluorouridine
  modified_base 30: mod_base = OTHER; note = Guanosine phosphorothiorate
  modified_base 48: mod_base = OTHER; note = 2'-fluorouridine
  modified_base 56: mod_base = OTHER; note = Cytosine phosphorothiorate
  modified_base 57: mod_base = OTHER; note = 2'-Omethylguanosine
  modified_base 74: mod_base = OTHER; note = Cytosine phosphorothiorate
  modified_base 75: mod_base = OTHER; note = 2'-Omethylcytosine
  misc_feature 1..30: note = RNA
  misc_feature 31: note = DNA
  misc_feature 32..76: note = RNA

SEQ ID NO: 2207 - RNA, 76 nt, synthetic construct; identical to SEQ ID NO: 625
  source 1..76: mol_type = other RNA
  modified_base 1: mod_base = OTHER; note = 2'-Omethylguanosine phosphorothiorate
  modified_base 2: mod_base = OTHER; note = 2'-Omethylguanosine phosphorothiorate
  modified_base 38: mod_base = OTHER; note = Adenosine phosphorothiorate
  modified_base 39: mod_base = OTHER; note = Uridine phosphorothiorate
  modified_base 40: mod_base = OTHER; note = 2'-fluorouridine
  modified_base 52: mod_base = OTHER; note = 2'-fluoroguanosine
  modified_base 74: mod_base = OTHER; note = Cytosine phosphorothiorate
  modified_base 75: mod_base = OTHER; note = 2'-Omethylcytosine phosphorothiorate
  modified_base 76: mod_base = OTHER; note = 2'-Omethyladenosine

SEQ ID NO: 2208 - DNA, 76 bp, synthetic construct; identical to SEQ ID NO: 1924
  source 1..76: mol_type = other DNA
  modified_base 1: mod_base = OTHER; note = 2'-Omethylguanosine phosphorothiorate
  modified_base 2: mod_base = OTHER; note = 2'-Omethylguanosine
  modified_base 13: mod_base = OTHER; note = 2'-fluorocytosine
  modified_base 22: mod_base = OTHER; note = Guanosine phosphorothiorate
  modified_base 68: mod_base = OTHER; note = 2'-fluoroguanosine
  modified_base 74: mod_base = OTHER; note = Cytosine phosphorothiorate
  modified_base 75: mod_base = OTHER; note = 2'-Omethylcytosine phosphorothiorate
  modified_base 76: mod_base = OTHER; note = 2'-Omethyladenosine
  misc_feature 1..22: note = RNA
  misc_feature 23: note = DNA
  misc_feature 24..76: note = RNA

SEQ ID NO: 2209 - RNA, 76 nt, synthetic construct; identical to SEQ ID NO: 625
  source 1..76: mol_type = other RNA
  modified_base 1: mod_base = OTHER; note = 2'-Omethylguanosine phosphorothiorate
  modified_base 2: mod_base = OTHER; note = 2'-Omethylguanosine phosphorothiorate
  modified_base 12: mod_base = OTHER; note = Guanosine phosphorothiorate
  modified_base 22: mod_base = OTHER; note = 2'-fluoroguanosine
  modified_base 26: mod_base = OTHER; note = Adenosine phosphorothiorate
  modified_base 27: mod_base = OTHER; note = Uridine phosphorothiorate
  modified_base 45: mod_base = OTHER; note = Guanosine phosphorothiorate
  modified_base 63: mod_base = OTHER; note = 2'-fluorocytosine
  modified_base 74: mod_base = OTHER; note = Cytosine phosphorothiorate
  modified_base 75: mod_base = OTHER; note = 2'-Omethylcytosine phosphorothiorate
  modified_base 76: mod_base = OTHER; note = 2'-Omethyladenosine

SEQ ID NO: 2210 - skipped

SEQ ID NO: 2211 - RNA, 76 nt, synthetic construct; identical to SEQ ID NO: 625
  source 1..76: mol_type = other RNA
  modified_base 1: mod_base = OTHER; note = 2'-Omethylguanosine phosphorothiorate
  modified_base 2: mod_base = OTHER; note = 2'-Omethylguanosine phosphorothiorate
  modified_base 20: mod_base = OTHER; note = 2'-fluorouridine

SEQ ID NO: 2212 - DNA, 76 bp, synthetic construct; identical to SEQ ID NO: 1924
  source 1..76: mol_type = other DNA
  modified_base 1: mod_base = OTHER; note = 2'-Omethylguanosine phosphorothiorate
  modified_base 2: mod_base = OTHER; note = 2'-Omethylguanosine phosphorothiorate
  modified_base 13: mod_base = OTHER; note = Cytosine phosphorothiorate
  modified_base 39: mod_base = OTHER; note = Uridine phosphorothiorate
  modified_base 40: mod_base = OTHER; note = 2'-fluorouridine
  modified_base 52: mod_base = OTHER; note = 2'-O-(2-Methoxyethyl) guanosine
  modified_base 74: mod_base = OTHER; note = Cytosine phosphorothiorate
  modified_base 75: mod_base = OTHER; note = 2'-Omethylcytosine phosphorothiorate
  modified_base 76: mod_base = OTHER; note = 2'-Omethyladenosine
  misc_feature 1..13: note = RNA
  misc_feature 14: note = DNA
  misc_feature 15..76: note = RNA

SEQ ID NO: 2213 - RNA, 76 nt, synthetic construct; identical to SEQ ID NO: 625
  source 1..76: mol_type = other RNA
  modified_base 1: mod_base = OTHER; note = 2'-Omethylguanosine phosphorothiorate
  modified_base 2: mod_base = OTHER; note = 2'-Omethylguanosine
  modified_base 9: mod_base = OTHER; note = Guanosine phosphorothiorate
  modified_base 20: mod_base = OTHER; note = 2'-fluorouridine
  modified_base 45: mod_base = OTHER; note = Guanosine phosphorothiorate
  modified_base 74: mod_base = OTHER; note = Cytosine phosphorothiorate
  modified_base 75: mod_base = OTHER; note = 2'-Omethylcytosine

SEQ ID NO: 2214 - DNA, 76 bp, synthetic construct; identical to SEQ ID NO: 1924
  source 1..76: mol_type = other DNA
  modified_base 1: mod_base = OTHER; note = 2'-Omethylguanosine phosphorothiorate
  modified_base 2: mod_base = OTHER; note = 2'-Omethylguanosine phosphorothiorate
  modified_base 38: mod_base = OTHER; note = 2'-fluoroadenosine
  modified_base 45: mod_base = OTHER; note = Guanosine phosphorothiorate
  modified_base 46: mod_base = OTHER; note = deoxyguanosine phosphorothiorate
  modified_base 63: mod_base = OTHER; note = 2'-fluorocytosine
  modified_base 74: mod_base = OTHER; note = Cytosine phosphorothiorate
  modified_base 75: mod_base = OTHER; note = 2'-Omethylcytosine phosphorothiorate
  modified_base 76: mod_base = OTHER; note = 2'-Omethyladenosine
  misc_feature 1..45: note = RNA
  misc_feature 46: note = DNA
  misc_feature 47..76: note = RNA

SEQ ID NO: 2215 - DNA, 76 bp, synthetic construct; identical to SEQ ID NO: 1924
  source 1..76: mol_type = other DNA
  modified_base 1: mod_base = OTHER; note = 2'-Omethylguanosine phosphorothiorate
  modified_base 2: mod_base = OTHER; note = 2'-Omethylguanosine
  modified_base 19: mod_base = OTHER; note = Adenosine phosphorothiorate
  modified_base 50: mod_base = OTHER; note = 2'-Omethylcytosine
  modified_base 62: mod_base = OTHER; note = 2'-fluorocytosine
  modified_base 69: mod_base = OTHER; note = Adenosine phosphorothiorate
  modified_base 70: mod_base = OTHER; note = 2'-fluoroguanosine
  modified_base 74: mod_base = OTHER; note = Cytosine phosphorothiorate
  modified_base 75: mod_base = OTHER; note = 2'-Omethylcytosine
  modified_base 76: mod_base = OTHER; note = 2'-O-(2-Methoxyethyl) adenosine
  misc_feature 1..19: note = RNA
  misc_feature 20: note = DNA
  misc_feature 21..76: note = RNA

SEQ ID NO: 2216 - DNA, 76 bp, synthetic construct; identical to SEQ ID NO: 1924
  source 1..76: mol_type = other DNA
  modified_base 1: mod_base = OTHER; note = 2'-Omethylguanosine phosphorothiorate
  modified_base 2: mod_base = OTHER; note = 2'-Omethylguanosine phosphorothiorate
  modified_base 15: mod_base = OTHER; note = Adenosine phosphorothiorate
  modified_base 45: mod_base = OTHER; note = Guanosine phosphorothiorate
  modified_base 74: mod_base = OTHER; note = Cytosine phosphorothiorate
  modified_base 75: mod_base = OTHER; note = 2'-Omethylcytosine phosphorothiorate
  modified_base 76: mod_base = OTHER; note = 2'-Omethyladenosine
  misc_feature 1..15: note = RNA
  misc_feature 16: note = DNA
  misc_feature 17..76: note = RNA

SEQ ID NO: 2217 - RNA, 76 nt, synthetic construct; identical to SEQ ID NO: 625
  source 1..76: mol_type = other RNA
  modified_base 1: mod_base = OTHER; note = 2'-Omethylguanosine phosphorothiorate
  modified_base 2: mod_base = OTHER; note = 2'-Omethylguanosine phosphorothiorate
  modified_base 45: mod_base = OTHER; note = Guanosine phosphorothiorate
  modified_base 46: mod_base = OTHER; note = 2'-O-(2-Methoxyethyl) guanosine
  modified_base 74: mod_base = OTHER; note = Cytosine phosphorothiorate
  modified_base 75: mod_base = OTHER; note = 2'-Omethylcytosine

SEQ ID NO: 2218 - RNA, 76 nt, synthetic construct; identical to SEQ ID NO: 625
  source 1..76: mol_type = other RNA
  modified_base 1: mod_base = OTHER; note = 2'-Omethylguanosine phosphorothiorate
  modified_base 2: mod_base = OTHER; note = 2'-Omethylguanosine phosphorothiorate
  modified_base 18: mod_base = OTHER; note = Guanosine phosphorothiorate
  modified_base 19: mod_base = OTHER; note = 2'-O-(2-Methoxyethyl) adenosine
  modified_base 52: mod_base = OTHER; note = Guanosine phosphorothiorate
  modified_base 53: mod_base = OTHER; note = 2'-Omethylguanosine
  modified_base 74: mod_base = OTHER; note = Cytosine phosphorothiorate
  modified_base 75: mod_base = OTHER; note = 2'-Omethylcytosine phosphorothiorate
  modified_base 76: mod_base = OTHER; note = 2'-Omethyladenosine

SEQ ID NO: 2219 - RNA, 76 nt, synthetic construct; identical to SEQ ID NO: 625
  source 1..76: mol_type = other RNA
  modified_base 1: mod_base = OTHER; note = 2'-Omethylguanosine phosphorothiorate
  modified_base 2: mod_base = OTHER; note = 2'-Omethylguanosine
  modified_base 13: mod_base = OTHER; note = 2'-fluorocytosine
  modified_base 74: mod_base = OTHER; note = Cytosine phosphorothiorate
  modified_base 75: mod_base = OTHER; note = 2'-Omethylcytosine

SEQ ID NO: 2220 - DNA, 76 bp, synthetic construct; identical to SEQ ID NO: 1924
  source 1..76: mol_type = other DNA
  modified_base 1: mod_base = OTHER; note = 2'-Omethylguanosine phosphorothiorate
  modified_base 2: mod_base = OTHER; note = 2'-Omethylguanosine phosphorothiorate
  modified_base 42: mod_base = OTHER; note = Adenosine phosphorothiorate
  modified_base 50: mod_base = OTHER; note = Cytosine phosphorothiorate
  modified_base 59: mod_base = OTHER; note = 2'-fluoroguanosine
  modified_base 74: mod_base = OTHER; note = Cytosine phosphorothiorate
  modified_base 75: mod_base = OTHER; note = 2'-Omethylcytosine phosphorothiorate
  modified_base 76: mod_base = OTHER; note = 2'-Omethyladenosine
  misc_feature 1..42: note = RNA
  misc_feature 43: note = DNA
  misc_feature 44..50: note = RNA
  misc_feature 51: note = DNA
  misc_feature 52..76: note = RNA

SEQ ID NO: 2221 - RNA, 76 nt, synthetic construct; identical to SEQ ID NO: 625
  source 1..76: mol_type = other RNA
  modified_base 1: mod_base = OTHER; note = 2'-Omethylguanosine phosphorothiorate
  modified_base 2: mod_base = OTHER; note = 2'-Omethylguanosine phosphorothiorate
  modified_base 15: mod_base = OTHER; note = Adenosine phosphorothiorate
  modified_base 33: mod_base = OTHER; note = Uridine phosphorothiorate
  modified_base 34: mod_base = OTHER; note = 2'-fluorouridine
  modified_base 74: mod_base = OTHER; note = 2'-fluorocytosine phosphorothiorate
  modified_base 75: mod_base = OTHER; note = 2'-Omethylcytosine phosphorothiorate
  modified_base 76: mod_base = OTHER; note = 2'-Omethyladenosine

SEQ ID NO: 2222 - RNA, 76 nt, synthetic construct; identical to SEQ ID NO: 625
  source 1..76: mol_type = other RNA
  modified_base 1: mod_base = OTHER; note = 2'-Omethylguanosine phosphorothiorate
  modified_base 2: mod_base = OTHER; note = 2'-Omethylguanosine phosphorothiorate
  modified_base 17: mod_base = OTHER; note = Guanosine phosphorothiorate
  modified_base 25: mod_base = OTHER; note = 2'-fluorocytosine
  modified_base 57: mod_base = OTHER; note = 2'-O-(2-Methoxyethyl) guanosine
  modified_base 74: mod_base = OTHER; note = Cytosine phosphorothiorate
  modified_base 75: mod_base = OTHER; note = 2'-Omethylcytosine

SEQ ID NO: 2223 - RNA, 76 nt, synthetic construct; identical to SEQ ID NO: 625
  source 1..76: mol_type = other RNA
  modified_base 1: mod_base = OTHER; note = 2'-Omethylguanosine phosphorothiorate
  modified_base 2: mod_base = OTHER; note = 2'-Omethylguanosine phosphorothiorate
  modified_base 22: mod_base = OTHER; note = Guanosine phosphorothiorate
  modified_base 23: mod_base = OTHER; note = 2'-Omethylcytosine
  modified_base 66: mod_base = OTHER; note = Cytosine phosphorothiorate
  modified_base 67: mod_base = OTHER; note = 2'-Omethylguanosine
  modified_base 74: mod_base = OTHER; note = Cytosine phosphorothiorate
  modified_base 75: mod_base = OTHER; note = 2'-Omethylcytosine
  modified_base 76: mod_base = OTHER; note = 2'-O-(2-Methoxyethyl) adenosine

SEQ ID NO: 2224 - RNA, 76 nt, synthetic construct; identical to SEQ ID NO: 625
  source 1..76: mol_type = other RNA
  modified_base 1: mod_base = OTHER; note = 2'-Omethylguanosine phosphorothiorate
  modified_base 2: mod_base = OTHER; note = 2'-Omethylguanosine phosphorothiorate
  modified_base 33: mod_base = OTHER; note = 2'-fluorouridine
  modified_base 53: mod_base = OTHER; note = 2'-Omethylguanosine
  modified_base 74: mod_base = OTHER; note = Cytosine phosphorothiorate
  modified_base 75: mod_base = OTHER; note = 2'-Omethylcytosine phosphorothiorate
  modified_base 76: mod_base = OTHER; note = 2'-Omethyladenosine

SEQ ID NO: 2225 - RNA, 76 nt, synthetic construct; identical to SEQ ID NO: 625
  source 1..76: mol_type = other RNA
  modified_base 1: mod_base = OTHER; note = 2'-Omethylguanosine phosphorothiorate
  modified_base 2: mod_base = OTHER; note = 2'-Omethylguanosine phosphorothiorate
  modified_base 20: mod_base = OTHER; note = Uridine phosphorothiorate
  modified_base 21: mod_base = OTHER; note = 2'-Omethyladenosine
  modified_base 49: mod_base = OTHER; note = 2'-fluorocytosine
  modified_base 66: mod_base = OTHER; note = 2'-fluorocytosine
  modified_base 74: mod_base = OTHER; note = Cytosine phosphorothiorate
  modified_base 75: mod_base = OTHER; note = 2'-Omethylcytosine phosphorothiorate
  modified_base 76: mod_base = OTHER; note = 2'-Omethyladenosine

SEQ ID NO: 2226 - DNA, 76 bp, synthetic construct; identical to SEQ ID NO: 1924
  source 1..76: mol_type = other DNA
  modified_base 1: mod_base = OTHER; note = 2'-Omethylguanosine phosphorothiorate
  modified_base 2: mod_base = OTHER; note = 2'-Omethylguanosine phosphorothiorate
  modified_base 15: mod_base = OTHER; note = Adenosine phosphorothiorate
  modified_base 33: mod_base = OTHER; note = Uridine phosphorothiorate
  modified_base 34: mod_base = OTHER; note = 2'-O-(2-Methoxyethyl) thymine
  modified_base 58: mod_base = OTHER; note = Adenosine phosphorothiorate
  modified_base 59: mod_base = OTHER; note = 2'-fluoroguanosine
  modified_base 74: mod_base = OTHER; note = Cytosine phosphorothiorate
  modified_base 75: mod_base = OTHER; note = 2'-Omethylcytosine phosphorothiorate
  modified_base 76: mod_base = OTHER; note = 2'-Omethyladenosine
  misc_feature 1..15: note = RNA
  misc_feature 16: note = DNA
  misc_feature 17..76: note = RNA

SEQ ID NO: 2227-2229 - skipped (3 entries)

SEQ ID NO: 2230 - RNA, 76 nt, synthetic construct; identical to SEQ ID NO: 625
  source 1..76: mol_type = other RNA
  modified_base 1: mod_base = OTHER; note = 2'-Omethylguanosine phosphorothiorate
  modified_base 2: mod_base = OTHER; note = 2'-Omethylguanosine
  modified_base 64: mod_base = OTHER; note = Guanosine phosphorothiorate
  modified_base 65: mod_base = OTHER; note = 2'-fluoroguanosine
  modified_base 74: mod_base = OTHER; note = Cytosine phosphorothiorate
  modified_base 75: mod_base = OTHER; note = 2'-Omethylcytosine phosphorothiorate
  modified_base 76: mod_base = OTHER; note = 2'-Omethyladenosine

SEQ ID NO: 2231 - RNA, 76 nt, synthetic construct; identical to SEQ ID NO: 625
  source 1..76: mol_type = other RNA
  modified_base 1: mod_base = OTHER; note = 2'-Omethylguanosine phosphorothiorate
  modified_base 2: mod_base = OTHER; note = 2'-Omethylguanosine phosphorothiorate
  modified_base 43: mod_base = OTHER; note = Adenosine phosphorothiorate
  modified_base 55: mod_base = OTHER; note = Uridine phosphorothiorate
  modified_base 74: mod_base = OTHER; note = Cytosine phosphorothiorate
  modified_base 75: mod_base = OTHER; note = 2'-Omethylcytosine

SEQ ID NO: 2232 - RNA, 76 nt, synthetic construct; identical to SEQ ID NO: 625
  source 1..76: mol_type = other RNA
  modified_base 1: mod_base = OTHER; note = 2'-Omethylguanosine phosphorothiorate
  modified_base 2: mod_base = OTHER; note = 2'-Omethylguanosine
  modified_base 16: mod_base = OTHER; note = Uridine phosphorothiorate
  modified_base 17: mod_base = OTHER; note = 2'-O-(2-Methoxyethyl) guanosine
  modified_base 25: mod_base = OTHER; note = 2'-fluorocytosine
  modified_base 30: mod_base = OTHER; note = Guanosine phosphorothiorate
  modified_base 44: mod_base = OTHER; note = 2'-fluoroadenosine
  modified_base 52: mod_base = OTHER; note = Guanosine phosphorothiorate
  modified_base 74: mod_base = OTHER; note = Cytosine phosphorothiorate
  modified_base 75: mod_base = OTHER; note = 2'-Omethylcytosine

SEQ ID NO: 2233 - RNA, 76 nt, synthetic construct; identical to SEQ ID NO: 625
  source 1..76: mol_type = other RNA
  modified_base 1: mod_base = OTHER; note = 2'-Omethylguanosine phosphorothiorate
  modified_base 2: mod_base = OTHER; note = 2'-Omethylguanosine
  modified_base 13: mod_base = OTHER; note = Cytosine phosphorothiorate
  modified_base 14: mod_base = OTHER; note = 2'-fluoroadenosine
  modified_base 21: mod_base = OTHER; note = Adenosine phosphorothiorate
  modified_base 52: mod_base = OTHER; note = Guanosine phosphorothiorate
  modified_base 74: mod_base = OTHER; note = Cytosine phosphorothiorate
  modified_base 75: mod_base = OTHER; note = 2'-Omethylcytosine phosphorothiorate
  modified_base 76: mod_base = OTHER; note = 2'-Omethyladenosine

SEQ ID NO: 2234 - skipped

SEQ ID NO: 2235 - RNA, 76 nt, synthetic construct; identical to SEQ ID NO: 625
  source 1..76: mol_type = other RNA
  modified_base 1: mod_base = OTHER; note = 2'-Omethylguanosine phosphorothiorate
  modified_base 2: mod_base = OTHER; note = 2'-Omethylguanosine
  modified_base 20: mod_base = OTHER; note = Uridine phosphorothiorate
  modified_base 21: mod_base = OTHER; note = 2'-fluoroadenosine
  modified_base 33: mod_base = OTHER; note = 2'-fluorouridine
  modified_base 54: mod_base = OTHER; note = 2'-Omethyluridine
  modified_base 68: mod_base = OTHER; note = 2'-fluoroguanosine
  modified_base 74: mod_base = OTHER; note = 2'-fluorocytosine phosphorothiorate
  modified_base 75: mod_base = OTHER; note = 2'-Omethylcytosine

SEQ ID NO: 2236 - DNA, 76 bp, synthetic construct; identical to SEQ ID NO: 1924
  source 1..76: mol_type = other DNA
  modified_base 1: mod_base = OTHER; note = 2'-Omethylguanosine phosphorothiorate
  modified_base 2: mod_base = OTHER; note = 2'-Omethylguanosine phosphorothiorate
  modified_base 21: mod_base = OTHER; note = Adenosine phosphorothiorate
  modified_base 44: mod_base = OTHER; note = Adenosine phosphorothiorate
  modified_base 45: mod_base = OTHER; note = 2'-fluoroguanosine
  modified_base 74: mod_base = OTHER; note = Cytosine phosphorothiorate
  modified_base 75: mod_base = OTHER; note = 2'-Omethylcytosine
  misc_feature 1..21: note = RNA
  misc_feature 22: note = DNA
  misc_feature 23..76: note = RNA

SEQ ID NO: 2237 - skipped

SEQ ID NO: 2238 - RNA, 76 nt, synthetic construct; identical to SEQ ID NO: 625
  source 1..76: mol_type = other RNA
  modified_base 1: mod_base = OTHER; note = 2'-Omethylguanosine phosphorothiorate
  modified_base 2: mod_base = OTHER; note = 2'-Omethylguanosine phosphorothiorate
  modified_base 66: mod_base = OTHER; note = Cytosine phosphorothiorate
  modified_base 67: mod_base = OTHER; note = 2'-fluoroguanosine
  modified_base 74: mod_base = OTHER; note = Cytosine phosphorothiorate
  modified_base 75: mod_base = OTHER; note = 2'-Omethylcytosine phosphorothiorate
  modified_base 76: mod_base = OTHER; note = 2'-Omethyladenosine

SEQ ID NO: 2239 - RNA, 76 nt, synthetic construct; identical to SEQ ID NO: 625
  source 1..76: mol_type = other RNA
  modified_base 1: mod_base = OTHER; note = 2'-Omethylguanosine phosphorothiorate
  modified_base 2: mod_base = OTHER; note = 2'-Omethylguanosine phosphorothiorate
  modified_base 11: mod_base = OTHER; note = 2'-fluorocytosine
  modified_base 19: mod_base = OTHER; note = 2'-fluoroadenosine
  modified_base 26: mod_base = OTHER; note = Adenosine phosphorothiorate
  modified_base 27: mod_base = OTHER; note = 2'-O-(2-Methoxyethyl) thymine
  modified_base 40: mod_base = OTHER; note = Uridine phosphorothiorate
  modified_base 41: mod_base = OTHER; note = 2'-Omethylcytosine
  modified_base 48: mod_base = OTHER; note = Uridine phosphorothiorate
  modified_base 49: mod_base = OTHER; note = 2'-fluorocytosine
  modified_base 61: mod_base = OTHER; note = 2'-fluorocytosine
  modified_base 74: mod_base = OTHER; note = Cytosine phosphorothiorate
  modified_base 75: mod_base = OTHER; note = 2'-Omethylcytosine phosphorothiorate
  modified_base 76: mod_base = OTHER; note = 2'-Omethyladenosine

SEQ ID NO: 2240 - DNA, 76 bp, synthetic construct; identical to SEQ ID NO: 1924
  source 1..76: mol_type = other DNA
  modified_base 1: mod_base = OTHER; note = 2'-Omethylguanosine phosphorothiorate
  modified_base 2: mod_base = OTHER; note = 2'-Omethylguanosine
  modified_base 11: mod_base = OTHER; note = 2'-fluorocytosine
  modified_base 20: mod_base = OTHER; note = Uridine phosphorothiorate
  modified_base 21: mod_base = OTHER; note = 2'-fluoroadenosine
  modified_base 74: mod_base = OTHER; note = Cytosine phosphorothiorate
  modified_base 75: mod_base = OTHER; note = 2'-Omethylcytosine
  misc_feature 1..75: note = RNA
  misc_feature 76: note = DNA

SEQ ID NO: 2241 - RNA, 76 nt, synthetic construct; identical to SEQ ID NO: 625
  source 1..76: mol_type = other RNA
  modified_base 1: mod_base = OTHER; note = 2'-Omethylguanosine
  modified_base 14: mod_base = OTHER; note = 2'-Omethyladenosine
  modified_base 16: mod_base = OTHER; note = 2'-Omethyluridine
  modified_base 17: mod_base = OTHER; note = 2'-Omethylguanosine
  modified_base 18: mod_base = OTHER; note = 2'-Omethylguanosine
  modified_base 19: mod_base = OTHER; note = 2'-fluoroadenosine
  modified_base 20: mod_base = OTHER; note = 2'-Omethyluridine
  modified_base 50: mod_base = OTHER; note = 2'-Omethylcytosine
  modified_base 52: mod_base = OTHER; note = 2'-Omethylguanosine
  modified_base 73: mod_base = OTHER; note = 2'-Omethylguanosine

SEQ ID NO: 2242 - RNA, 76 nt, synthetic construct; identical to SEQ ID NO: 625
  source 1..76: mol_type = other RNA
  modified_base 1: mod_base = OTHER; note = 2'-Omethylguanosine
  modified_base 14: mod_base = OTHER; note = 2'-Omethyladenosine
  modified_base 15: mod_base = OTHER; note = 2'-fluoroadenosine
  modified_base 16: mod_base = OTHER; note = 2'-Omethyluridine
  modified_base 17: mod_base = OTHER; note = 2'-Omethylguanosine
  modified_base 18: mod_base = OTHER; note = 2'-Omethylguanosine
  modified_base 19: mod_base = OTHER; note = 2'-fluoroadenosine
  modified_base 20: mod_base = OTHER; note = 2'-Omethyluridine
  modified_base 50: mod_base = OTHER; note = 2'-Omethylcytosine
  modified_base 52: mod_base = OTHER; note = 2'-Omethylguanosine
  modified_base 73: mod_base = OTHER; note = 2'-Omethylguanosine

SEQ ID NO: 2243 - RNA, 76 nt, synthetic construct; identical to SEQ ID NO: 625
  source 1..76: mol_type = other RNA
  modified_base 1: mod_base = OTHER; note = 2'-Omethylguanosine
  modified_base 14: mod_base = OTHER; note = 2'-Omethyladenosine
  modified_base 15: mod_base = OTHER; note = 2'-fluoroadenosine
  modified_base 16: mod_base = OTHER; note = 2'-Omethyluridine
  modified_base 17: mod_base = OTHER; note = 2'-Omethylguanosine
  modified_base 18: mod_base = OTHER; note = 2'-Omethylguanosine
  modified_base 19: mod_base = OTHER; note = 2'-fluoroadenosine
  modified_base 20: mod_base = OTHER; note = 2'-Omethyluridine
  modified_base 21: mod_base = OTHER; note = 2'-fluoroadenosine
  modified_base 50: mod_base = OTHER; note = 2'-Omethylcytosine
  modified_base 52: mod_base = OTHER; note = 2'-Omethylguanosine
  modified_base 73: mod_base = OTHER; note = 2'-Omethylguanosine

SEQ ID NO: 2244 - RNA, 76 nt, synthetic construct; identical to SEQ ID NO: 625
  source 1..76: mol_type = other RNA
  modified_base 1: mod_base = OTHER; note = 2'-Omethylguanosine
  modified_base 14: mod_base = OTHER; note = 2'-Omethyladenosine
  modified_base 15: mod_base = OTHER; note = 2'-Omethyladenosine
  modified_base 16: mod_base = OTHER; note = 2'-Omethyluridine
  modified_base 17: mod_base = OTHER; note = 2'-Omethylguanosine
  modified_base 18: mod_base = OTHER; note = 2'-Omethylguanosine
  modified_base 20: mod_base = OTHER; note = 2'-Omethyluridine
  modified_base 41: mod_base = OTHER; note = 2'-Omethylcytosine
  modified_base 42: mod_base = OTHER; note = 2'-Omethyladenosine
  modified_base 43: mod_base = OTHER; note = 2'-Omethyladenosine
  modified_base 44: mod_base = OTHER; note = 2'-Omethyladenosine
  modified_base 50: mod_base = OTHER; note = 2'-Omethylcytosine
  modified_base 52: mod_base = OTHER; note = 2'-Omethylguanosine
  modified_base 73: mod_base = OTHER; note = 2'-Omethylguanosine

SEQ ID NO: 2245 - RNA, 76 nt, synthetic construct; identical to SEQ ID NO: 625
  source 1..76: mol_type = other RNA
  modified_base 1: mod_base = OTHER; note = 2'-Omethylguanosine
  modified_base 14: mod_base = OTHER; note = 2'-Omethyladenosine
  modified_base 15: mod_base = OTHER; note = 2'-Omethyladenosine
  modified_base 16: mod_base = OTHER; note = 2'-Omethyluridine
  modified_base 17: mod_base = OTHER; note = 2'-Omethylguanosine
  modified_base 18: mod_base = OTHER; note = 2'-Omethylguanosine
  modified_base 20: mod_base = OTHER; note = 2'-Omethyluridine
  modified_base 41: mod_base = OTHER; note = 2'-Omethylcytosine
  modified_base 42: mod_base = OTHER; note = 2'-Omethyladenosine
  modified_base 43: mod_base = OTHER; note = 2'-Omethyladenosine
  modified_base 44: mod_base = OTHER; note = 2'-fluoroadenosine
  modified_base 50: mod_base = OTHER; note = 2'-Omethylcytosine
  modified_base 52: mod_base = OTHER; note = 2'-Omethylguanosine
  modified_base 73: mod_base = OTHER; note = 2'-Omethylguanosine

SEQ ID NO: 2246 - RNA, 76 nt, synthetic construct; identical to SEQ ID NO: 625
  source 1..76: mol_type = other RNA
  modified_base 1: mod_base = OTHER; note = 2'-Omethylguanosine
  modified_base 14: mod_base = OTHER; note = 2'-Omethyladenosine
  modified_base 15: mod_base = OTHER; note = 2'-Omethyladenosine
  modified_base 16: mod_base = OTHER; note = 2'-Omethyluridine
  modified_base 17: mod_base = OTHER; note = 2'-Omethylguanosine
  modified_base 18: mod_base = OTHER; note = 2'-Omethylguanosine
  modified_base 20: mod_base = OTHER; note = 2'-Omethyluridine
  modified_base 41: mod_base = OTHER; note = 2'-fluorocytosine
  modified_base 42: mod_base = OTHER; note = 2'-Omethyladenosine
  modified_base 43: mod_base = OTHER; note = 2'-Omethyladenosine
  modified_base 44: mod_base = OTHER; note = 2'-fluoroadenosine
  modified_base 50: mod_base = OTHER; note = 2'-Omethylcytosine
  modified_base 52: mod_base = OTHER; note = 2'-Omethylguanosine
  modified_base 73: mod_base = OTHER; note = 2'-Omethylguanosine

SEQ ID NO: 2247 - RNA, 76 nt, synthetic construct; identical to SEQ ID NO: 625
  source 1..76: mol_type = other RNA
  modified_base 1: mod_base = OTHER; note = 2'-Omethylguanosine
  modified_base 14: mod_base = OTHER; note = 2'-Omethyladenosine
  modified_base 15: mod_base = OTHER; note = 2'-Omethyladenosine
  modified_base 16: mod_base = OTHER; note = 2'-Omethyluridine
  modified_base 17: mod_base = OTHER; note = 2'-Omethylguanosine
  modified_base 18: mod_base = OTHER; note = 2'-Omethylguanosine
  modified_base 20: mod_base = OTHER; note = 2'-Omethyluridine
  modified_base 33: mod_base = OTHER; note = 2'-fluorouridine
  modified_base 35: mod_base = OTHER; note = Cytosine phosphorothiorate
  modified_base 37: mod_base = OTHER; note = Adenosine phosphorothiorate
  modified_base 38: mod_base = OTHER; note = Adenosine phosphorothiorate
  modified_base 50: mod_base = OTHER; note = 2'-Omethylcytosine
  modified_base 52: mod_base = OTHER; note = 2'-Omethylguanosine
  modified_base 73: mod_base = OTHER; note = 2'-Omethylguanosine

SEQ ID NO: 2248 - RNA, 76 nt, synthetic construct; identical to SEQ ID NO: 625
  source 1..76: mol_type = other RNA
  modified_base 1: mod_base = OTHER; note = 2'-Omethylguanosine
  modified_base 17: mod_base = OTHER; note = 2'-Omethylguanosine
  modified_base 18: mod_base = OTHER; note = 2'-Omethylguanosine
  modified_base 33: mod_base = OTHER; note = 2'-fluorouridine
  modified_base 35: mod_base = OTHER; note = Cytosine phosphorothiorate
  modified_base 37: mod_base = OTHER; note = Adenosine phosphorothiorate
  modified_base 38: mod_base = OTHER; note = Adenosine phosphorothiorate
  modified_base 41: mod_base = OTHER; note = 2'-Omethylcytosine
  modified_base 42: mod_base = OTHER; note = 2'-Omethyladenosine
  modified_base 43: mod_base = OTHER; note = 2'-Omethyladenosine
  modified_base 44: mod_base = OTHER; note = 2'-Omethyladenosine
  modified_base 50: mod_base = OTHER; note = 2'-Omethylcytosine
  modified_base 52: mod_base = OTHER; note = 2'-Omethylguanosine
  modified_base 73: mod_base = OTHER; note = 2'-Omethylguanosine

SEQ ID NO: 2249 - RNA, 76 nt, synthetic construct; identical to SEQ ID NO: 625
  source 1..76: mol_type = other RNA
  modified_base 1: mod_base = OTHER; note = 2'-Omethylguanosine
  modified_base 14: mod_base = OTHER; note = 2'-Omethyladenosine
  modified_base 15: mod_base = OTHER; note = 2'-Omethyladenosine
  modified_base 16: mod_base = OTHER; note = 2'-Omethyluridine
  modified_base 17: mod_base = OTHER; note = 2'-Omethylguanosine
  modified_base 18: mod_base = OTHER; note = 2'-Omethylguanosine
  modified_base 20: mod_base = OTHER; note = 2'-Omethyluridine
  modified_base 33: mod_base = OTHER; note = 2'-fluorouridine
  modified_base 35: mod_base = OTHER; note = Cytosine phosphorothiorate
  modified_base 37: mod_base = OTHER; note = Adenosine phosphorothiorate
  modified_base 38: mod_base = OTHER; note = Adenosine phosphorothiorate
  modified_base 41: mod_base = OTHER; note = 2'-Omethylcytosine
  modified_base 42: mod_base = OTHER; note = 2'-Omethyladenosine
  modified_base 43: mod_base = OTHER; note = 2'-Omethyladenosine
  modified_base 44: mod_base = OTHER; note = 2'-Omethyladenosine
  modified_base 50: mod_base = OTHER; note = 2'-Omethylcytosine
  modified_base 52: mod_base = OTHER; note = 2'-Omethylguanosine
  modified_base 73: mod_base = OTHER; note = 2'-Omethylguanosine

SEQ ID NO: 2250 - RNA, 76 nt, synthetic construct; identical to SEQ ID NO: 625
  source 1..76: mol_type = other RNA
  modified_base 1: mod_base = OTHER; note = 2'-Omethylguanosine
  modified_base 14: mod_base = OTHER; note = 2'-Omethyladenosine
  modified_base 15: mod_base = OTHER; note = 2'-fluoroadenosine
  modified_base 16: mod_base = OTHER; note = 2'-Omethyluridine
  modified_base 17: mod_base = OTHER; note = 2'-Omethylguanosine
  modified_base 18: mod_base = OTHER; note = 2'-Omethylguanosine
  modified_base 19: mod_base = OTHER; note = 2'-fluoroadenosine
  modified_base 20: mod_base = OTHER; note = 2'-Omethyluridine
  modified_base 33: mod_base = OTHER; note = 2'-fluorouridine
  modified_base 35: mod_base = OTHER; note = Cytosine phosphorothiorate
  modified_base 37: mod_base = OTHER; note = Adenosine phosphorothiorate
  modified_base 38: mod_base = OTHER; note = Adenosine phosphorothiorate
  modified_base 41: mod_base = OTHER; note = 2'-Omethylcytosine
  modified_base 42: mod_base = OTHER; note = 2'-Omethyladenosine
  modified_base 43: mod_base = OTHER; note = 2'-Omethyladenosine
  modified_base 44: mod_base = OTHER; note = 2'-Omethyladenosine
  modified_base 50: mod_base = OTHER; note = 2'-Omethylcytosine
  modified_base 52: mod_base = OTHER; note = 2'-Omethylguanosine
  modified_base 73: mod_base = OTHER; note = 2'-Omethylguanosine

SEQ ID NO: 2251 - RNA, 76 nt, synthetic construct; identical to SEQ ID NO: 625
  source 1..76: mol_type = other RNA
  modified_base 1: mod_base = OTHER; note = 2'-Omethylguanosine
  modified_base 2: mod_base = OTHER; note = 2'-Omethylguanosine
  modified_base 3: mod_base = OTHER; note = 2'-Omethylcytosine
  modified_base 4: mod_base = OTHER; note = 2'-Omethyluridine
  modified_base 5: mod_base = OTHER; note = 2'-Omethylcytosine
  modified_base 6: mod_base = OTHER; note = 2'-Omethylcytosine
  modified_base 14: mod_base = OTHER; note = 2'-Omethyladenosine
  modified_base 15: mod_base = OTHER; note = 2'-Omethyladenosine
  modified_base 16: mod_base = OTHER; note = 2'-Omethyluridine
  modified_base 17: mod_base = OTHER; note = 2'-Omethylguanosine
  modified_base 18: mod_base = OTHER; note = 2'-Omethylguanosine
  modified_base 20: mod_base = OTHER; note = 2'-Omethyluridine
  modified_base 25: mod_base = OTHER; note = 2'-Omethylcytosine
  modified_base 41: mod_base = OTHER; note = 2'-Omethylcytosine
  modified_base 42: mod_base = OTHER; note = 2'-Omethyladenosine
  modified_base 43: mod_base = OTHER; note = 2'-Omethyladenosine
  modified_base 44: mod_base = OTHER; note = 2'-Omethyladenosine
  modified_base 49: mod_base = OTHER; note = 2'-Omethylcytosine
  modified_base 50: mod_base = OTHER; note = 2'-Omethylcytosine
  modified_base 52: mod_base = OTHER; note = 2'-Omethylguanosine
  modified_base 54: mod_base = OTHER; note = Uridine phosphorothiorate
  modified_base 55: mod_base = OTHER; note = Uridine phosphorothiorate
  modified_base 61: mod_base = OTHER; note = 2'-Omethylcytosine
  modified_base 65: mod_base = OTHER; note = 2'-Omethylguanosine
  modified_base 73: mod_base = OTHER; note = 2'-Omethylguanosine

SEQ ID NO: 2252 - RNA, 76 nt, synthetic construct; identical to SEQ ID NO: 625
  source 1..76: mol_type = other RNA
  modified_base 1: mod_base = OTHER; note = 2'-Omethylguanosine
  modified_base 2: mod_base = OTHER; note = 2'-Omethylguanosine
  modified_base 3: mod_base = OTHER; note = 2'-Omethylcytosine
  modified_base 4: mod_base = OTHER; note = 2'-Omethyluridine
  modified_base 5: mod_base = OTHER; note = 2'-Omethylcytosine
  modified_base 6: mod_base = OTHER; note = 2'-Omethylcytosine
  modified_base 14: mod_base = OTHER; note = 2'-Omethyladenosine
  modified_base 15: mod_base = OTHER; note = 2'-Omethyladenosine
  modified_base 16: mod_base = OTHER; note = 2'-Omethyluridine
  modified_base 17: mod_base = OTHER; note = 2'-Omethylguanosine
  modified_base 18: mod_base = OTHER; note = 2'-Omethylguanosine
  modified_base 20: mod_base = OTHER; note = 2'-Omethyluridine
  modified_base 25: mod_base = OTHER; note = 2'-Omethylcytosine
  modified_base 41: mod_base = OTHER; note = 2'-fluorocytosine
  modified_base 42: mod_base = OTHER; note = 2'-Omethyladenosine
  modified_base 43: mod_base = OTHER; note = 2'-Omethyladenosine
  modified_base 44: mod_base = OTHER; note = 2'-fluoroadenosine
  modified_base 49: mod_base = OTHER; note = 2'-Omethylcytosine
  modified_base 50: mod_base = OTHER; note = 2'-Omethylcytosine
  modified_base 52: mod_base = OTHER; note = 2'-Omethylguanosine
  modified_base 54: mod_base = OTHER; note = Uridine phosphorothiorate
  modified_base 55: mod_base = OTHER; note = Uridine phosphorothiorate
  modified_base 61: mod_base = OTHER; note = 2'-Omethylcytosine
  modified_base 65: mod_base = OTHER; note = 2'-Omethylguanosine
  modified_base 73: mod_base = OTHER; note = 2'-Omethylguanosine

SEQ ID NO: 2253 - RNA, 76 nt, synthetic construct; identical to SEQ ID NO: 625
  source 1..76: mol_type = other RNA
  modified_base 1: mod_base = OTHER; note = 2'-Omethylguanosine
  modified_base 2: mod_base = OTHER; note = 2'-Omethylguanosine
  modified_base 3: mod_base = OTHER; note = 2'-Omethylcytosine
  modified_base 4: mod_base = OTHER; note = 2'-Omethyluridine
  modified_base 5: mod_base = OTHER; note = 2'-Omethylcytosine
  modified_base 6: mod_base = OTHER; note = 2'-Omethylcytosine
  modified_base 14: mod_base = OTHER; note = 2'-Omethyladenosine
  modified_base 15: mod_base = OTHER; note = 2'-Omethyladenosine
  modified_base 16: mod_base = OTHER; note = 2'-Omethyluridine
  modified_base 17: mod_base = OTHER; note = 2'-Omethylguanosine
  modified_base 18: mod_base = OTHER; note = 2'-Omethylguanosine
  modified_base 20: mod_base = OTHER; note = 2'-Omethyluridine
  modified_base 25: mod_base = OTHER; note = 2'-Omethylcytosine
  modified_base 41: mod_base = OTHER; note = 2'-Omethylcytosine
  modified_base 42: mod_base = OTHER; note = 2'-Omethyladenosine
  modified_base 43: mod_base = OTHER; note = 2'-Omethyladenosine
  modified_base 44: mod_base = OTHER; note = 2'-fluoroadenosine
  modified_base 49: mod_base = OTHER; note = 2'-Omethylcytosine
  modified_base 50: mod_base = OTHER; note = 2'-Omethylcytosine
  modified_base 52: mod_base = OTHER; note = 2'-Omethylguanosine
  modified_base 54: mod_base = OTHER; note = Uridine phosphorothiorate
  modified_base 55: mod_base = OTHER; note = Uridine phosphorothiorate
  modified_base 61: mod_base = OTHER; note = 2'-Omethylcytosine
  modified_base 65: mod_base = OTHER; note = 2'-Omethylguanosine
  modified_base 73: mod_base = OTHER; note = 2'-Omethylguanosine

SEQ ID NO: 2254 - RNA, 76 nt, synthetic construct; identical to SEQ ID NO: 625
  source 1..76: mol_type = other RNA
  modified_base 1: mod_base = OTHER; note = 2'-Omethylguanosine
  modified_base 2: mod_base = OTHER; note = 2'-Omethylguanosine
  modified_base 3: mod_base = OTHER; note = 2'-Omethylcytosine
  modified_base 4: mod_base = OTHER; note = 2'-Omethyluridine
  modified_base 5: mod_base = OTHER; note = 2'-Omethylcytosine
  modified_base 6: mod_base = OTHER; note = 2'-Omethylcytosine
  modified_base 16: mod_base = OTHER; note = 2'-Omethyluridine
  modified_base 17: mod_base = OTHER; note = 2'-Omethylguanosine
  modified_base 18: mod_base = OTHER; note = 2'-Omethylguanosine
  modified_base 20: mod_base = OTHER; note = 2'-Omethyluridine
  modified_base 25: mod_base = OTHER; note = 2'-Omethylcytosine
  modified_base 33: mod_base = OTHER; note = 2'-fluorouridine
  modified_base 35: mod_base = OTHER; note = Cytosine phosphorothiorate
  modified_base 37: mod_base = OTHER; note = Adenosine phosphorothiorate
  modified_base 38: mod_base = OTHER; note = Adenosine phosphorothiorate
  modified_base 41: mod_base = OTHER; note = 2'-Omethylcytosine
  modified_base 42: mod_base = OTHER; note = 2'-Omethyladenosine
  modified_base 43: mod_base = OTHER; note = 2'-Omethyladenosine
  modified_base 44: mod_base = OTHER; note = 2'-Omethyladenosine
  modified_base 49: mod_base = OTHER; note = 2'-Omethylcytosine
  modified_base 50: mod_base = OTHER; note = 2'-Omethylcytosine
  modified_base 52: mod_base = OTHER; note = 2'-Omethylguanosine
  modified_base 54: mod_base = OTHER; note = Uridine phosphorothiorate
  modified_base 55: mod_base = OTHER; note = Uridine phosphorothiorate
  modified_base 61: mod_base = OTHER; note = 2'-Omethylcytosine
  modified_base 65: mod_base = OTHER; note = 2'-Omethylguanosine
  modified_base 73: mod_base = OTHER; note = 2'-Omethylguanosine

SEQ ID NO: 2255 - RNA, 76 nt, synthetic construct; identical to SEQ ID NO: 625
  source 1..76: mol_type = other RNA
  modified_base 1: mod_base = OTHER; note = 2'-Omethylguanosine
  modified_base 2: mod_base = OTHER; note = 2'-Omethylguanosine
  modified_base 3: mod_base = OTHER; note = 2'-Omethylcytosine
  modified_base 4: mod_base = OTHER; note = 2'-Omethyluridine
  modified_base 5: mod_base = OTHER; note = 2'-Omethylcytosine
  modified_base 6: mod_base = OTHER; note = 2'-Omethylcytosine
  modified_base 16: mod_base = OTHER; note = 2'-Omethyluridine
  modified_base 17: mod_base = OTHER; note = 2'-Omethylguanosine
  modified_base 18: mod_base = OTHER; note = 2'-Omethylguanosine
  modified_base 20: mod_base = OTHER; note = 2'-Omethyluridine
  modified_base 25: mod_base = OTHER; note = 2'-Omethylcytosine
  modified_base 33: mod_base = OTHER; note = 2'-fluorouridine
  modified_base 35: mod_base = OTHER; note = Cytosine phosphorothiorate
  modified_base 37: mod_base = OTHER; note = Adenosine phosphorothiorate
  modified_base 38: mod_base = OTHER; note = Adenosine phosphorothiorate
  modified_base 41: mod_base = OTHER; note = 2'-fluorocytosine
  modified_base 42: mod_base = OTHER; note = 2'-Omethyladenosine
  modified_base 43: mod_base = OTHER; note = 2'-Omethyladenosine
  modified_base 44: mod_base = OTHER; note = 2'-fluoroadenosine
  modified_base 49: mod_base = OTHER; note = 2'-Omethylcytosine
  modified_base 50: mod_base = OTHER; note = 2'-Omethylcytosine
  modified_base 52: mod_base = OTHER; note = 2'-Omethylguanosine
  modified_base 54: mod_base = OTHER; note = Uridine phosphorothiorate
  modified_base 55: mod_base = OTHER; note = Uridine phosphorothiorate
  modified_base 61: mod_base = OTHER; note = 2'-Omethylcytosine
  modified_base 65: mod_base = OTHER; note = 2'-Omethylguanosine
  modified_base 73: mod_base = OTHER; note = 2'-Omethylguanosine

SEQ ID NO: 2256 - RNA, 76 nt, synthetic construct; identical to SEQ ID NO: 625
  source 1..76: mol_type = other RNA
  modified_base 1: mod_base = OTHER; note = 2'-Omethylguanosine
  modified_base 2: mod_base = OTHER; note = 2'-Omethylguanosine
  modified_base 3: mod_base = OTHER; note = 2'-Omethylcytosine
  modified_base 4: mod_base = OTHER; note = 2'-Omethyluridine
  modified_base 5: mod_base = OTHER; note = 2'-Omethylcytosine
  modified_base 6: mod_base = OTHER; note = 2'-Omethylcytosine
  modified_base 16: mod_base = OTHER; note = 2'-Omethyluridine
  modified_base 17: mod_base = OTHER; note = 2'-Omethylguanosine
  modified_base 18: mod_base = OTHER; note = 2'-Omethylguanosine
  modified_base 20: mod_base = OTHER; note = 2'-Omethyluridine
  modified_base 25: mod_base = OTHER; note = 2'-Omethylcytosine
  modified_base 33: mod_base = OTHER; note = 2'-fluorouridine
  modified_base 35: mod_base = OTHER; note = Cytosine phosphorothiorate
  modified_base 37: mod_base = OTHER; note = Adenosine phosphorothiorate
  modified_base 38: mod_base = OTHER; note = Adenosine phosphorothiorate
  modified_base 41: mod_base = OTHER; note = 2'-Omethylcytosine
  modified_base 42: mod_base = OTHER; note = 2'-Omethyladenosine
  modified_base 43: mod_base = OTHER; note = 2'-Omethyladenosine
  modified_base 44: mod_base = OTHER; note = 2'-fluoroadenosine
  modified_base 49: mod_base = OTHER; note = 2'-Omethylcytosine
  modified_base 50: mod_base = OTHER; note = 2'-Omethylcytosine
  modified_base 52: mod_base = OTHER; note = 2'-Omethylguanosine
  modified_base 54: mod_base = OTHER; note = Uridine phosphorothiorate
  modified_base 55: mod_base = OTHER; note = Uridine phosphorothiorate
  modified_base 61: mod_base = OTHER; note = 2'-Omethylcytosine
  modified_base 65: mod_base = OTHER; note = 2'-Omethylguanosine
  modified_base 73: mod_base = OTHER; note = 2'-Omethylguanosine

SEQ ID NO: 2257 - RNA, 76 nt, synthetic construct; identical to SEQ ID NO: 625
  source 1..76: mol_type = other RNA
  modified_base 1: mod_base = OTHER; note = 2'-Omethylguanosine
  modified_base 2: mod_base = OTHER; note = 2'-Omethylguanosine
  modified_base 3: mod_base = OTHER; note = 2'-Omethylcytosine
  modified_base 4: mod_base = OTHER; note = 2'-Omethyluridine
  modified_base 5: mod_base = OTHER; note = 2'-Omethylcytosine
  modified_base 6: mod_base = OTHER; note = 2'-Omethylcytosine
  modified_base 14: mod_base = OTHER; note = 2'-Omethyladenosine
  modified_base 15: mod_base = OTHER; note = 2'-Omethyladenosine
  modified_base 16: mod_base = OTHER; note = 2'-Omethyluridine
  modified_base 17: mod_base = OTHER; note = 2'-Omethylguanosine
  modified_base 18: mod_base = OTHER; note = 2'-Omethylguanosine
  modified_base 20: mod_base = OTHER; note = 2'-Omethyluridine
  modified_base 25: mod_base = OTHER; note = 2'-Omethylcytosine
  modified_base 33: mod_base = OTHER; note = 2'-fluorouridine
  modified_base 35: mod_base = OTHER; note = Cytosine phosphorothiorate
  modified_base 37: mod_base = OTHER; note = Adenosine phosphorothiorate
  modified_base 38: mod_base = OTHER; note = Adenosine phosphorothiorate
  modified_base 49: mod_base = OTHER; note = 2'-Omethylcytosine
  modified_base 50: mod_base = OTHER; note = 2'-Omethylcytosine
  modified_base 52: mod_base = OTHER; note = 2'-Omethylguanosine
  modified_base 54: mod_base = OTHER; note = Uridine phosphorothiorate
  modified_base 55: mod_base = OTHER; note = Uridine phosphorothiorate
  modified_base 61: mod_base = OTHER; note = 2'-Omethylcytosine
  modified_base 65: mod_base = OTHER; note = 2'-Omethylguanosine
  modified_base 73: mod_base = OTHER; note = 2'-Omethylguanosine

SEQ ID NO: 2258 - RNA, 76 nt, synthetic construct; identical to SEQ ID NO: 625
  source 1..76: mol_type = other RNA
  modified_base 1: mod_base = OTHER; note = 2'-Omethylguanosine
  modified_base 2: mod_base = OTHER; note = 2'-Omethylguanosine
  modified_base 3: mod_base = OTHER; note = 2'-Omethylcytosine
  modified_base 4: mod_base = OTHER; note = 2'-Omethyluridine
  modified_base 5: mod_base = OTHER; note = 2'-Omethylcytosine
  modified_base 6: mod_base = OTHER; note = 2'-Omethylcytosine
  modified_base 14: mod_base = OTHER; note = 2'-Omethyladenosine
  modified_base 15: mod_base = OTHER; note = 2'-Omethyladenosine
  modified_base 16: mod_base = OTHER; note = 2'-Omethyluridine
  modified_base 17: mod_base = OTHER; note = 2'-Omethylguanosine
  modified_base 18: mod_base = OTHER; note = 2'-Omethylguanosine
  modified_base 20: mod_base = OTHER; note = 2'-Omethyluridine
  modified_base 25: mod_base = OTHER; note = 2'-Omethylcytosine
  modified_base 33: mod_base = OTHER; note = 2'-fluorouridine
  modified_base 35: mod_base = OTHER; note = Cytosine phosphorothiorate
  modified_base 37: mod_base = OTHER; note = Adenosine phosphorothiorate
  modified_base 38: mod_base = OTHER; note = Adenosine phosphorothiorate
  modified_base 41: mod_base = OTHER; note = 2'-Omethylcytosine
  modified_base 42: mod_base = OTHER; note = 2'-Omethyladenosine
  modified_base 43: mod_base = OTHER; note = 2'-Omethyladenosine
  modified_base 44: mod_base = OTHER; note = 2'-Omethyladenosine
  modified_base 49: mod_base = OTHER; note = 2'-Omethylcytosine
  modified_base 50: mod_base = OTHER; note = 2'-Omethylcytosine
  modified_base 52: mod_base = OTHER; note = 2'-Omethylguanosine
  modified_base 54: mod_base = OTHER; note = Uridine phosphorothiorate
  modified_base 55: mod_base = OTHER; note = Uridine phosphorothiorate
  modified_base 61: mod_base = OTHER; note = 2'-Omethylcytosine
  modified_base 65: mod_base = OTHER; note = 2'-Omethylguanosine
  modified_base 73: mod_base = OTHER; note = 2'-Omethylguanosine

SEQ ID NO: 2259 - RNA, 76 nt, synthetic construct; identical to SEQ ID NO: 625
  source 1..76: mol_type = other RNA
  modified_base 1: mod_base = OTHER; note = 2'-Omethylguanosine
  modified_base 2: mod_base = OTHER; note = 2'-Omethylguanosine
  modified_base 3: mod_base = OTHER; note = 2'-Omethylcytosine
  modified_base 4: mod_base = OTHER; note = 2'-Omethyluridine
  modified_base 5: mod_base = OTHER; note = 2'-Omethylcytosine
  modified_base 6: mod_base = OTHER; note = 2'-Omethylcytosine
  modified_base 14: mod_base = OTHER; note = 2'-Omethyladenosine
  modified_base 15: mod_base = OTHER; note = 2'-Omethyladenosine
  modified_base 16: mod_base = OTHER; note = 2'-Omethyluridine
  modified_base 17: mod_base = OTHER; note = 2'-Omethylguanosine
  modified_base 18: mod_base = OTHER; note = 2'-Omethylguanosine
  modified_base 20: mod_base = OTHER; note = 2'-Omethyluridine
  modified_base 25: mod_base = OTHER; note = 2'-Omethylcytosine
  modified_base 33: mod_base = OTHER; note = 2'-fluorouridine
  modified_base 35: mod_base = OTHER; note = Cytosine phosphorothiorate
  modified_base 37: mod_base = OTHER; note = Adenosine phosphorothiorate
  modified_base 38: mod_base = OTHER; note = Adenosine phosphorothiorate
  modified_base 41: mod_base = OTHER; note = 2'-fluorocytosine
  modified_base 42: mod_base = OTHER; note = 2'-Omethyladenosine
  modified_base 43: mod_base = OTHER; note = 2'-Omethyladenosine
  modified_base 44: mod_base = OTHER; note = 2'-fluoroadenosine
  modified_base 49: mod_base = OTHER; note = 2'-Omethylcytosine
  modified_base 50: mod_base = OTHER; note = 2'-Omethylcytosine
  modified_base 52: mod_base = OTHER; note = 2'-Omethylguanosine
  modified_base 54: mod_base = OTHER; note = Uridine phosphorothiorate
  modified_base 55: mod_base = OTHER; note = Uridine phosphorothiorate
  modified_base 61: mod_base = OTHER; note = 2'-Omethylcytosine
  modified_base 65: mod_base = OTHER; note = 2'-Omethylguanosine
  modified_base 73: mod_base = OTHER; note = 2'-Omethylguanosine

SEQ ID NO: 2260 - RNA, 76 nt, synthetic construct; identical to SEQ ID NO: 625
  source 1..76: mol_type = other RNA
  modified_base 1: mod_base = OTHER; note = 2'-Omethylguanosine
  modified_base 2: mod_base = OTHER; note = 2'-Omethylguanosine
  modified_base 3: mod_base = OTHER; note = 2'-Omethylcytosine
  modified_base 4: mod_base = OTHER; note = 2'-Omethyluridine
  modified_base 5: mod_base = OTHER; note = 2'-Omethylcytosine
  modified_base 6: mod_base = OTHER; note = 2'-Omethylcytosine
  modified_base 14: mod_base = OTHER; note = 2'-Omethyladenosine
  modified_base 15: mod_base = OTHER; note = 2'-Omethyladenosine
  modified_base 16: mod_base = OTHER; note = 2'-Omethyluridine
  modified_base 17: mod_base = OTHER; note = 2'-Omethylguanosine
  modified_base 18: mod_base = OTHER; note = 2'-Omethylguanosine
  modified_base 20: mod_base = OTHER; note = 2'-Omethyluridine
  modified_base 25: mod_base = OTHER; note = 2'-Omethylcytosine
  modified_base 33: mod_base = OTHER; note = 2'-fluorouridine
  modified_base 35: mod_base = OTHER; note = Cytosine phosphorothiorate
  modified_base 37: mod_base = OTHER; note = Adenosine phosphorothiorate
  modified_base 38: mod_base = OTHER; note = Adenosine phosphorothiorate
  modified_base 41: mod_base = OTHER; note = 2'-Omethylcytosine
  modified_base 42: mod_base = OTHER; note = 2'-Omethyladenosine
  modified_base 43: mod_base = OTHER; note = 2'-Omethyladenosine
  modified_base 44: mod_base = OTHER; note = 2'-fluoroadenosine
  modified_base 49: mod_base = OTHER; note = 2'-Omethylcytosine
  modified_base 50: mod_base = OTHER; note = 2'-Omethylcytosine
  modified_base 52: mod_base = OTHER; note = 2'-Omethylguanosine
  modified_base 54: mod_base = OTHER; note = Uridine phosphorothiorate
  modified_base 55: mod_base = OTHER; note = Uridine phosphorothiorate
  modified_base 61: mod_base = OTHER; note = 2'-Omethylcytosine
  modified_base 65: mod_base = OTHER; note = 2'-Omethylguanosine
  modified_base 73: mod_base = OTHER; note = 2'-Omethylguanosine

SEQ ID NO: 2261 - RNA, 76 nt, synthetic construct; identical to SEQ ID NO: 625
  source 1..76: mol_type = other RNA
  modified_base 1: mod_base = OTHER; note = 2'-Omethylguanosine
  modified_base 2: mod_base = OTHER; note = 2'-Omethylguanosine
  modified_base 3: mod_base = OTHER; note = 2'-Omethylcytosine
  modified_base 4: mod_base = OTHER; note = 2'-Omethyluridine
  modified_base 5: mod_base = OTHER; note = 2'-Omethylcytosine
  modified_base 6: mod_base = OTHER; note = 2'-Omethylcytosine
  modified_base 14: mod_base = OTHER; note = 2'-Omethyladenosine
  modified_base 15: mod_base = OTHER; note = 2'-Omethyladenosine
  modified_base 16: mod_base = OTHER; note = 2'-Omethyluridine
  modified_base 17: mod_base = OTHER; note = 2'-Omethylguanosine
  modified_base 18: mod_base = OTHER; note = 2'-Omethylguanosine
  modified_base 20: mod_base = OTHER; note = 2'-Omethyluridine
  modified_base 25: mod_base = OTHER; note = 2'-Omethylcytosine
  modified_base 41: mod_base = OTHER; note = 2'-Omethylcytosine
  modified_base 42: mod_base = OTHER; note = 2'-Omethyladenosine
  modified_base 43: mod_base = OTHER; note = 2'-Omethyladenosine
  modified_base 44: mod_base = OTHER; note = 2'-Omethyladenosine
  modified_base 49: mod_base = OTHER; note = 2'-Omethylcytosine
  modified_base 50: mod_base = OTHER; note = 2'-Omethylcytosine
  modified_base 52: mod_base = OTHER; note = 2'-Omethylguanosine
  modified_base 54: mod_base = OTHER; note = 2'-Omethyluridine
  modified_base 55: mod_base = OTHER; note = Uridine phosphorothiorate
  modified_base 56: mod_base = OTHER; note = 2'-Omethylcytosine
  modified_base 57: mod_base = OTHER; note = 2'-fluoroguanosine
  modified_base 59: mod_base = OTHER; note = 2'-Omethylguanosine
  modified_base 61: mod_base = OTHER; note = 2'-Omethylcytosine
  modified_base 65: mod_base = OTHER; note = 2'-Omethylguanosine
  modified_base 73: mod_base = OTHER; note = 2'-Omethylguanosine

SEQ ID NO: 2262 - RNA, 76 nt, synthetic construct; identical to SEQ ID NO: 625
  source 1..76: mol_type = other RNA
  modified_base 1: mod_base = OTHER; note = 2'-Omethylguanosine
  modified_base 2: mod_base = OTHER; note = 2'-Omethylguanosine
  modified_base 3: mod_base = OTHER; note = 2'-Omethylcytosine
  modified_base 4: mod_base = OTHER; note = 2'-Omethyluridine
  modified_base 5: mod_base = OTHER; note = 2'-Omethylcytosine
  modified_base 6: mod_base = OTHER; note = 2'-Omethylcytosine
  modified_base 14: mod_base = OTHER; note = 2'-Omethyladenosine
  modified_base 15: mod_base = OTHER; note = 2'-Omethyladenosine
  modified_base 16: mod_base = OTHER; note = 2'-Omethyluridine
  modified_base 17: mod_base = OTHER; note = 2'-Omethylguanosine
  modified_base 18: mod_base = OTHER; note = 2'-Omethylguanosine
  modified_base 20: mod_base = OTHER; note = 2'-Omethyluridine
  modified_base 25: mod_base = OTHER; note = 2'-Omethylcytosine
  modified_base 41: mod_base = OTHER; note = 2'-fluorocytosine
  modified_base 42: mod_base = OTHER; note = 2'-Omethyladenosine
  modified_base 43: mod_base = OTHER; note = 2'-Omethyladenosine
  modified_base 44: mod_base = OTHER; note = 2'-fluoroadenosine
  modified_base 49: mod_base = OTHER; note = 2'-Omethylcytosine
  modified_base 50: mod_base = OTHER; note = 2'-Omethylcytosine
  modified_base 52: mod_base = OTHER; note = 2'-Omethylguanosine
  modified_base 54: mod_base = OTHER; note = 2'-Omethyluridine
  modified_base 55: mod_base = OTHER; note = Uridine phosphorothiorate
  modified_base 56: mod_base = OTHER; note = 2'-Omethylcytosine
  modified_base 57: mod_base = OTHER; note = 2'-fluoroguanosine
  modified_base 59: mod_base = OTHER; note = 2'-Omethylguanosine
  modified_base 61: mod_base = OTHER; note = 2'-Omethylcytosine
  modified_base 65: mod_base = OTHER; note = 2'-Omethylguanosine
  modified_base 73: mod_base = OTHER; note = 2'-Omethylguanosine

SEQ ID NO: 2263 - RNA, 76 nt, synthetic construct; identical to SEQ ID NO: 625
  source 1..76: mol_type = other RNA
  modified_base 1: mod_base = OTHER; note = 2'-Omethylguanosine
  modified_base 2: mod_base = OTHER; note = 2'-Omethylguanosine
  modified_base 3: mod_base = OTHER; note = 2'-Omethylcytosine
  modified_base 4: mod_base = OTHER; note = 2'-Omethyluridine
  modified_base 5: mod_base = OTHER; note = 2'-Omethylcytosine
  modified_base 6: mod_base = OTHER; note = 2'-Omethylcytosine
  modified_base 16: mod_base = OTHER; note = 2'-Omethyluridine
  modified_base 17: mod_base = OTHER; note = 2'-Omethylguanosine
  modified_base 18: mod_base = OTHER; note = 2'-Omethylguanosine
  modified_base 20: mod_base = OTHER; note = 2'-Omethyluridine
  modified_base 25: mod_base = OTHER; note = 2'-Omethylcytosine
  modified_base 33: mod_base = OTHER; note = 2'-fluorouridine
  modified_base 35: mod_base = OTHER; note = Cytosine phosphorothiorate
  modified_base 37: mod_base = OTHER; note = Adenosine phosphorothiorate
  modified_base 38: mod_base = OTHER; note = Adenosine phosphorothiorate
  modified_base 41: mod_base = OTHER; note = 2'-Omethylcytosine
  modified_base 42: mod_base = OTHER; note = 2'-Omethyladenosine
  modified_base 43: mod_base = OTHER; note = 2'-Omethyladenosine
  modified_base 44: mod_base = OTHER; note = 2'-Omethyladenosine
  modified_base 49: mod_base = OTHER; note = 2'-Omethylcytosine
  modified_base 50: mod_base = OTHER; note = 2'-Omethylcytosine
  modified_base 52: mod_base = OTHER; note = 2'-Omethylguanosine
  modified_base 54: mod_base = OTHER; note = 2'-Omethyluridine
  modified_base 55: mod_base = OTHER; note = Uridine phosphorothiorate
  modified_base 56: mod_base = OTHER; note = 2'-Omethylcytosine
  modified_base 57: mod_base = OTHER; note = 2'-fluoroguanosine
  modified_base 59: mod_base = OTHER; note = 2'-Omethylguanosine
  modified_base 61: mod_base = OTHER; note = 2'-Omethylcytosine
  modified_base 65: mod_base = OTHER; note = 2'-Omethylguanosine
  modified_base 73: mod_base = OTHER; note = 2'-Omethylguanosine

SEQ ID NO: 2264 - RNA, 76 nt, synthetic construct; identical to SEQ ID NO: 625
  source 1..76: mol_type = other RNA
  modified_base 1: mod_base = OTHER; note = 2'-Omethylguanosine
  modified_base 2: mod_base = OTHER; note = 2'-Omethylguanosine
  modified_base 3: mod_base = OTHER; note = 2'-Omethylcytosine
  modified_base 4: mod_base = OTHER; note = 2'-Omethyluridine
  modified_base 5: mod_base = OTHER; note = 2'-Omethylcytosine
  modified_base 6: mod_base = OTHER; note = 2'-Omethylcytosine
  modified_base 16: mod_base = OTHER; note = 2'-Omethyluridine
  modified_base 17: mod_base = OTHER; note = 2'-Omethylguanosine
  modified_base 18: mod_base = OTHER; note = 2'-Omethylguanosine
  modified_base 20: mod_base = OTHER; note = 2'-Omethyluridine
  modified_base 25: mod_base = OTHER; note = 2'-Omethylcytosine
  modified_base 33: mod_base = OTHER; note = 2'-fluorouridine
  modified_base 35: mod_base = OTHER; note = Cytosine phosphorothiorate
  modified_base 37: mod_base = OTHER; note = Adenosine phosphorothiorate
  modified_base 38: mod_base = OTHER; note = Adenosine phosphorothiorate
  modified_base 41: mod_base = OTHER; note = 2'-fluorocytosine
  modified_base 42: mod_base = OTHER; note = 2'-Omethyladenosine
  modified_base 43: mod_base = OTHER; note = 2'-Omethyladenosine
  modified_base 44: mod_base = OTHER; note = 2'-fluoroadenosine
  modified_base 49: mod_base = OTHER; note = 2'-Omethylcytosine
  modified_base 50: mod_base = OTHER; note = 2'-Omethylcytosine
  modified_base 52: mod_base = OTHER; note = 2'-Omethylguanosine
  modified_base 54: mod_base = OTHER; note = 2'-Omethyluridine
  modified_base 55: mod_base = OTHER; note = Uridine phosphorothiorate
  modified_base 56: mod_base = OTHER; note = 2'-Omethylcytosine
  modified_base 57: mod_base = OTHER; note = 2'-fluoroguanosine
  modified_base 59: mod_base = OTHER; note = 2'-Omethylguanosine
  modified_base 61: mod_base = OTHER; note = 2'-Omethylcytosine
  modified_base 65: mod_base = OTHER; note = 2'-Omethylguanosine
  modified_base 73: mod_base = OTHER; note = 2'-Omethylguanosine

SEQ ID NO: 2265 - RNA, 76 nt, synthetic construct; identical to SEQ ID NO: 625
  source 1..76: mol_type = other RNA
  modified_base 1: mod_base = OTHER; note = 2'-Omethylguanosine
  modified_base 2: mod_base = OTHER; note = 2'-Omethylguanosine
  modified_base 3: mod_base = OTHER; note = 2'-Omethylcytosine
  modified_base 4: mod_base = OTHER; note = 2'-Omethyluridine
  modified_base 5: mod_base = OTHER; note = 2'-Omethylcytosine
  modified_base 6: mod_base = OTHER; note = 2'-Omethylcytosine
  modified_base 16: mod_base = OTHER; note = 2'-Omethyluridine
  modified_base 17: mod_base = OTHER; note = 2'-Omethylguanosine
  modified_base 18: mod_base = OTHER; note = 2'-Omethylguanosine
  modified_base 20: mod_base = OTHER; note = 2'-Omethyluridine
  modified_base 25: mod_base = OTHER; note = 2'-Omethylcytosine
  modified_base 33: mod_base = OTHER; note = 2'-fluorouridine
  modified_base 35: mod_base = OTHER; note = Cytosine phosphorothiorate
  modified_base 37: mod_base = OTHER; note = Adenosine phosphorothiorate
  modified_base 38: mod_base = OTHER; note = Adenosine phosphorothiorate
  modified_base 41: mod_base = OTHER; note = 2'-Omethylcytosine
  modified_base 42: mod_base = OTHER; note = 2'-Omethyladenosine
  modified_base 43: mod_base = OTHER; note = 2'-Omethyladenosine
  modified_base 44: mod_base = OTHER; note = 2'-fluoroadenosine
  modified_base 49: mod_base = OTHER; note = 2'-Omethylcytosine
  modified_base 50: mod_base = OTHER; note = 2'-Omethylcytosine
  modified_base 52: mod_base = OTHER; note = 2'-Omethylguanosine
  modified_base 54: mod_base = OTHER; note = 2'-Omethyluridine
  modified_base 55: mod_base = OTHER; note = Uridine phosphorothiorate
  modified_base 56: mod_base = OTHER; note = 2'-Omethylcytosine
  modified_base 57: mod_base = OTHER; note = 2'-fluoroguanosine
  modified_base 59: mod_base = OTHER; note = 2'-Omethylguanosine
  modified_base 61: mod_base = OTHER; note = 2'-Omethylcytosine
  modified_base 65: mod_base = OTHER; note = 2'-Omethylguanosine
  modified_base 73: mod_base = OTHER; note = 2'-Omethylguanosine

SEQ ID NO: 2266 - RNA, 76 nt, synthetic construct; identical to SEQ ID NO: 625
  source 1..76: mol_type = other RNA
  modified_base 1: mod_base = OTHER; note = 2'-Omethylguanosine
  modified_base 2: mod_base = OTHER; note = 2'-Omethylguanosine
  modified_base 3: mod_base = OTHER; note = 2'-Omethylcytosine
  modified_base 4: mod_base = OTHER; note = 2'-Omethyluridine
  modified_base 5: mod_base = OTHER; note = 2'-Omethylcytosine
  modified_base 6: mod_base = OTHER; note = 2'-Omethylcytosine
  modified_base 14: mod_base = OTHER; note = 2'-Omethyladenosine
  modified_base 15: mod_base = OTHER; note = 2'-Omethyladenosine
  modified_base 16: mod_base = OTHER; note = 2'-Omethyluridine
  modified_base 17: mod_base = OTHER; note = 2'-Omethylguanosine
  modified_base 18: mod_base = OTHER; note = 2'-Omethylguanosine
  modified_base 20: mod_base = OTHER; note = 2'-Omethyluridine
  modified_base 25: mod_base = OTHER; note = 2'-Omethylcytosine
  modified_base 33: mod_base = OTHER; note = 2'-fluorouridine
  modified_base 35: mod_base = OTHER; note = Cytosine phosphorothiorate
  modified_base 37: mod_base = OTHER; note = Adenosine phosphorothiorate
  modified_base 38: mod_base = OTHER; note = Adenosine phosphorothiorate
  modified_base 49: mod_base = OTHER; note = 2'-Omethylcytosine
  modified_base 50: mod_base = OTHER; note = 2'-Omethylcytosine
  modified_base 52: mod_base = OTHER; note = 2'-Omethylguanosine
  modified_base 54: mod_base = OTHER; note = 2'-Omethyluridine
  modified_base 55: mod_base = OTHER; note = Uridine phosphorothiorate
  modified_base 56: mod_base = OTHER; note = 2'-Omethylcytosine
  modified_base 57: mod_base = OTHER; note = 2'-fluoroguanosine
  modified_base 59: mod_base = OTHER; note = 2'-Omethylguanosine
  modified_base 61: mod_base = OTHER; note = 2'-Omethylcytosine
  modified_base 65: mod_base = OTHER; note = 2'-Omethylguanosine
  modified_base 73: mod_base = OTHER; note = 2'-Omethylguanosine

SEQ ID NO: 2267 - RNA, 76 nt, synthetic construct; identical to SEQ ID NO: 625
  source 1..76: mol_type = other RNA
  modified_base 1: mod_base = OTHER; note = 2'-Omethylguanosine
  modified_base 2: mod_base = OTHER; note = 2'-Omethylguanosine
  modified_base 3: mod_base = OTHER; note = 2'-Omethylcytosine
  modified_base 4: mod_base = OTHER; note = 2'-Omethyluridine
  modified_base 5: mod_base = OTHER; note = 2'-Omethylcytosine
  modified_base 6: mod_base = OTHER; note = 2'-Omethylcytosine
  modified_base 14: mod_base = OTHER; note = 2'-Omethyladenosine
  modified_base 15: mod_base = OTHER; note = 2'-Omethyladenosine
  modified_base 16: mod_base = OTHER; note = 2'-Omethyluridine
  modified_base 17: mod_base = OTHER; note = 2'-Omethylguanosine
  modified_base 18: mod_base = OTHER; note = 2'-Omethylguanosine
  modified_base 20: mod_base = OTHER; note = 2'-Omethyluridine
  modified_base 25: mod_base = OTHER; note = 2'-Omethylcytosine
  modified_base 33: mod_base = OTHER; note = 2'-fluorouridine
  modified_base 35: mod_base = OTHER; note = Cytosine phosphorothiorate
  modified_base 37: mod_base = OTHER; note = Adenosine phosphorothiorate
  modified_base 38: mod_base = OTHER; note = Adenosine phosphorothiorate
  modified_base 41: mod_base = OTHER; note = 2'-Omethylcytosine
  modified_base 42: mod_base = OTHER; note = 2'-Omethyladenosine
  modified_base 43: mod_base = OTHER; note = 2'-Omethyladenosine
  modified_base 44: mod_base = OTHER; note = 2'-Omethyladenosine
  modified_base 49: mod_base = OTHER; note = 2'-Omethylcytosine
  modified_base 50: mod_base = OTHER; note = 2'-Omethylcytosine
  modified_base 52: mod_base = OTHER; note = 2'-Omethylguanosine
  modified_base 54: mod_base = OTHER; note = 2'-Omethyluridine
  modified_base 55: mod_base = OTHER; note = Uridine phosphorothiorate
  modified_base 56: mod_base = OTHER; note = 2'-Omethylcytosine
  modified_base 57: mod_base = OTHER; note = 2'-fluoroguanosine
  modified_base 59: mod_base = OTHER; note = 2'-Omethylguanosine
  modified_base 61: mod_base = OTHER; note = 2'-Omethylcytosine
  modified_base 65: mod_base = OTHER; note = 2'-Omethylguanosine
  modified_base 73: mod_base = OTHER; note = 2'-Omethylguanosine

SEQ ID NO: 2268 - RNA, 76 nt, synthetic construct; identical to SEQ ID NO: 625
  source 1..76: mol_type = other RNA
  modified_base 1: mod_base = OTHER; note = 2'-Omethylguanosine
  modified_base 2: mod_base = OTHER; note = 2'-Omethylguanosine
  modified_base 3: mod_base = OTHER; note = 2'-Omethylcytosine
  modified_base 4: mod_base = OTHER; note = 2'-Omethyluridine
  modified_base 5: mod_base = OTHER; note = 2'-Omethylcytosine
  modified_base 6: mod_base = OTHER; note = 2'-Omethylcytosine
  modified_base 14: mod_base = OTHER; note = 2'-Omethyladenosine
  modified_base 15: mod_base = OTHER; note = 2'-Omethyladenosine
  modified_base 16: mod_base = OTHER; note = 2'-Omethyluridine
  modified_base 17: mod_base = OTHER; note = 2'-Omethylguanosine
  modified_base 18: mod_base = OTHER; note = 2'-Omethylguanosine
  modified_base 20: mod_base = OTHER; note = 2'-Omethyluridine
  modified_base 25: mod_base = OTHER; note = 2'-Omethylcytosine
  modified_base 33: mod_base = OTHER; note = 2'-fluorouridine
  modified_base 35: mod_base = OTHER; note = Cytosine phosphorothiorate
  modified_base 37: mod_base = OTHER; note = Adenosine phosphorothiorate
  modified_base 38: mod_base = OTHER; note = Adenosine phosphorothiorate
  modified_base 41: mod_base = OTHER; note = 2'-fluorocytosine
  modified_base 42: mod_base = OTHER; note = 2'-Omethyladenosine
  modified_base 43: mod_base = OTHER; note = 2'-Omethyladenosine
  modified_base 44: mod_base = OTHER; note = 2'-fluoroadenosine
  modified_base 49: mod_base = OTHER; note = 2'-Omethylcytosine
  modified_base 50: mod_base = OTHER; note = 2'-Omethylcytosine
  modified_base 52: mod_base = OTHER; note = 2'-Omethylguanosine
  modified_base 54: mod_base = OTHER; note = 2'-Omethyluridine
  modified_base 55: mod_base = OTHER; note = Uridine phosphorothiorate
  modified_base 56: mod_base = OTHER; note = 2'-Omethylcytosine
  modified_base 57: mod_base = OTHER; note = 2'-fluoroguanosine
  modified_base 59: mod_base = OTHER; note = 2'-Omethylguanosine
  modified_base 61: mod_base = OTHER; note = 2'-Omethylcytosine
  modified_base 65: mod_base = OTHER; note = 2'-Omethylguanosine
  modified_base 73: mod_base = OTHER; note = 2'-Omethylguanosine

SEQ ID NO: 2269 - RNA, 76 nt, synthetic construct; identical to SEQ ID NO: 625
  source 1..76: mol_type = other RNA
  modified_base 1: mod_base = OTHER; note = 2'-Omethylguanosine
  modified_base 2: mod_base = OTHER; note = 2'-Omethylguanosine
  modified_base 3: mod_base = OTHER; note = 2'-Omethylcytosine
  modified_base 4: mod_base = OTHER; note = 2'-Omethyluridine
  modified_base 5: mod_base = OTHER; note = 2'-Omethylcytosine
  modified_base 6: mod_base = OTHER; note = 2'-Omethylcytosine
  modified_base 14: mod_base = OTHER; note = 2'-Omethyladenosine
  modified_base 15: mod_base = OTHER; note = 2'-Omethyladenosine
  modified_base 16: mod_base = OTHER; note = 2'-Omethyluridine
  modified_base 17: mod_base = OTHER; note = 2'-Omethylguanosine
  modified_base 18: mod_base = OTHER; note = 2'-Omethylguanosine
  modified_base 20: mod_base = OTHER; note = 2'-Omethyluridine
  modified_base 25: mod_base = OTHER; note = 2'-Omethylcytosine
  modified_base 33: mod_base = OTHER; note = 2'-fluorouridine
  modified_base 35: mod_base = OTHER; note = Cytosine phosphorothiorate
  modified_base 37: mod_base = OTHER; note = Adenosine phosphorothiorate
  modified_base 38: mod_base = OTHER; note = Adenosine phosphorothiorate
  modified_base 41: mod_base = OTHER; note = 2'-Omethylcytosine
  modified_base 42: mod_base = OTHER; note = 2'-Omethyladenosine
  modified_base 43: mod_base = OTHER; note = 2'-Omethyladenosine
  modified_base 44: mod_base = OTHER; note = 2'-fluoroadenosine
  modified_base 49: mod_base = OTHER; note = 2'-Omethylcytosine
  modified_base 50: mod_base = OTHER; note = 2'-Omethylcytosine
  modified_base 52: mod_base = OTHER; note = 2'-Omethylguanosine
  modified_base 54: mod_base = OTHER; note = 2'-Omethyluridine
  modified_base 55: mod_base = OTHER; note = Uridine phosphorothiorate
  modified_base 56: mod_base = OTHER; note = 2'-Omethylcytosine
  modified_base 57: mod_base = OTHER; note = 2'-fluoroguanosine
  modified_base 59: mod_base = OTHER; note = 2'-Omethylguanosine
  modified_base 61: mod_base = OTHER; note = 2'-Omethylcytosine
  modified_base 65: mod_base = OTHER; note = 2'-Omethylguanosine
  modified_base 73: mod_base = OTHER; note = 2'-Omethylguanosine

SEQ ID NO: 2270 - RNA, 76 nt, synthetic construct; identical to SEQ ID NO: 625
  source 1..76: mol_type = other RNA
  modified_base 1: mod_base = OTHER; note = 2'-Omethylguanosine
  modified_base 2: mod_base = OTHER; note = 2'-Omethylguanosine
  modified_base 3: mod_base = OTHER; note = 2'-Omethylcytosine
  modified_base 4: mod_base = OTHER; note = 2'-Omethyluridine
  modified_base 5: mod_base = OTHER; note = 2'-Omethylcytosine
  modified_base 6: mod_base = OTHER; note = 2'-Omethylcytosine
  modified_base 14: mod_base = OTHER; note = 2'-Omethyladenosine
  modified_base 15: mod_base = OTHER; note = 2'-fluoroadenosine
  modified_base 16: mod_base = OTHER; note = 2'-Omethyluridine
  modified_base 17: mod_base = OTHER; note = 2'-Omethylguanosine
  modified_base 18: mod_base = OTHER; note = 2'-Omethylguanosine
  modified_base 20: mod_base = OTHER; note = 2'-Omethyluridine
  modified_base 25: mod_base = OTHER; note = 2'-Omethylcytosine
  modified_base 33: mod_base = OTHER; note = 2'-fluorouridine
  modified_base 35: mod_base = OTHER; note = Cytosine phosphorothiorate
  modified_base 37: mod_base = OTHER; note = Adenosine phosphorothiorate
  modified_base 38: mod_base = OTHER; note = Adenosine phosphorothiorate
  modified_base 41: mod_base = OTHER; note = 2'-Omethylcytosine
  modified_base 42: mod_base = OTHER; note = 2'-Omethyladenosine
  modified_base 43: mod_base = OTHER; note = 2'-Omethyladenosine
  modified_base 44: mod_base = OTHER; note = 2'-Omethyladenosine
  modified_base 49: mod_base = OTHER; note = 2'-Omethylcytosine
  modified_base 50: mod_base = OTHER; note = 2'-Omethylcytosine
  modified_base 52: mod_base = OTHER; note = 2'-Omethylguanosine
  modified_base 54: mod_base = OTHER; note = 2'-Omethyluridine
  modified_base 55: mod_base = OTHER; note = Uridine phosphorothiorate
  modified_base 56: mod_base = OTHER; note = 2'-Omethylcytosine
  modified_base 57: mod_base = OTHER; note = 2'-fluoroguanosine
  modified_base 59: mod_base = OTHER; note = 2'-Omethylguanosine
  modified_base 61: mod_base = OTHER; note = 2'-Omethylcytosine
  modified_base 65: mod_base = OTHER; note = 2'-Omethylguanosine
  modified_base 73: mod_base = OTHER; note = 2'-Omethylguanosine

SEQ ID NO: 2271 - RNA, 76 nt, synthetic construct; identical to SEQ ID NO: 625
  source 1..76: mol_type = other RNA
  modified_base 1: mod_base = OTHER; note = 2'-Omethylguanosine
  modified_base 2: mod_base = OTHER; note = 2'-Omethylguanosine
  modified_base 3: mod_base = OTHER; note = 2'-Omethylcytosine
  modified_base 4: mod_base = OTHER; note = 2'-Omethyluridine
  modified_base 5: mod_base = OTHER; note = 2'-Omethylcytosine
  modified_base 6: mod_base = OTHER; note = 2'-Omethylcytosine
  modified_base 14: mod_base = OTHER; note = 2'-Omethyladenosine
  modified_base 15: mod_base = OTHER; note = 2'-fluoroadenosine
  modified_base 16: mod_base = OTHER; note = 2'-Omethyluridine
  modified_base 17: mod_base = OTHER; note = 2'-Omethylguanosine
  modified_base 18: mod_base = OTHER; note = 2'-Omethylguanosine
  modified_base 19: mod_base = OTHER; note = 2'-fluoroadenosine
  modified_base 20: mod_base = OTHER; note = 2'-Omethyluridine
  modified_base 25: mod_base = OTHER; note = 2'-Omethylcytosine
  modified_base 33: mod_base = OTHER; note = 2'-fluorouridine
  modified_base 35: mod_base = OTHER; note = Cytosine phosphorothiorate
  modified_base 37: mod_base = OTHER; note = Adenosine phosphorothiorate
  modified_base 38: mod_base = OTHER; note = Adenosine phosphorothiorate
  modified_base 41: mod_base = OTHER; note = 2'-Omethylcytosine
  modified_base 42: mod_base = OTHER; note = 2'-Omethyladenosine
  modified_base 43: mod_base = OTHER; note = 2'-Omethyladenosine
  modified_base 44: mod_base = OTHER; note = 2'-Omethyladenosine
  modified_base 49: mod_base = OTHER; note = 2'-Omethylcytosine
  modified_base 50: mod_base = OTHER; note = 2'-Omethylcytosine
  modified_base 52: mod_base = OTHER; note = 2'-Omethylguanosine
  modified_base 54: mod_base = OTHER; note = 2'-Omethyluridine
  modified_base 55: mod_base = OTHER; note = Uridine phosphorothiorate
  modified_base 56: mod_base = OTHER; note = 2'-Omethylcytosine
  modified_base 57: mod_base = OTHER; note = 2'-fluoroguanosine
  modified_base 59: mod_base = OTHER; note = 2'-Omethylguanosine
  modified_base 61: mod_base = OTHER; note = 2'-Omethylcytosine
  modified_base 65: mod_base = OTHER; note = 2'-Omethylguanosine
  modified_base 73: mod_base = OTHER; note = 2'-Omethylguanosine

SEQ ID NO: 2272 - RNA, 76 nt, synthetic construct; identical to SEQ ID NO: 625
  source 1..76: mol_type = other RNA
  modified_base 1: mod_base = OTHER; note = 2'-Omethylguanosine
  modified_base 2: mod_base = OTHER; note = 2'-Omethylguanosine
  modified_base 3: mod_base = OTHER; note = 2'-Omethylcytosine
  modified_base 4: mod_base = OTHER; note = 2'-Omethyluridine
  modified_base 5: mod_base = OTHER; note = 2'-Omethylcytosine
  modified_base 6: mod_base = OTHER; note = 2'-Omethylcytosine
  modified_base 14: mod_base = OTHER; note = 2'-Omethyladenosine
  modified_base 15: mod_base = OTHER; note = 2'-fluoroadenosine
  modified_base 16: mod_base = OTHER; note = 2'-Omethyluridine
  modified_base 17: mod_base = OTHER; note = 2'-Omethylguanosine
  modified_base 18: mod_base = OTHER; note = 2'-Omethylguanosine
  modified_base 20: mod_base = OTHER; note = 2'-Omethyluridine
  modified_base 25: mod_base = OTHER; note = 2'-Omethylcytosine
  modified_base 33: mod_base = OTHER; note = 2'-fluorouridine
  modified_base 35: mod_base = OTHER; note = Cytosine phosphorothiorate
  modified_base 37: mod_base = OTHER; note = Adenosine phosphorothiorate
  modified_base 38: mod_base = OTHER; note = Adenosine phosphorothiorate
  modified_base 41: mod_base = OTHER; note = 2'-fluorocytosine
  modified_base 42: mod_base = OTHER; note = 2'-Omethyladenosine
  modified_base 43: mod_base = OTHER; note = 2'-Omethyladenosine
  modified_base 44: mod_base = OTHER; note = 2'-fluoroadenosine
  modified_base 49: mod_base = OTHER; note = 2'-Omethylcytosine
  modified_base 50: mod_base = OTHER; note = 2'-Omethylcytosine
  modified_base 52: mod_base = OTHER; note = 2'-Omethylguanosine
  modified_base 54: mod_base = OTHER; note = 2'-Omethyluridine
  modified_base 55: mod_base = OTHER; note = Uridine phosphorothiorate
  modified_base 56: mod_base = OTHER; note = 2'-Omethylcytosine
  modified_base 57: mod_base = OTHER; note = 2'-fluoroguanosine
  modified_base 59: mod_base = OTHER; note = 2'-Omethylguanosine
  modified_base 61: mod_base = OTHER; note = 2'-Omethylcytosine
  modified_base 65: mod_base = OTHER; note = 2'-Omethylguanosine
  modified_base 73: mod_base = OTHER; note = 2'-Omethylguanosine

SEQ ID NO: 2273 - RNA, 76 nt, synthetic construct; identical to SEQ ID NO: 625
  source 1..76: mol_type = other RNA
  modified_base 1: mod_base = OTHER; note = 2'-Omethylguanosine
  modified_base 2: mod_base = OTHER; note = 2'-Omethylguanosine
  modified_base 3: mod_base = OTHER; note = 2'-Omethylcytosine
  modified_base 4: mod_base = OTHER; note = 2'-Omethyluridine
  modified_base 5: mod_base = OTHER; note = 2'-Omethylcytosine
  modified_base 6: mod_base = OTHER; note = 2'-Omethylcytosine
  modified_base 14: mod_base = OTHER; note = 2'-Omethyladenosine
  modified_base 15: mod_base = OTHER; note = 2'-fluoroadenosine
  modified_base 16: mod_base = OTHER; note = 2'-Omethyluridine
  modified_base 17: mod_base = OTHER; note = 2'-Omethylguanosine
  modified_base 18: mod_base = OTHER; note = 2'-Omethylguanosine
  modified_base 19: mod_base = OTHER; note = 2'-fluoroadenosine
  modified_base 20: mod_base = OTHER; note = 2'-Omethyluridine
  modified_base 25: mod_base = OTHER; note = 2'-Omethylcytosine
  modified_base 33: mod_base = OTHER; note = 2'-fluorouridine
  modified_base 35: mod_base = OTHER; note = Cytosine phosphorothiorate
  modified_base 37: mod_base = OTHER; note = Adenosine phosphorothiorate
  modified_base 38: mod_base = OTHER; note = Adenosine phosphorothiorate
  modified_base 41: mod_base = OTHER; note = 2'-fluorocytosine
  modified_base 42: mod_base = OTHER; note = 2'-Omethyladenosine
  modified_base 43: mod_base = OTHER; note = 2'-Omethyladenosine
  modified_base 44: mod_base = OTHER; note = 2'-fluoroadenosine
  modified_base 49: mod_base = OTHER; note = 2'-Omethylcytosine
  modified_base 50: mod_base = OTHER; note = 2'-Omethylcytosine
  modified_base 52: mod_base = OTHER; note = 2'-Omethylguanosine
  modified_base 54: mod_base = OTHER; note = 2'-Omethyluridine
  modified_base 55: mod_base = OTHER; note = Uridine phosphorothiorate
  modified_base 56: mod_base = OTHER; note = 2'-Omethylcytosine
  modified_base 57: mod_base = OTHER; note = 2'-fluoroguanosine
  modified_base 59: mod_base = OTHER; note = 2'-Omethylguanosine
  modified_base 61: mod_base = OTHER; note = 2'-Omethylcytosine
  modified_base 65: mod_base = OTHER; note = 2'-Omethylguanosine
  modified_base 73: mod_base = OTHER; note = 2'-Omethylguanosine

SEQ ID NO: 2274 - RNA, 76 nt, synthetic construct; identical to SEQ ID NO: 625
  source 1..76: mol_type = other RNA
  modified_base 1: mod_base = OTHER; note = 2'-Omethylguanosine
  modified_base 2: mod_base = OTHER; note = 2'-Omethylguanosine
  modified_base 3: mod_base = OTHER; note = 2'-Omethylcytosine
  modified_base 4: mod_base = OTHER; note = 2'-Omethyluridine
  modified_base 5: mod_base = OTHER; note = 2'-Omethylcytosine
  modified_base 6: mod_base = OTHER; note = 2'-Omethylcytosine
  modified_base 14: mod_base = OTHER; note = 2'-Omethyladenosine
  modified_base 15: mod_base = OTHER; note = 2'-fluoroadenosine
  modified_base 16: mod_base = OTHER; note = 2'-Omethyluridine
  modified_base 17: mod_base = OTHER; note = 2'-Omethylguanosine
  modified_base 18: mod_base = OTHER; note = 2'-Omethylguanosine
  modified_base 20: mod_base = OTHER; note = 2'-Omethyluridine
  modified_base 25: mod_base = OTHER; note = 2'-Omethylcytosine
  modified_base 33: mod_base = OTHER; note = 2'-fluorouridine
  modified_base 35: mod_base = OTHER; note = Cytosine phosphorothiorate
  modified_base 37: mod_base = OTHER; note = Adenosine phosphorothiorate
  modified_base 38: mod_base = OTHER; note = Adenosine phosphorothiorate
  modified_base 41: mod_base = OTHER; note = 2'-Omethylcytosine
  modified_base 42: mod_base = OTHER; note = 2'-Omethyladenosine
  modified_base 43: mod_base = OTHER; note = 2'-Omethyladenosine
  modified_base 44: mod_base = OTHER; note = 2'-fluoroadenosine
  modified_base 49: mod_base = OTHER; note = 2'-Omethylcytosine
  modified_base 50: mod_base = OTHER; note = 2'-Omethylcytosine
  modified_base 52: mod_base = OTHER; note = 2'-Omethylguanosine
  modified_base 54: mod_base = OTHER; note = 2'-Omethyluridine
  modified_base 55: mod_base = OTHER; note = Uridine phosphorothiorate
  modified_base 56: mod_base = OTHER; note = 2'-Omethylcytosine
  modified_base 57: mod_base = OTHER; note = 2'-fluoroguanosine
  modified_base 59: mod_base = OTHER; note = 2'-Omethylguanosine
  modified_base 61: mod_base = OTHER; note = 2'-Omethylcytosine
  modified_base 65: mod_base = OTHER; note = 2'-Omethylguanosine
  modified_base 73: mod_base = OTHER; note = 2'-Omethylguanosine

SEQ ID NO: 2275 - RNA, 76 nt, synthetic construct; identical to SEQ ID NO: 625
  source 1..76: mol_type = other RNA
  modified_base 1: mod_base = OTHER; note = 2'-Omethylguanosine
  modified_base 2: mod_base = OTHER; note = 2'-Omethylguanosine
  modified_base 3: mod_base = OTHER; note = 2'-Omethylcytosine
  modified_base 4: mod_base = OTHER; note = 2'-Omethyluridine
  modified_base 5: mod_base = OTHER; note = 2'-Omethylcytosine
  modified_base 6: mod_base = OTHER; note = 2'-Omethylcytosine
  modified_base 14: mod_base = OTHER; note = 2'-Omethyladenosine
  modified_base 15: mod_base = OTHER; note = 2'-fluoroadenosine
  modified_base 16: mod_base = OTHER; note = 2'-Omethyluridine
  modified_base 17: mod_base = OTHER; note = 2'-Omethylguanosine
  modified_base 18: mod_base = OTHER; note = 2'-Omethylguanosine
  modified_base 19: mod_base = OTHER; note = 2'-fluoroadenosine
  modified_base 20: mod_base = OTHER; note = 2'-Omethyluridine
  modified_base 25: mod_base = OTHER; note = 2'-Omethylcytosine
  modified_base 33: mod_base = OTHER; note = 2'-fluorouridine
  modified_base 35: mod_base = OTHER; note = Cytosine phosphorothiorate
  modified_base 37: mod_base = OTHER; note = Adenosine phosphorothiorate
  modified_base 38: mod_base = OTHER; note = Adenosine phosphorothiorate
  modified_base 41: mod_base = OTHER; note = 2'-Omethylcytosine
  modified_base 42: mod_base = OTHER; note = 2'-Omethyladenosine
  modified_base 43: mod_base = OTHER; note = 2'-Omethyladenosine
  modified_base 44: mod_base = OTHER; note = 2'-fluoroadenosine
  modified_base 49: mod_base = OTHER; note = 2'-Omethylcytosine
  modified_base 50: mod_base = OTHER; note = 2'-Omethylcytosine
  modified_base 52: mod_base = OTHER; note = 2'-Omethylguanosine
  modified_base 54: mod_base = OTHER; note = 2'-Omethyluridine
  modified_base 55: mod_base = OTHER; note = Uridine phosphorothiorate
  modified_base 56: mod_base = OTHER; note = 2'-Omethylcytosine
  modified_base 57: mod_base = OTHER; note = 2'-fluoroguanosine
  modified_base 59: mod_base = OTHER; note = 2'-Omethylguanosine
  modified_base 61: mod_base = OTHER; note = 2'-Omethylcytosine
  modified_base 65: mod_base = OTHER; note = 2'-Omethylguanosine
  modified_base 73: mod_base = OTHER; note = 2'-Omethylguanosine

SEQ ID NO: 2276 - RNA, 76 nt, synthetic construct; identical to SEQ ID NO: 625
  source 1..76: mol_type = other RNA
  modified_base 1: mod_base = OTHER; note = 2'-Omethylguanosine
  modified_base 2: mod_base = OTHER; note = 2'-Omethylguanosine
  modified_base 3: mod_base = OTHER; note = 2'-Omethylcytosine
  modified_base 4: mod_base = OTHER; note = 2'-Omethyluridine
  modified_base 5: mod_base = OTHER; note = 2'-Omethylcytosine
  modified_base 6: mod_base = OTHER; note = 2'-Omethylcytosine
  modified_base 10: mod_base = OTHER; note = 2'-Omethylguanosine
  modified_base 11: mod_base = OTHER; note = 2'-Omethylcytosine
  modified_base 12: mod_base = OTHER; note = 2'-Omethylguanosine
  modified_base 13: mod_base = OTHER; note = 2'-Omethylcytosine
  modified_base 14: mod_base = OTHER; note = 2'-Omethyladenosine
  modified_base 15: mod_base = OTHER; note = 2'-Omethyladenosine
  modified_base 16: mod_base = OTHER; note = 2'-Omethyluridine
  modified_base 17: mod_base = OTHER; note = 2'-Omethylguanosine
  modified_base 18: mod_base = OTHER; note = 2'-Omethylguanosine
  modified_base 20: mod_base = OTHER; note = 2'-Omethyluridine
  modified_base 25: mod_base = OTHER; note = 2'-Omethylcytosine
  modified_base 41: mod_base = OTHER; note = 2'-Omethylcytosine
  modified_base 42: mod_base = OTHER; note = 2'-Omethyladenosine
  modified_base 43: mod_base = OTHER; note = 2'-Omethyladenosine
  modified_base 44: mod_base = OTHER; note = 2'-Omethyladenosine
  modified_base 49: mod_base = OTHER; note = 2'-Omethylcytosine
  modified_base 50: mod_base = OTHER; note = 2'-Omethylcytosine
  modified_base 52: mod_base = OTHER; note = 2'-Omethylguanosine
  modified_base 54: mod_base = OTHER; note = 2'-Omethyluridine
  modified_base 55: mod_base = OTHER; note = Uridine phosphorothiorate
  modified_base 56: mod_base = OTHER; note = 2'-Omethylcytosine
  modified_base 57: mod_base = OTHER; note = 2'-fluoroguanosine
  modified_base 59: mod_base = OTHER; note = 2'-Omethylguanosine
  modified_base 61: mod_base = OTHER; note = 2'-Omethylcytosine
  modified_base 65: mod_base = OTHER; note = 2'-Omethylguanosine
  modified_base 73: mod_base = OTHER; note = 2'-Omethylguanosine

SEQ ID NO: 2277 - RNA, 76 nt, synthetic construct; identical to SEQ ID NO: 625
  source 1..76: mol_type = other RNA
  modified_base 1: mod_base = OTHER; note = 2'-Omethylguanosine
  modified_base 2: mod_base = OTHER; note = 2'-Omethylguanosine
  modified_base 3: mod_base = OTHER; note = 2'-Omethylcytosine
  modified_base 4: mod_base = OTHER; note = 2'-Omethyluridine
  modified_base 5: mod_base = OTHER; note = 2'-Omethylcytosine
  modified_base 6: mod_base = OTHER; note = 2'-Omethylcytosine
  modified_base 10: mod_base = OTHER; note = 2'-Omethylguanosine
  modified_base 11: mod_base = OTHER; note = 2'-Omethylcytosine
  modified_base 12: mod_base = OTHER; note = 2'-Omethylguanosine
  modified_base 13: mod_base = OTHER; note = 2'-Omethylcytosine
  modified_base 14: mod_base = OTHER; note = 2'-Omethyladenosine
  modified_base 15: mod_base = OTHER; note = 2'-Omethyladenosine
  modified_base 16: mod_base = OTHER; note = 2'-Omethyluridine
  modified_base 17: mod_base = OTHER; note = 2'-Omethylguanosine
  modified_base 18: mod_base = OTHER; note = 2'-Omethylguanosine
  modified_base 20: mod_base = OTHER; note = 2'-Omethyluridine
  modified_base 25: mod_base = OTHER; note = 2'-Omethylcytosine
  modified_base 41: mod_base = OTHER; note = 2'-fluorocytosine
  modified_base 42: mod_base = OTHER; note = 2'-Omethyladenosine
  modified_base 43: mod_base = OTHER; note = 2'-Omethyladenosine
  modified_base 44: mod_base = OTHER; note = 2'-fluoroadenosine
  modified_base 49: mod_base = OTHER; note = 2'-Omethylcytosine
  modified_base 50: mod_base = OTHER; note = 2'-Omethylcytosine
  modified_base 52: mod_base = OTHER; note = 2'-Omethylguanosine
  modified_base 54: mod_base = OTHER; note = 2'-Omethyluridine
  modified_base 55: mod_base = OTHER; note = Uridine phosphorothiorate
  modified_base 56: mod_base = OTHER; note = 2'-Omethylcytosine
  modified_base 57: mod_base = OTHER; note = 2'-fluoroguanosine
  modified_base 59: mod_base = OTHER; note = 2'-Omethylguanosine
  modified_base 61: mod_base = OTHER; note = 2'-Omethylcytosine
  modified_base 65: mod_base = OTHER; note = 2'-Omethylguanosine
  modified_base 73: mod_base = OTHER; note = 2'-Omethylguanosine

SEQ ID NO: 2278 - RNA, 76 nt, synthetic construct; identical to SEQ ID NO: 625
  source 1..76: mol_type = other RNA
  modified_base 1: mod_base = OTHER; note = 2'-Omethylguanosine
  modified_base 2: mod_base = OTHER; note = 2'-Omethylguanosine
  modified_base 3: mod_base = OTHER; note = 2'-Omethylcytosine
  modified_base 4: mod_base = OTHER; note = 2'-Omethyluridine
  modified_base 5: mod_base = OTHER; note = 2'-Omethylcytosine
  modified_base 6: mod_base = OTHER; note = 2'-Omethylcytosine
  modified_base 10: mod_base = OTHER; note = 2'-Omethylguanosine
  modified_base 11: mod_base = OTHER; note = 2'-Omethylcytosine
  modified_base 12: mod_base = OTHER; note = 2'-Omethylguanosine
  modified_base 13: mod_base = OTHER; note = 2'-Omethylcytosine
  modified_base 16: mod_base = OTHER; note = 2'-Omethyluridine
  modified_base 17: mod_base = OTHER; note = 2'-Omethylguanosine
  modified_base 18: mod_base = OTHER; note = 2'-Omethylguanosine
  modified_base 20: mod_base = OTHER; note = 2'-Omethyluridine
  modified_base 25: mod_base = OTHER; note = 2'-Omethylcytosine
  modified_base 33: mod_base = OTHER; note = 2'-fluorouridine
  modified_base 35: mod_base = OTHER; note = Cytosine phosphorothiorate
  modified_base 37: mod_base = OTHER; note = Adenosine phosphorothiorate
  modified_base 38: mod_base = OTHER; note = Adenosine phosphorothiorate
  modified_base 41: mod_base = OTHER; note = 2'-Omethylcytosine
  modified_base 42: mod_base = OTHER; note = 2'-Omethyladenosine
  modified_base 43: mod_base = OTHER; note = 2'-Omethyladenosine
  modified_base 44: mod_base = OTHER; note = 2'-Omethyladenosine
  modified_base 49: mod_base = OTHER; note = 2'-Omethylcytosine
  modified_base 50: mod_base = OTHER; note = 2'-Omethylcytosine
  modified_base 52: mod_base = OTHER; note = 2'-Omethylguanosine
  modified_base 54: mod_base = OTHER; note = 2'-Omethyluridine
  modified_base 55: mod_base = OTHER; note = Uridine phosphorothiorate
  modified_base 56: mod_base = OTHER; note = 2'-Omethylcytosine
  modified_base 57: mod_base = OTHER; note = 2'-fluoroguanosine
  modified_base 59: mod_base = OTHER; note = 2'-Omethylguanosine
  modified_base 61: mod_base = OTHER; note = 2'-Omethylcytosine
  modified_base 65: mod_base = OTHER; note = 2'-Omethylguanosine
  modified_base 73: mod_base = OTHER; note = 2'-Omethylguanosine

SEQ ID NO: 2279 - RNA, 76 nt, synthetic construct; identical to SEQ ID NO: 625
  source 1..76: mol_type = other RNA
  modified_base 1: mod_base = OTHER; note = 2'-Omethylguanosine
  modified_base 2: mod_base = OTHER; note = 2'-Omethylguanosine
  modified_base 3: mod_base = OTHER; note = 2'-Omethylcytosine
  modified_base 4: mod_base = OTHER; note = 2'-Omethyluridine
  modified_base 5: mod_base = OTHER; note = 2'-Omethylcytosine
  modified_base 6: mod_base = OTHER; note = 2'-Omethylcytosine
  modified_base 10: mod_base = OTHER; note = 2'-Omethylguanosine
  modified_base 11: mod_base = OTHER; note = 2'-Omethylcytosine
  modified_base 12: mod_base = OTHER; note = 2'-Omethylguanosine
  modified_base 13: mod_base = OTHER; note = 2'-Omethylcytosine
  modified_base 16: mod_base = OTHER; note = 2'-Omethyluridine
  modified_base 17: mod_base = OTHER; note = 2'-Omethylguanosine
  modified_base 18: mod_base = OTHER; note = 2'-Omethylguanosine
  modified_base 20: mod_base = OTHER; note = 2'-Omethyluridine
  modified_base 25: mod_base = OTHER; note = 2'-Omethylcytosine
  modified_base 33: mod_base = OTHER; note = 2'-fluorouridine
  modified_base 35: mod_base = OTHER; note = Cytosine phosphorothiorate
  modified_base 37: mod_base = OTHER; note = Adenosine phosphorothiorate
  modified_base 38: mod_base = OTHER; note = Adenosine phosphorothiorate
  modified_base 41: mod_base = OTHER; note = 2'-fluorocytosine
  modified_base 42: mod_base = OTHER; note = 2'-Omethyladenosine
  modified_base 43: mod_base = OTHER; note = 2'-Omethyladenosine
  modified_base 44: mod_base = OTHER; note = 2'-fluoroadenosine
  modified_base 49: mod_base = OTHER; note = 2'-Omethylcytosine
  modified_base 50: mod_base = OTHER; note = 2'-Omethylcytosine
  modified_base 52: mod_base = OTHER; note = 2'-Omethylguanosine
  modified_base 54: mod_base = OTHER; note = 2'-Omethyluridine
  modified_base 55: mod_base = OTHER; note = Uridine phosphorothiorate
  modified_base 56: mod_base = OTHER; note = 2'-Omethylcytosine
  modified_base 57: mod_base = OTHER; note = 2'-fluoroguanosine
  modified_base 59: mod_base = OTHER; note = 2'-Omethylguanosine
  modified_base 61: mod_base = OTHER; note = 2'-Omethylcytosine
  modified_base 65: mod_base = OTHER; note = 2'-Omethylguanosine
  modified_base 73: mod_base = OTHER; note = 2'-Omethylguanosine

SEQ ID NO: 2280 - RNA, 76 nt, synthetic construct; identical to SEQ ID NO: 625
  source 1..76: mol_type = other RNA
  modified_base 1: mod_base = OTHER; note = 2'-Omethylguanosine
  modified_base 2: mod_base = OTHER; note = 2'-Omethylguanosine
  modified_base 3: mod_base = OTHER; note = 2'-Omethylcytosine
  modified_base 4: mod_base = OTHER; note = 2'-Omethyluridine
  modified_base 5: mod_base = OTHER; note = 2'-Omethylcytosine
  modified_base 6: mod_base = OTHER; note = 2'-Omethylcytosine
  modified_base 10: mod_base = OTHER; note = 2'-Omethylguanosine
  modified_base 11: mod_base = OTHER; note = 2'-Omethylcytosine
  modified_base 12: mod_base = OTHER; note = 2'-Omethylguanosine
  modified_base 13: mod_base = OTHER; note = 2'-Omethylcytosine
  modified_base 14: mod_base = OTHER; note = 2'-Omethyladenosine
  modified_base 15: mod_base = OTHER; note = 2'-Omethyladenosine
  modified_base 16: mod_base = OTHER; note = 2'-Omethyluridine
  modified_base 17: mod_base = OTHER; note = 2'-Omethylguanosine
  modified_base 18: mod_base = OTHER; note = 2'-Omethylguanosine
  modified_base 20: mod_base = OTHER; note = 2'-Omethyluridine
  modified_base 25: mod_base = OTHER; note = 2'-Omethylcytosine
  modified_base 33: mod_base = OTHER; note = 2'-fluorouridine
  modified_base 35: mod_base = OTHER; note = Cytosine phosphorothiorate
  modified_base 37: mod_base = OTHER; note = Adenosine phosphorothiorate
  modified_base 38: mod_base = OTHER; note = Adenosine phosphorothiorate
  modified_base 49: mod_base = OTHER; note = 2'-Omethylcytosine
  modified_base 50: mod_base = OTHER; note = 2'-Omethylcytosine
  modified_base 52: mod_base = OTHER; note = 2'-Omethylguanosine
  modified_base 54: mod_base = OTHER; note = 2'-Omethyluridine
  modified_base 55: mod_base = OTHER; note = Uridine phosphorothiorate
  modified_base 56: mod_base = OTHER; note = 2'-Omethylcytosine
  modified_base 57: mod_base = OTHER; note = 2'-fluoroguanosine
  modified_base 59: mod_base = OTHER; note = 2'-Omethylguanosine
  modified_base 61: mod_base = OTHER; note = 2'-Omethylcytosine
  modified_base 65: mod_base = OTHER; note = 2'-Omethylguanosine
  modified_base 73: mod_base = OTHER; note = 2'-Omethylguanosine

SEQ ID NO: 2281 - RNA, 76 nt, synthetic construct; identical to SEQ ID NO: 625
  source 1..76: mol_type = other RNA
  modified_base 1: mod_base = OTHER; note = 2'-Omethylguanosine
  modified_base 2: mod_base = OTHER; note = 2'-Omethylguanosine
  modified_base 3: mod_base = OTHER; note = 2'-Omethylcytosine
  modified_base 4: mod_base = OTHER; note = 2'-Omethyluridine
  modified_base 5: mod_base = OTHER; note = 2'-Omethylcytosine
  modified_base 6: mod_base = OTHER; note = 2'-Omethylcytosine
  modified_base 10: mod_base = OTHER; note = 2'-Omethylguanosine
  modified_base 11: mod_base = OTHER; note = 2'-Omethylcytosine
  modified_base 12: mod_base = OTHER; note = 2'-Omethylguanosine
  modified_base 13: mod_base = OTHER; note = 2'-Omethylcytosine
  modified_base 14: mod_base = OTHER; note = 2'-Omethyladenosine
  modified_base 15: mod_base = OTHER; note = 2'-Omethyladenosine
  modified_base 16: mod_base = OTHER; note = 2'-Omethyluridine
  modified_base 17: mod_base = OTHER; note = 2'-Omethylguanosine
  modified_base 18: mod_base = OTHER; note = 2'-Omethylguanosine
  modified_base 20: mod_base = OTHER; note = 2'-Omethyluridine
  modified_base 25: mod_base = OTHER; note = 2'-Omethylcytosine
  modified_base 33: mod_base = OTHER; note = 2'-fluorouridine
  modified_base 35: mod_base = OTHER; note = Cytosine phosphorothiorate
  modified_base 37: mod_base = OTHER; note = Adenosine phosphorothiorate
  modified_base 38: mod_base = OTHER; note = Adenosine phosphorothiorate
  modified_base 41: mod_base = OTHER; note = 2'-Omethylcytosine
  modified_base 42: mod_base = OTHER; note = 2'-Omethyladenosine
  modified_base 43: mod_base = OTHER; note = 2'-Omethyladenosine
  modified_base 44: mod_base = OTHER; note = 2'-Omethyladenosine
  modified_base 49: mod_base = OTHER; note = 2'-Omethylcytosine
  modified_base 50: mod_base = OTHER; note = 2'-Omethylcytosine
  modified_base 52: mod_base = OTHER; note = 2'-Omethylguanosine
  modified_base 54: mod_base = OTHER; note = 2'-Omethyluridine
  modified_base 55: mod_base = OTHER; note = Uridine phosphorothiorate
  modified_base 56: mod_base = OTHER; note = 2'-Omethylcytosine
  modified_base 57: mod_base = OTHER; note = 2'-fluoroguanosine
  modified_base 59: mod_base = OTHER; note = 2'-Omethylguanosine
  modified_base 61: mod_base = OTHER; note = 2'-Omethylcytosine
  modified_base 65: mod_base = OTHER; note = 2'-Omethylguanosine
  modified_base 73: mod_base = OTHER; note = 2'-Omethylguanosine

SEQ ID NO: 2282 - RNA, 76 nt, synthetic construct; identical to SEQ ID NO: 625
  source 1..76: mol_type = other RNA
  modified_base 1: mod_base = OTHER; note = 2'-Omethylguanosine
  modified_base 2: mod_base = OTHER; note = 2'-Omethylguanosine
  modified_base 3: mod_base = OTHER; note = 2'-Omethylcytosine
  modified_base 4: mod_base = OTHER; note = 2'-Omethyluridine
  modified_base 5: mod_base = OTHER; note = 2'-Omethylcytosine
  modified_base 6: mod_base = OTHER; note = 2'-Omethylcytosine
  modified_base 10: mod_base = OTHER; note = 2'-Omethylguanosine
  modified_base 11: mod_base = OTHER; note = 2'-Omethylcytosine
  modified_base 12: mod_base = OTHER; note = 2'-Omethylguanosine
  modified_base 13: mod_base = OTHER; note = 2'-Omethylcytosine
  modified_base 14: mod_base = OTHER; note = 2'-Omethyladenosine
  modified_base 15: mod_base = OTHER; note = 2'-Omethyladenosine
  modified_base 16: mod_base = OTHER; note = 2'-Omethyluridine
  modified_base 17: mod_base = OTHER; note = 2'-Omethylguanosine
  modified_base 18: mod_base = OTHER; note = 2'-Omethylguanosine
  modified_base 20: mod_base = OTHER; note = 2'-Omethyluridine
  modified_base 25: mod_base = OTHER; note = 2'-Omethylcytosine
  modified_base 33: mod_base = OTHER; note = 2'-fluorouridine
  modified_base 35: mod_base = OTHER; note = Cytosine phosphorothiorate
  modified_base 37: mod_base = OTHER; note = Adenosine phosphorothiorate
  modified_base 38: mod_base = OTHER; note = Adenosine phosphorothiorate
  modified_base 41: mod_base = OTHER; note = 2'-fluorocytosine
  modified_base 42: mod_base = OTHER; note = 2'-Omethyladenosine
  modified_base 43: mod_base = OTHER; note = 2'-Omethyladenosine
  modified_base 44: mod_base = OTHER; note = 2'-fluoroadenosine
  modified_base 49: mod_base = OTHER; note = 2'-Omethylcytosine
  modified_base 50: mod_base = OTHER; note = 2'-Omethylcytosine
  modified_base 52: mod_base = OTHER; note = 2'-Omethylguanosine
  modified_base 54: mod_base = OTHER; note = 2'-Omethyluridine
  modified_base 55: mod_base = OTHER; note = Uridine phosphorothiorate
  modified_base 56: mod_base = OTHER; note = 2'-Omethylcytosine
  modified_base 57: mod_base = OTHER; note = 2'-fluoroguanosine
  modified_base 59: mod_base = OTHER; note = 2'-Omethylguanosine
  modified_base 61: mod_base = OTHER; note = 2'-Omethylcytosine
  modified_base 65: mod_base = OTHER; note = 2'-Omethylguanosine
  modified_base 73: mod_base = OTHER; note = 2'-Omethylguanosine

SEQ ID NO: 2283 - RNA, 76 nt, synthetic construct; identical to SEQ ID NO: 625
  source 1..76: mol_type = other RNA
  modified_base 1: mod_base = OTHER; note = 2'-Omethylguanosine
  modified_base 2: mod_base = OTHER; note = 2'-Omethylguanosine
  modified_base 3: mod_base = OTHER; note = 2'-Omethylcytosine
  modified_base 4: mod_base = OTHER; note = 2'-Omethyluridine
  modified_base 5: mod_base = OTHER; note = 2'-Omethylcytosine
  modified_base 6: mod_base = OTHER; note = 2'-Omethylcytosine
  modified_base 10: mod_base = OTHER; note = 2'-Omethylguanosine
  modified_base 11: mod_base = OTHER; note = 2'-Omethylcytosine
  modified_base 12: mod_base = OTHER; note = 2'-Omethylguanosine
  modified_base 13: mod_base = OTHER; note = 2'-Omethylcytosine
  modified_base 14: mod_base = OTHER; note = 2'-Omethyladenosine
  modified_base 15: mod_base = OTHER; note = 2'-fluoroadenosine
  modified_base 16: mod_base = OTHER; note = 2'-Omethyluridine
  modified_base 17: mod_base = OTHER; note = 2'-Omethylguanosine
  modified_base 18: mod_base = OTHER; note = 2'-Omethylguanosine
  modified_base 20: mod_base = OTHER; note = 2'-Omethyluridine
  modified_base 25: mod_base = OTHER; note = 2'-Omethylcytosine
  modified_base 33: mod_base = OTHER; note = 2'-fluorouridine
  modified_base 35: mod_base = OTHER; note = Cytosine phosphorothiorate
  modified_base 37: mod_base = OTHER; note = Adenosine phosphorothiorate
  modified_base 38: mod_base = OTHER; note = Adenosine phosphorothiorate
  modified_base 41: mod_base = OTHER; note = 2'-Omethylcytosine
  modified_base 42: mod_base = OTHER; note = 2'-Omethyladenosine
  modified_base 43: mod_base = OTHER; note = 2'-Omethyladenosine
  modified_base 44: mod_base = OTHER; note = 2'-Omethyladenosine
  modified_base 49: mod_base = OTHER; note = 2'-Omethylcytosine
  modified_base 50: mod_base = OTHER; note = 2'-Omethylcytosine
  modified_base 52: mod_base = OTHER; note = 2'-Omethylguanosine
  modified_base 54: mod_base = OTHER; note = 2'-Omethyluridine
  modified_base 55: mod_base = OTHER; note = Uridine phosphorothiorate
  modified_base 56: mod_base = OTHER; note = 2'-Omethylcytosine
  modified_base 57: mod_base = OTHER; note = 2'-fluoroguanosine
  modified_base 59: mod_base = OTHER; note = 2'-Omethylguanosine
  modified_base 61: mod_base = OTHER; note = 2'-Omethylcytosine
  modified_base 65: mod_base = OTHER; note = 2'-Omethylguanosine
  modified_base 73: mod_base = OTHER; note = 2'-Omethylguanosine

SEQ ID NO: 2284 - RNA, 76 nt, synthetic construct; identical to SEQ ID NO: 625
  source 1..76: mol_type = other RNA
  modified_base 1: mod_base = OTHER; note = 2'-Omethylguanosine
  modified_base 2: mod_base = OTHER; note = 2'-Omethylguanosine
  modified_base 3: mod_base = OTHER; note = 2'-Omethylcytosine
  modified_base 4: mod_base = OTHER; note = 2'-Omethyluridine
  modified_base 5: mod_base = OTHER; note = 2'-Omethylcytosine
  modified_base 6: mod_base = OTHER; note = 2'-Omethylcytosine
  modified_base 10: mod_base = OTHER; note = 2'-Omethylguanosine
  modified_base 11: mod_base = OTHER; note = 2'-Omethylcytosine
  modified_base 12: mod_base = OTHER; note = 2'-Omethylguanosine
  modified_base 13: mod_base = OTHER; note = 2'-Omethylcytosine
  modified_base 14: mod_base = OTHER; note = 2'-Omethyladenosine
  modified_base 15: mod_base = OTHER; note = 2'-fluoroadenosine
  modified_base 16: mod_base = OTHER; note = 2'-Omethyluridine
  modified_base 17: mod_base = OTHER; note = 2'-Omethylguanosine
  modified_base 18: mod_base = OTHER; note = 2'-Omethylguanosine
  modified_base 19: mod_base = OTHER; note = 2'-fluoroadenosine
  modified_base 20: mod_base = OTHER; note = 2'-Omethyluridine
  modified_base 25: mod_base = OTHER; note = 2'-Omethylcytosine
  modified_base 33: mod_base = OTHER; note = 2'-fluorouridine
  modified_base 35: mod_base = OTHER; note = Cytosine phosphorothiorate
  modified_base 37: mod_base = OTHER; note = Adenosine phosphorothiorate
  modified_base 38: mod_base = OTHER; note = Adenosine phosphorothiorate
  modified_base 41: mod_base = OTHER; note = 2'-Omethylcytosine
  modified_base 42: mod_base = OTHER; note = 2'-Omethyladenosine
  modified_base 43: mod_base = OTHER; note = 2'-Omethyladenosine
  modified_base 44: mod_base = OTHER; note = 2'-Omethyladenosine
  modified_base 49: mod_base = OTHER; note = 2'-Omethylcytosine
  modified_base 50: mod_base = OTHER; note = 2'-Omethylcytosine
  modified_base 52: mod_base = OTHER; note = 2'-Omethylguanosine
  modified_base 54: mod_base = OTHER; note = 2'-Omethyluridine
  modified_base 55: mod_base = OTHER; note = Uridine phosphorothiorate
  modified_base 56: mod_base = OTHER; note = 2'-Omethylcytosine
  modified_base 57: mod_base = OTHER; note = 2'-fluoroguanosine
  modified_base 59: mod_base = OTHER; note = 2'-Omethylguanosine
  modified_base 61: mod_base = OTHER; note = 2'-Omethylcytosine
  modified_base 65: mod_base = OTHER; note = 2'-Omethylguanosine
  modified_base 73: mod_base = OTHER; note = 2'-Omethylguanosine

SEQ ID NO: 2285 - RNA, 76 nt, synthetic construct; identical to SEQ ID NO: 625
  source 1..76: mol_type = other RNA
  modified_base 1: mod_base = OTHER; note = 2'-Omethylguanosine
  modified_base 2: mod_base = OTHER; note = 2'-Omethylguanosine
  modified_base 3: mod_base = OTHER; note = 2'-Omethylcytosine
  modified_base 4: mod_base = OTHER; note = 2'-Omethyluridine
  modified_base 5: mod_base = OTHER; note = 2'-Omethylcytosine
  modified_base 6: mod_base = OTHER; note = 2'-Omethylcytosine
  modified_base 14: mod_base = OTHER; note = 2'-Omethyladenosine
  modified_base 15: mod_base = OTHER; note = 2'-Omethyladenosine
  modified_base 16: mod_base = OTHER; note = 2'-Omethyluridine
  modified_base 17: mod_base = OTHER; note = 2'-Omethylguanosine
  modified_base 18: mod_base = OTHER; note = 2'-Omethylguanosine
  modified_base 20: mod_base = OTHER; note = 2'-Omethyluridine
  modified_base 22: mod_base = OTHER; note = 2'-Omethylguanosine
  modified_base 23: mod_base = OTHER; note = 2'-Omethylcytosine
  modified_base 24: mod_base = OTHER; note = 2'-Omethylguanosine
  modified_base 25: mod_base = OTHER; note = 2'-Omethylcytosine
  modified_base 41: mod_base = OTHER; note = 2'-Omethylcytosine
  modified_base 42: mod_base = OTHER; note = 2'-Omethyladenosine
  modified_base 43: mod_base = OTHER; note = 2'-Omethyladenosine
  modified_base 44: mod_base = OTHER; note = 2'-Omethyladenosine
  modified_base 49: mod_base = OTHER; note = 2'-Omethylcytosine
  modified_base 50: mod_base = OTHER; note = 2'-Omethylcytosine
  modified_base 52: mod_base = OTHER; note = 2'-Omethylguanosine
  modified_base 54: mod_base = OTHER; note = 2'-Omethyluridine
  modified_base 55: mod_base = OTHER; note = Uridine phosphorothiorate
  modified_base 56: mod_base = OTHER; note = 2'-Omethylcytosine
  modified_base 57: mod_base = OTHER; note = 2'-fluoroguanosine
  modified_base 59: mod_base = OTHER; note = 2'-Omethylguanosine
  modified_base 61: mod_base = OTHER; note = 2'-Omethylcytosine
  modified_base 65: mod_base = OTHER; note = 2'-Omethylguanosine
  modified_base 73: mod_base = OTHER; note = 2'-Omethylguanosine

SEQ ID NO: 2286 - RNA, 76 nt, synthetic construct; identical to SEQ ID NO: 625
  source 1..76: mol_type = other RNA
  modified_base 1: mod_base = OTHER; note = 2'-Omethylguanosine
  modified_base 2: mod_base = OTHER; note = 2'-Omethylguanosine
  modified_base 3: mod_base = OTHER; note = 2'-Omethylcytosine
  modified_base 4: mod_base = OTHER; note = 2'-Omethyluridine
  modified_base 5: mod_base = OTHER; note = 2'-Omethylcytosine
  modified_base 6: mod_base = OTHER; note = 2'-Omethylcytosine
  modified_base 14: mod_base = OTHER; note = 2'-Omethyladenosine
  modified_base 15: mod_base = OTHER; note = 2'-Omethyladenosine
  modified_base 16: mod_base = OTHER; note = 2'-Omethyluridine
  modified_base 17: mod_base = OTHER; note = 2'-Omethylguanosine
  modified_base 18: mod_base = OTHER; note = 2'-Omethylguanosine
  modified_base 20: mod_base = OTHER; note = 2'-Omethyluridine
  modified_base 22: mod_base = OTHER; note = 2'-Omethylguanosine
  modified_base 23: mod_base = OTHER; note = 2'-Omethylcytosine
  modified_base 24: mod_base = OTHER; note = 2'-Omethylguanosine
  modified_base 25: mod_base = OTHER; note = 2'-Omethylcytosine
  modified_base 41: mod_base = OTHER; note = 2'-fluorocytosine
  modified_base 42: mod_base = OTHER; note = 2'-Omethyladenosine
  modified_base 43: mod_base = OTHER; note = 2'-Omethyladenosine
  modified_base 44: mod_base = OTHER; note = 2'-fluoroadenosine
  modified_base 49: mod_base = OTHER; note = 2'-Omethylcytosine
  modified_base 50: mod_base = OTHER; note = 2'-Omethylcytosine
  modified_base 52: mod_base = OTHER; note = 2'-Omethylguanosine
  modified_base 54: mod_base = OTHER; note = 2'-Omethyluridine
  modified_base 55: mod_base = OTHER; note = Uridine phosphorothiorate
  modified_base 56: mod_base = OTHER; note = 2'-Omethylcytosine
  modified_base 57: mod_base = OTHER; note = 2'-fluoroguanosine
  modified_base 59: mod_base = OTHER; note = 2'-Omethylguanosine
  modified_base 61: mod_base = OTHER; note = 2'-Omethylcytosine
  modified_base 65: mod_base = OTHER; note = 2'-Omethylguanosine
  modified_base 73: mod_base = OTHER; note = 2'-Omethylguanosine

SEQ ID NO: 2287 - RNA, 76 nt, synthetic construct; identical to SEQ ID NO: 625
  source 1..76: mol_type = other RNA
  modified_base 1: mod_base = OTHER; note = 2'-Omethylguanosine
  modified_base 2: mod_base = OTHER; note = 2'-Omethylguanosine
  modified_base 3: mod_base = OTHER; note = 2'-Omethylcytosine
  modified_base 4: mod_base = OTHER; note = 2'-Omethyluridine
  modified_base 5: mod_base = OTHER; note = 2'-Omethylcytosine
  modified_base 6: mod_base = OTHER; note = 2'-Omethylcytosine
  modified_base 16: mod_base = OTHER; note = 2'-Omethyluridine
  modified_base 17: mod_base = OTHER; note = 2'-Omethylguanosine
  modified_base 18: mod_base = OTHER; note = 2'-Omethylguanosine
  modified_base 20: mod_base = OTHER; note = 2'-Omethyluridine
  modified_base 22: mod_base = OTHER; note = 2'-Omethylguanosine
  modified_base 23: mod_base = OTHER; note = 2'-Omethylcytosine
  modified_base 24: mod_base = OTHER; note = 2'-Omethylguanosine
  modified_base 25: mod_base = OTHER; note = 2'-Omethylcytosine
  modified_base 33: mod_base = OTHER; note = 2'-fluorouridine
  modified_base 35: mod_base = OTHER; note = Cytosine phosphorothiorate
  modified_base 37: mod_base = OTHER; note = Adenosine phosphorothiorate
  modified_base 38: mod_base = OTHER; note = Adenosine phosphorothiorate
  modified_base 41: mod_base = OTHER; note = 2'-Omethylcytosine
  modified_base 42: mod_base = OTHER; note = 2'-Omethyladenosine
  modified_base 43: mod_base = OTHER; note = 2'-Omethyladenosine
  modified_base 44: mod_base = OTHER; note = 2'-Omethyladenosine
  modified_base 49: mod_base = OTHER; note = 2'-Omethylcytosine
  modified_base 50: mod_base = OTHER; note = 2'-Omethylcytosine
  modified_base 52: mod_base = OTHER; note = 2'-Omethylguanosine
  modified_base 54: mod_base = OTHER; note = 2'-Omethyluridine
  modified_base 55: mod_base = OTHER; note = Uridine phosphorothiorate
  modified_base 56: mod_base = OTHER; note = 2'-Omethylcytosine
  modified_base 57: mod_base = OTHER; note = 2'-fluoroguanosine
  modified_base 59: mod_base = OTHER; note = 2'-Omethylguanosine
  modified_base 61: mod_base = OTHER; note = 2'-Omethylcytosine
  modified_base 65: mod_base = OTHER; note = 2'-Omethylguanosine
  modified_base 73: mod_base = OTHER; note = 2'-Omethylguanosine

SEQ ID NO: 2288 - RNA, 76 nt, synthetic construct; identical to SEQ ID NO: 625
  source 1..76: mol_type = other RNA
  modified_base 1: mod_base = OTHER; note = 2'-Omethylguanosine
  modified_base 2: mod_base = OTHER; note = 2'-Omethylguanosine
  modified_base 3: mod_base = OTHER; note = 2'-Omethylcytosine
  modified_base 4: mod_base = OTHER; note = 2'-Omethyluridine
  modified_base 5: mod_base = OTHER; note = 2'-Omethylcytosine
  modified_base 6: mod_base = OTHER; note = 2'-Omethylcytosine
  modified_base 16: mod_base = OTHER; note = 2'-Omethyluridine
  modified_base 17: mod_base = OTHER; note = 2'-Omethylguanosine
  modified_base 18: mod_base = OTHER; note = 2'-Omethylguanosine
  modified_base 20: mod_base = OTHER; note = 2'-Omethyluridine
  modified_base 22: mod_base = OTHER; note = 2'-Omethylguanosine
  modified_base 23: mod_base = OTHER; note = 2'-Omethylcytosine
  modified_base 24: mod_base = OTHER; note = 2'-Omethylguanosine
  modified_base 25: mod_base = OTHER; note = 2'-Omethylcytosine
  modified_base 33: mod_base = OTHER; note = 2'-fluorouridine
  modified_base 35: mod_base = OTHER; note = Cytosine phosphorothiorate
  modified_base 37: mod_base = OTHER; note = Adenosine phosphorothiorate
  modified_base 38: mod_base = OTHER; note = Adenosine phosphorothiorate
  modified_base 41: mod_base = OTHER; note = 2'-fluorocytosine
  modified_base 42: mod_base = OTHER; note = 2'-Omethyladenosine
  modified_base 43: mod_base = OTHER; note = 2'-Omethyladenosine
  modified_base 44: mod_base = OTHER; note = 2'-fluoroadenosine
  modified_base 49: mod_base = OTHER; note = 2'-Omethylcytosine
  modified_base 50: mod_base = OTHER; note = 2'-Omethylcytosine
  modified_base 52: mod_base = OTHER; note = 2'-Omethylguanosine
  modified_base 54: mod_base = OTHER; note = 2'-Omethyluridine
  modified_base 55: mod_base = OTHER; note = Uridine phosphorothiorate
  modified_base 56: mod_base = OTHER; note = 2'-Omethylcytosine
  modified_base 57: mod_base = OTHER; note = 2'-fluoroguanosine
  modified_base 59: mod_base = OTHER; note = 2'-Omethylguanosine
  modified_base 61: mod_base = OTHER; note = 2'-Omethylcytosine
  modified_base 65: mod_base = OTHER; note = 2'-Omethylguanosine
  modified_base 73: mod_base = OTHER; note = 2'-Omethylguanosine

SEQ ID NO: 2289 - RNA, 76 nt, synthetic construct; identical to SEQ ID NO: 625
  source 1..76: mol_type = other RNA
  modified_base 1: mod_base = OTHER; note = 2'-Omethylguanosine
  modified_base 2: mod_base = OTHER; note = 2'-Omethylguanosine
  modified_base 3: mod_base = OTHER; note = 2'-Omethylcytosine
  modified_base 4: mod_base = OTHER; note = 2'-Omethyluridine
  modified_base 5: mod_base = OTHER; note = 2'-Omethylcytosine
  modified_base 6: mod_base = OTHER; note = 2'-Omethylcytosine
  modified_base 14: mod_base = OTHER; note = 2'-Omethyladenosine
  modified_base 15: mod_base = OTHER; note = 2'-Omethyladenosine
  modified_base 16: mod_base = OTHER; note = 2'-Omethyluridine
  modified_base 17: mod_base = OTHER; note = 2'-Omethylguanosine
  modified_base 18: mod_base = OTHER; note = 2'-Omethylguanosine
  modified_base 20: mod_base = OTHER; note = 2'-Omethyluridine
  modified_base 22: mod_base = OTHER; note = 2'-Omethylguanosine
  modified_base 23: mod_base = OTHER; note = 2'-Omethylcytosine
  modified_base 24: mod_base = OTHER; note = 2'-Omethylguanosine
  modified_base 25: mod_base = OTHER; note = 2'-Omethylcytosine
  modified_base 33: mod_base = OTHER; note = 2'-fluorouridine
  modified_base 35: mod_base = OTHER; note = Cytosine phosphorothiorate
  modified_base 37: mod_base = OTHER; note = Adenosine phosphorothiorate
  modified_base 38: mod_base = OTHER; note = Adenosine phosphorothiorate
  modified_base 49: mod_base = OTHER; note = 2'-Omethylcytosine
  modified_base 50: mod_base = OTHER; note = 2'-Omethylcytosine
  modified_base 52: mod_base = OTHER; note = 2'-Omethylguanosine
  modified_base 54: mod_base = OTHER; note = 2'-Omethyluridine
  modified_base 55: mod_base = OTHER; note = Uridine phosphorothiorate
  modified_base 56: mod_base = OTHER; note = 2'-Omethylcytosine
  modified_base 57: mod_base = OTHER; note = 2'-fluoroguanosine
  modified_base 59: mod_base = OTHER; note = 2'-Omethylguanosine
  modified_base 61: mod_base = OTHER; note = 2'-Omethylcytosine
  modified_base 65: mod_base = OTHER; note = 2'-Omethylguanosine
  modified_base 73: mod_base = OTHER; note = 2'-Omethylguanosine

SEQ ID NO: 2290 - RNA, 76 nt, synthetic construct; identical to SEQ ID NO: 625
  source 1..76: mol_type = other RNA
  modified_base 1: mod_base = OTHER; note = 2'-Omethylguanosine
  modified_base 2: mod_base = OTHER; note = 2'-Omethylguanosine
  modified_base 3: mod_base = OTHER; note = 2'-Omethylcytosine
  modified_base 4: mod_base = OTHER; note = 2'-Omethyluridine
  modified_base 5: mod_base = OTHER; note = 2'-Omethylcytosine
  modified_base 6: mod_base = OTHER; note = 2'-Omethylcytosine
  modified_base 14: mod_base = OTHER; note = 2'-Omethyladenosine
  modified_base 15: mod_base = OTHER; note = 2'-Omethyladenosine
  modified_base 16: mod_base = OTHER; note = 2'-Omethyluridine
  modified_base 17: mod_base = OTHER; note = 2'-Omethylguanosine
  modified_base 18: mod_base = OTHER; note = 2'-Omethylguanosine
  modified_base 20: mod_base = OTHER; note = 2'-Omethyluridine
  modified_base 22: mod_base = OTHER; note = 2'-Omethylguanosine
  modified_base 23: mod_base = OTHER; note = 2'-Omethylcytosine
  modified_base 24: mod_base = OTHER; note = 2'-Omethylguanosine
  modified_base 25: mod_base = OTHER; note = 2'-Omethylcytosine
  modified_base 33: mod_base = OTHER; note = 2'-fluorouridine
  modified_base 35: mod_base = OTHER; note = Cytosine phosphorothiorate
  modified_base 37: mod_base = OTHER; note = Adenosine phosphorothiorate
  modified_base 38: mod_base = OTHER; note = Adenosine phosphorothiorate
  modified_base 41: mod_base = OTHER; note = 2'-Omethylcytosine
  modified_base 42: mod_base = OTHER; note = 2'-Omethyladenosine
  modified_base 43: mod_base = OTHER; note = 2'-Omethyladenosine
  modified_base 44: mod_base = OTHER; note = 2'-Omethyladenosine
  modified_base 49: mod_base = OTHER; note = 2'-Omethylcytosine
  modified_base 50: mod_base = OTHER; note = 2'-Omethylcytosine
  modified_base 52: mod_base = OTHER; note = 2'-Omethylguanosine
  modified_base 54: mod_base = OTHER; note = 2'-Omethyluridine
  modified_base 55: mod_base = OTHER; note = Uridine phosphorothiorate
  modified_base 56: mod_base = OTHER; note = 2'-Omethylcytosine
  modified_base 57: mod_base = OTHER; note = 2'-fluoroguanosine
  modified_base 59: mod_base = OTHER; note = 2'-Omethylguanosine
  modified_base 61: mod_base = OTHER; note = 2'-Omethylcytosine
  modified_base 65: mod_base = OTHER; note = 2'-Omethylguanosine
  modified_base 73: mod_base = OTHER; note = 2'-Omethylguanosine

SEQ ID NO: 2291 - RNA, 76 nt, synthetic construct; identical to SEQ ID NO: 625
  source 1..76: mol_type = other RNA
  modified_base 1: mod_base = OTHER; note = 2'-Omethylguanosine
  modified_base 2: mod_base = OTHER; note = 2'-Omethylguanosine
  modified_base 3: mod_base = OTHER; note = 2'-Omethylcytosine
  modified_base 4: mod_base = OTHER; note = 2'-Omethyluridine
  modified_base 5: mod_base = OTHER; note = 2'-Omethylcytosine
  modified_base 6: mod_base = OTHER; note = 2'-Omethylcytosine
  modified_base 14: mod_base = OTHER; note = 2'-Omethyladenosine
  modified_base 15: mod_base = OTHER; note = 2'-Omethyladenosine
  modified_base 16: mod_base = OTHER; note = 2'-Omethyluridine
  modified_base 17: mod_base = OTHER; note = 2'-Omethylguanosine
  modified_base 18: mod_base = OTHER; note = 2'-Omethylguanosine
  modified_base 20: mod_base = OTHER; note = 2'-Omethyluridine
  modified_base 22: mod_base = OTHER; note = 2'-Omethylguanosine
  modified_base 23: mod_base = OTHER; note = 2'-Omethylcytosine
  modified_base 24: mod_base = OTHER; note = 2'-Omethylguanosine
  modified_base 25: mod_base = OTHER; note = 2'-Omethylcytosine
  modified_base 33: mod_base = OTHER; note = 2'-fluorouridine
  modified_base 35: mod_base = OTHER; note = Cytosine phosphorothiorate
  modified_base 37: mod_base = OTHER; note = Adenosine phosphorothiorate
  modified_base 38: mod_base = OTHER; note = Adenosine phosphorothiorate
  modified_base 41: mod_base = OTHER; note = 2'-fluorocytosine
  modified_base 42: mod_base = OTHER; note = 2'-Omethyladenosine
  modified_base 43: mod_base = OTHER; note = 2'-Omethyladenosine
  modified_base 44: mod_base = OTHER; note = 2'-fluoroadenosine
  modified_base 49: mod_base = OTHER; note = 2'-Omethylcytosine
  modified_base 50: mod_base = OTHER; note = 2'-Omethylcytosine
  modified_base 52: mod_base = OTHER; note = 2'-Omethylguanosine
  modified_base 54: mod_base = OTHER; note = 2'-Omethyluridine
  modified_base 55: mod_base = OTHER; note = Uridine phosphorothiorate
  modified_base 56: mod_base = OTHER; note = 2'-Omethylcytosine
  modified_base 57: mod_base = OTHER; note = 2'-fluoroguanosine
  modified_base 59: mod_base = OTHER; note = 2'-Omethylguanosine
  modified_base 61: mod_base = OTHER; note = 2'-Omethylcytosine
  modified_base 65: mod_base = OTHER; note = 2'-Omethylguanosine
  modified_base 73: mod_base = OTHER; note = 2'-Omethylguanosine

SEQ ID NO: 2292 - RNA, 76 nt, synthetic construct; identical to SEQ ID NO: 625
  source 1..76: mol_type = other RNA
  modified_base 1: mod_base = OTHER; note = 2'-Omethylguanosine
  modified_base 2: mod_base = OTHER; note = 2'-Omethylguanosine
  modified_base 3: mod_base = OTHER; note = 2'-Omethylcytosine
  modified_base 4: mod_base = OTHER; note = 2'-Omethyluridine
  modified_base 5: mod_base = OTHER; note = 2'-Omethylcytosine
  modified_base 6: mod_base = OTHER; note = 2'-Omethylcytosine
  modified_base 14: mod_base = OTHER; note = 2'-Omethyladenosine
  modified_base 15: mod_base = OTHER; note = 2'-fluoroadenosine
  modified_base 16: mod_base = OTHER; note = 2'-Omethyluridine
  modified_base 17: mod_base = OTHER; note = 2'-Omethylguanosine
  modified_base 18: mod_base = OTHER; note = 2'-Omethylguanosine
  modified_base 20: mod_base = OTHER; note = 2'-Omethyluridine
  modified_base 22: mod_base = OTHER; note = 2'-Omethylguanosine
  modified_base 23: mod_base = OTHER; note = 2'-Omethylcytosine
  modified_base 24: mod_base = OTHER; note = 2'-Omethylguanosine
  modified_base 25: mod_base = OTHER; note = 2'-Omethylcytosine
  modified_base 33: mod_base = OTHER; note = 2'-fluorouridine
  modified_base 35: mod_base = OTHER; note = Cytosine phosphorothiorate
  modified_base 37: mod_base = OTHER; note = Adenosine phosphorothiorate
  modified_base 38: mod_base = OTHER; note = Adenosine phosphorothiorate
  modified_base 41: mod_base = OTHER; note = 2'-Omethylcytosine
  modified_base 42: mod_base = OTHER; note = 2'-Omethyladenosine
  modified_base 43: mod_base = OTHER; note = 2'-Omethyladenosine
  modified_base 44: mod_base = OTHER; note = 2'-Omethyladenosine
  modified_base 49: mod_base = OTHER; note = 2'-Omethylcytosine
  modified_base 50: mod_base = OTHER; note = 2'-Omethylcytosine
  modified_base 52: mod_base = OTHER; note = 2'-Omethylguanosine
  modified_base 54: mod_base = OTHER; note = 2'-Omethyluridine
  modified_base 55: mod_base = OTHER; note = Uridine phosphorothiorate
  modified_base 56: mod_base = OTHER; note = 2'-Omethylcytosine
  modified_base 57: mod_base = OTHER; note = 2'-fluoroguanosine
  modified_base 59: mod_base = OTHER; note = 2'-Omethylguanosine
  modified_base 61: mod_base = OTHER; note = 2'-Omethylcytosine
  modified_base 65: mod_base = OTHER; note = 2'-Omethylguanosine
  modified_base 73: mod_base = OTHER; note = 2'-Omethylguanosine

SEQ ID NO: 2293 - RNA, 76 nt, synthetic construct; identical to SEQ ID NO: 625
  source 1..76: mol_type = other RNA
  modified_base 1: mod_base = OTHER; note = 2'-Omethylguanosine
  modified_base 2: mod_base = OTHER; note = 2'-Omethylguanosine
  modified_base 3: mod_base = OTHER; note = 2'-Omethylcytosine
  modified_base 4: mod_base = OTHER; note = 2'-Omethyluridine
  modified_base 5: mod_base = OTHER; note = 2'-Omethylcytosine
  modified_base 6: mod_base = OTHER; note = 2'-Omethylcytosine
  modified_base 14: mod_base = OTHER; note = 2'-Omethyladenosine
  modified_base 15: mod_base = OTHER; note = 2'-fluoroadenosine
  modified_base 16: mod_base = OTHER; note = 2'-Omethyluridine
  modified_base 17: mod_base = OTHER; note = 2'-Omethylguanosine
  modified_base 18: mod_base = OTHER; note = 2'-Omethylguanosine
  modified_base 19: mod_base = OTHER; note = 2'-fluoroadenosine
  modified_base 20: mod_base = OTHER; note = 2'-Omethyluridine
  modified_base 22: mod_base = OTHER; note = 2'-Omethylguanosine
  modified_base 23: mod_base = OTHER; note = 2'-Omethylcytosine
  modified_base 24: mod_base = OTHER; note = 2'-Omethylguanosine
  modified_base 25: mod_base = OTHER; note = 2'-Omethylcytosine
  modified_base 33: mod_base = OTHER; note = 2'-fluorouridine
  modified_base 35: mod_base = OTHER; note = Cytosine phosphorothiorate
  modified_base 37: mod_base = OTHER; note = Adenosine phosphorothiorate
  modified_base 38: mod_base = OTHER; note = Adenosine phosphorothiorate
  modified_base 41: mod_base = OTHER; note = 2'-Omethylcytosine
  modified_base 42: mod_base = OTHER; note = 2'-Omethyladenosine
  modified_base 43: mod_base = OTHER; note = 2'-Omethyladenosine
  modified_base 44: mod_base = OTHER; note = 2'-Omethyladenosine
  modified_base 49: mod_base = OTHER; note = 2'-Omethylcytosine
  modified_base 50: mod_base = OTHER; note = 2'-Omethylcytosine
  modified_base 52: mod_base = OTHER; note = 2'-Omethylguanosine
  modified_base 54: mod_base = OTHER; note = 2'-Omethyluridine
  modified_base 55: mod_base = OTHER; note = Uridine phosphorothiorate
  modified_base 56: mod_base = OTHER; note = 2'-Omethylcytosine
  modified_base 57: mod_base = OTHER; note = 2'-fluoroguanosine
  modified_base 59: mod_base = OTHER; note = 2'-Omethylguanosine
  modified_base 61: mod_base = OTHER; note = 2'-Omethylcytosine
  modified_base 65: mod_base = OTHER; note = 2'-Omethylguanosine
  modified_base 73: mod_base = OTHER; note = 2'-Omethylguanosine

SEQ ID NO: 2294 - RNA, 76 nt, synthetic construct; identical to SEQ ID NO: 625
  source 1..76: mol_type = other RNA
  modified_base 1: mod_base = OTHER; note = 2'-Omethylguanosine
  modified_base 2: mod_base = OTHER; note = 2'-Omethylguanosine
  modified_base 3: mod_base = OTHER; note = 2'-Omethylcytosine
  modified_base 4: mod_base = OTHER; note = 2'-Omethyluridine
  modified_base 5: mod_base = OTHER; note = 2'-Omethylcytosine
  modified_base 6: mod_base = OTHER; note = 2'-Omethylcytosine
  modified_base 10: mod_base = OTHER; note = 2'-Omethylguanosine
  modified_base 11: mod_base = OTHER; note = 2'-Omethylcytosine
  modified_base 12: mod_base = OTHER; note = 2'-Omethylguanosine
  modified_base 13: mod_base = OTHER; note = 2'-Omethylcytosine
  modified_base 14: mod_base = OTHER; note = 2'-Omethyladenosine
  modified_base 15: mod_base = OTHER; note = 2'-Omethyladenosine
  modified_base 16: mod_base = OTHER; note = 2'-Omethyluridine
  modified_base 17: mod_base = OTHER; note = 2'-Omethylguanosine
  modified_base 18: mod_base = OTHER; note = 2'-Omethylguanosine
  modified_base 20: mod_base = OTHER; note = 2'-Omethyluridine
  modified_base 22: mod_base = OTHER; note = 2'-Omethylguanosine
  modified_base 23: mod_base = OTHER; note = 2'-Omethylcytosine
  modified_base 24: mod_base = OTHER; note = 2'-Omethylguanosine
  modified_base 25: mod_base = OTHER; note = 2'-Omethylcytosine
  modified_base 41: mod_base = OTHER; note = 2'-Omethylcytosine
  modified_base 42: mod_base = OTHER; note = 2'-Omethyladenosine
  modified_base 43: mod_base = OTHER; note = 2'-Omethyladenosine
  modified_base 44: mod_base = OTHER; note = 2'-Omethyladenosine
  modified_base 49: mod_base = OTHER; note = 2'-Omethylcytosine
  modified_base 50: mod_base = OTHER; note = 2'-Omethylcytosine
  modified_base 52: mod_base = OTHER; note = 2'-Omethylguanosine
  modified_base 54: mod_base = OTHER; note = 2'-Omethyluridine
  modified_base 55: mod_base = OTHER; note = Uridine phosphorothiorate
  modified_base 56: mod_base = OTHER; note = 2'-Omethylcytosine
  modified_base 57: mod_base = OTHER; note = 2'-fluoroguanosine
  modified_base 59: mod_base = OTHER; note = 2'-Omethylguanosine
  modified_base 61: mod_base = OTHER; note = 2'-Omethylcytosine
  modified_base 65: mod_base = OTHER; note = 2'-Omethylguanosine
  modified_base 73: mod_base = OTHER; note = 2'-Omethylguanosine

SEQ ID NO: 2295 - RNA, 76 nt, synthetic construct; identical to SEQ ID NO: 625
  source 1..76: mol_type = other RNA
  modified_base 1: mod_base = OTHER; note = 2'-Omethylguanosine
  modified_base 2: mod_base = OTHER; note = 2'-Omethylguanosine
  modified_base 3: mod_base = OTHER; note = 2'-Omethylcytosine
  modified_base 4: mod_base = OTHER; note = 2'-Omethyluridine
  modified_base 5: mod_base = OTHER; note = 2'-Omethylcytosine
  modified_base 6: mod_base = OTHER; note = 2'-Omethylcytosine
  modified_base 10: mod_base = OTHER; note = 2'-Omethylguanosine
  modified_base 11: mod_base = OTHER; note = 2'-Omethylcytosine
  modified_base 12: mod_base = OTHER; note = 2'-Omethylguanosine
  modified_base 13: mod_base = OTHER; note = 2'-Omethylcytosine
  modified_base 14: mod_base = OTHER; note = 2'-Omethyladenosine
  modified_base 15: mod_base = OTHER; note = 2'-Omethyladenosine
  modified_base 16: mod_base = OTHER; note = 2'-Omethyluridine
  modified_base 17: mod_base = OTHER; note = 2'-Omethylguanosine
  modified_base 18: mod_base = OTHER; note = 2'-Omethylguanosine
  modified_base 20: mod_base = OTHER; note = 2'-Omethyluridine
  modified_base 22: mod_base = OTHER; note = 2'-Omethylguanosine
  modified_base 23: mod_base = OTHER; note = 2'-Omethylcytosine
  modified_base 24: mod_base = OTHER; note = 2'-Omethylguanosine
  modified_base 25: mod_base = OTHER; note = 2'-Omethylcytosine
  modified_base 41: mod_base = OTHER; note = 2'-fluorocytosine
  modified_base 42: mod_base = OTHER; note = 2'-Omethyladenosine
  modified_base 43: mod_base = OTHER; note = 2'-Omethyladenosine
  modified_base 44: mod_base = OTHER; note = 2'-fluoroadenosine
  modified_base 49: mod_base = OTHER; note = 2'-Omethylcytosine
  modified_base 50: mod_base = OTHER; note = 2'-Omethylcytosine
  modified_base 52: mod_base = OTHER; note = 2'-Omethylguanosine
  modified_base 54: mod_base = OTHER; note = 2'-Omethyluridine
  modified_base 55: mod_base = OTHER; note = Uridine phosphorothiorate
  modified_base 56: mod_base = OTHER; note = 2'-Omethylcytosine
  modified_base 57: mod_base = OTHER; note = 2'-fluoroguanosine
  modified_base 59: mod_base = OTHER; note = 2'-Omethylguanosine
  modified_base 61: mod_base = OTHER; note = 2'-Omethylcytosine
  modified_base 65: mod_base = OTHER; note = 2'-Omethylguanosine
  modified_base 73: mod_base = OTHER; note = 2'-Omethylguanosine

SEQ ID NO: 2296 - RNA, 76 nt, synthetic construct; identical to SEQ ID NO: 625
  source 1..76: mol_type = other RNA
  modified_base 1: mod_base = OTHER; note = 2'-Omethylguanosine
  modified_base 2: mod_base = OTHER; note = 2'-Omethylguanosine
  modified_base 3: mod_base = OTHER; note = 2'-Omethylcytosine
  modified_base 4: mod_base = OTHER; note = 2'-Omethyluridine
  modified_base 5: mod_base = OTHER; note = 2'-Omethylcytosine
  modified_base 6: mod_base = OTHER; note = 2'-Omethylcytosine
  modified_base 10: mod_base = OTHER; note = 2'-Omethylguanosine
  modified_base 11: mod_base = OTHER; note = 2'-Omethylcytosine
  modified_base 12: mod_base = OTHER; note = 2'-Omethylguanosine
  modified_base 13: mod_base = OTHER; note = 2'-Omethylcytosine
  modified_base 16: mod_base = OTHER; note = 2'-Omethyluridine
  modified_base 17: mod_base = OTHER; note = 2'-Omethylguanosine
  modified_base 18: mod_base = OTHER; note = 2'-Omethylguanosine
  modified_base 20: mod_base = OTHER; note = 2'-Omethyluridine
  modified_base 22: mod_base = OTHER; note = 2'-Omethylguanosine
  modified_base 23: mod_base = OTHER; note = 2'-Omethylcytosine
  modified_base 24: mod_base = OTHER; note = 2'-Omethylguanosine
  modified_base 25: mod_base = OTHER; note = 2'-Omethylcytosine
  modified_base 33: mod_base = OTHER; note = 2'-fluorouridine
  modified_base 35: mod_base = OTHER; note = Cytosine phosphorothiorate
  modified_base 37: mod_base = OTHER; note = Adenosine phosphorothiorate
  modified_base 38: mod_base = OTHER; note = Adenosine phosphorothiorate
  modified_base 41: mod_base = OTHER; note = 2'-Omethylcytosine
  modified_base 42: mod_base = OTHER; note = 2'-Omethyladenosine
  modified_base 43: mod_base = OTHER; note = 2'-Omethyladenosine
  modified_base 44: mod_base = OTHER; note = 2'-Omethyladenosine
  modified_base 49: mod_base = OTHER; note = 2'-Omethylcytosine
  modified_base 50: mod_base = OTHER; note = 2'-Omethylcytosine
  modified_base 52: mod_base = OTHER; note = 2'-Omethylguanosine
  modified_base 54: mod_base = OTHER; note = 2'-Omethyluridine
  modified_base 55: mod_base = OTHER; note = Uridine phosphorothiorate
  modified_base 56: mod_base = OTHER; note = 2'-Omethylcytosine
  modified_base 57: mod_base = OTHER; note = 2'-fluoroguanosine
  modified_base 59: mod_base = OTHER; note = 2'-Omethylguanosine
  modified_base 61: mod_base = OTHER; note = 2'-Omethylcytosine
  modified_base 65: mod_base = OTHER; note = 2'-Omethylguanosine
  modified_base 73: mod_base = OTHER; note = 2'-Omethylguanosine

SEQ ID NO: 2297 - RNA, 76 nt, synthetic construct; identical to SEQ ID NO: 625
  source 1..76: mol_type = other RNA
  modified_base 1: mod_base = OTHER; note = 2'-Omethylguanosine
  modified_base 2: mod_base = OTHER; note = 2'-Omethylguanosine
  modified_base 3: mod_base = OTHER; note = 2'-Omethylcytosine
  modified_base 4: mod_base = OTHER; note = 2'-Omethyluridine
  modified_base 5: mod_base = OTHER; note = 2'-Omethylcytosine
  modified_base 6: mod_base = OTHER; note = 2'-Omethylcytosine
  modified_base 10: mod_base = OTHER; note = 2'-Omethylguanosine
  modified_base 11: mod_base = OTHER; note = 2'-Omethylcytosine
  modified_base 12: mod_base = OTHER; note = 2'-Omethylguanosine
  modified_base 13: mod_base = OTHER; note = 2'-Omethylcytosine
  modified_base 16: mod_base = OTHER; note = 2'-Omethyluridine
  modified_base 17: mod_base = OTHER; note = 2'-Omethylguanosine
  modified_base 18: mod_base = OTHER; note = 2'-Omethylguanosine
  modified_base 20: mod_base = OTHER; note = 2'-Omethyluridine
  modified_base 22: mod_base = OTHER; note = 2'-Omethylguanosine
  modified_base 23: mod_base = OTHER; note = 2'-Omethylcytosine
  modified_base 24: mod_base = OTHER; note = 2'-Omethylguanosine
  modified_base 25: mod_base = OTHER; note = 2'-Omethylcytosine
  modified_base 33: mod_base = OTHER; note = 2'-fluorouridine
  modified_base 35: mod_base = OTHER; note = Cytosine phosphorothiorate
  modified_base 37: mod_base = OTHER; note = Adenosine phosphorothiorate
  modified_base 38: mod_base = OTHER; note = Adenosine phosphorothiorate
  modified_base 41: mod_base = OTHER; note = 2'-fluorocytosine
  modified_base 42: mod_base = OTHER; note = 2'-Omethyladenosine
  modified_base 43: mod_base = OTHER; note = 2'-Omethyladenosine
  modified_base 44: mod_base = OTHER; note = 2'-fluoroadenosine
  modified_base 49: mod_base = OTHER; note = 2'-Omethylcytosine
  modified_base 50: mod_base = OTHER; note = 2'-Omethylcytosine
  modified_base 52: mod_base = OTHER; note = 2'-Omethylguanosine
  modified_base 54: mod_base = OTHER; note = 2'-Omethyluridine
  modified_base 55: mod_base = OTHER; note = Uridine phosphorothiorate
  modified_base 56: mod_base = OTHER; note = 2'-Omethylcytosine
  modified_base 57: mod_base = OTHER; note = 2'-fluoroguanosine
  modified_base 59: mod_base = OTHER; note = 2'-Omethylguanosine
  modified_base 61: mod_base = OTHER; note = 2'-Omethylcytosine
  modified_base 65: mod_base = OTHER; note = 2'-Omethylguanosine
  modified_base 73: mod_base = OTHER; note = 2'-Omethylguanosine

SEQ ID NO: 2298 - RNA, 76 nt, synthetic construct; identical to SEQ ID NO: 625
  source 1..76: mol_type = other RNA
  modified_base 1: mod_base = OTHER; note = 2'-Omethylguanosine
  modified_base 2: mod_base = OTHER; note = 2'-Omethylguanosine
  modified_base 3: mod_base = OTHER; note = 2'-Omethylcytosine
  modified_base 4: mod_base = OTHER; note = 2'-Omethyluridine
  modified_base 5: mod_base = OTHER; note = 2'-Omethylcytosine
  modified_base 6: mod_base = OTHER; note = 2'-Omethylcytosine
  modified_base 10: mod_base = OTHER; note = 2'-Omethylguanosine
  modified_base 11: mod_base = OTHER; note = 2'-Omethylcytosine
  modified_base 12: mod_base = OTHER; note = 2'-Omethylguanosine
  modified_base 13: mod_base = OTHER; note = 2'-Omethylcytosine
  modified_base 14: mod_base = OTHER; note = 2'-Omethyladenosine
  modified_base 15: mod_base = OTHER; note = 2'-Omethyladenosine
  modified_base 16: mod_base = OTHER; note = 2'-Omethyluridine
  modified_base 17: mod_base = OTHER; note = 2'-Omethylguanosine
  modified_base 18: mod_base = OTHER; note = 2'-Omethylguanosine
  modified_base 20: mod_base = OTHER; note = 2'-Omethyluridine
  modified_base 22: mod_base = OTHER; note = 2'-Omethylguanosine
  modified_base 23: mod_base = OTHER; note = 2'-Omethylcytosine
  modified_base 24: mod_base = OTHER; note = 2'-Omethylguanosine
  modified_base 25: mod_base = OTHER; note = 2'-Omethylcytosine
  modified_base 33: mod_base = OTHER; note = 2'-fluorouridine
  modified_base 35: mod_base = OTHER; note = Cytosine phosphorothiorate
  modified_base 37: mod_base = OTHER; note = Adenosine phosphorothiorate
  modified_base 38: mod_base = OTHER; note = Adenosine phosphorothiorate
  modified_base 49: mod_base = OTHER; note = 2'-Omethylcytosine
  modified_base 50: mod_base = OTHER; note = 2'-Omethylcytosine
  modified_base 52: mod_base = OTHER; note = 2'-Omethylguanosine
  modified_base 54: mod_base = OTHER; note = 2'-Omethyluridine
  modified_base 55: mod_base = OTHER; note = Uridine phosphorothiorate
  modified_base 56: mod_base = OTHER; note = 2'-Omethylcytosine
  modified_base 57: mod_base = OTHER; note = 2'-fluoroguanosine
  modified_base 59: mod_base = OTHER; note = 2'-Omethylguanosine
  modified_base 61: mod_base = OTHER; note = 2'-Omethylcytosine
  modified_base 65: mod_base = OTHER; note = 2'-Omethylguanosine
  modified_base 73: mod_base = OTHER; note = 2'-Omethylguanosine

SEQ ID NO: 2299 - RNA, 76 nt, synthetic construct; identical to SEQ ID NO: 625
  source 1..76: mol_type = other RNA
  modified_base 1: mod_base = OTHER; note = 2'-Omethylguanosine
  modified_base 2: mod_base = OTHER; note = 2'-Omethylguanosine
  modified_base 3: mod_base = OTHER; note = 2'-Omethylcytosine
  modified_base 4: mod_base = OTHER; note = 2'-Omethyluridine
  modified_base 5: mod_base = OTHER; note = 2'-Omethylcytosine
  modified_base 6: mod_base = OTHER; note = 2'-Omethylcytosine
  modified_base 10: mod_base = OTHER; note = 2'-Omethylguanosine
  modified_base 11: mod_base = OTHER; note = 2'-Omethylcytosine
  modified_base 12: mod_base = OTHER; note = 2'-Omethylguanosine
  modified_base 13: mod_base = OTHER; note = 2'-Omethylcytosine
  modified_base 14: mod_base = OTHER; note = 2'-Omethyladenosine
  modified_base 15: mod_base = OTHER; note = 2'-Omethyladenosine
  modified_base 16: mod_base = OTHER; note = 2'-Omethyluridine
  modified_base 17: mod_base = OTHER; note = 2'-Omethylguanosine
  modified_base 18: mod_base = OTHER; note = 2'-Omethylguanosine
  modified_base 20: mod_base = OTHER; note = 2'-Omethyluridine
  modified_base 22: mod_base = OTHER; note = 2'-Omethylguanosine
  modified_base 23: mod_base = OTHER; note = 2'-Omethylcytosine
  modified_base 24: mod_base = OTHER; note = 2'-Omethylguanosine
  modified_base 25: mod_base = OTHER; note = 2'-Omethylcytosine
  modified_base 33: mod_base = OTHER; note = 2'-fluorouridine
  modified_base 35: mod_base = OTHER; note = Cytosine phosphorothiorate
  modified_base 37: mod_base = OTHER; note = Adenosine phosphorothiorate
  modified_base 38: mod_base = OTHER; note = Adenosine phosphorothiorate
  modified_base 41: mod_base = OTHER; note = 2'-Omethylcytosine
  modified_base 42: mod_base = OTHER; note = 2'-Omethyladenosine
  modified_base 43: mod_base = OTHER; note = 2'-Omethyladenosine
  modified_base 44: mod_base = OTHER; note = 2'-Omethyladenosine
  modified_base 49: mod_base = OTHER; note = 2'-Omethylcytosine
  modified_base 50: mod_base = OTHER; note = 2'-Omethylcytosine
  modified_base 52: mod_base = OTHER; note = 2'-Omethylguanosine
  modified_base 54: mod_base = OTHER; note = 2'-Omethyluridine
  modified_base 55: mod_base = OTHER; note = Uridine phosphorothiorate
  modified_base 56: mod_base = OTHER; note = 2'-Omethylcytosine
  modified_base 57: mod_base = OTHER; note = 2'-fluoroguanosine
  modified_base 59: mod_base = OTHER; note = 2'-Omethylguanosine
  modified_base 61: mod_base = OTHER; note = 2'-Omethylcytosine
  modified_base 65: mod_base = OTHER; note = 2'-Omethylguanosine
  modified_base 73: mod_base = OTHER; note = 2'-Omethylguanosine

SEQ ID NO: 2300 - RNA, 76 nt, synthetic construct; identical to SEQ ID NO: 625
  source 1..76: mol_type = other RNA
  modified_base 1: mod_base = OTHER; note = 2'-Omethylguanosine
  modified_base 2: mod_base = OTHER; note = 2'-Omethylguanosine
  modified_base 3: mod_base = OTHER; note = 2'-Omethylcytosine
  modified_base 4: mod_base = OTHER; note = 2'-Omethyluridine
  modified_base 5: mod_base = OTHER; note = 2'-Omethylcytosine
  modified_base 6: mod_base = OTHER; note = 2'-Omethylcytosine
  modified_base 10: mod_base = OTHER; note = 2'-Omethylguanosine
  modified_base 11: mod_base = OTHER; note = 2'-Omethylcytosine
  modified_base 12: mod_base = OTHER; note = 2'-Omethylguanosine
  modified_base 13: mod_base = OTHER; note = 2'-Omethylcytosine
  modified_base 14: mod_base = OTHER; note = 2'-Omethyladenosine
  modified_base 15: mod_base = OTHER; note = 2'-Omethyladenosine
  modified_base 16: mod_base = OTHER; note = 2'-Omethyluridine
  modified_base 17: mod_base = OTHER; note = 2'-Omethylguanosine
  modified_base 18: mod_base = OTHER; note = 2'-Omethylguanosine
  modified_base 20: mod_base = OTHER; note = 2'-Omethyluridine
  modified_base 22: mod_base = OTHER; note = 2'-Omethylguanosine
  modified_base 23: mod_base = OTHER; note = 2'-Omethylcytosine
  modified_base 24: mod_base = OTHER; note = 2'-Omethylguanosine
  modified_base 25: mod_base = OTHER; note = 2'-Omethylcytosine
  modified_base 33: mod_base = OTHER; note = 2'-fluorouridine
  modified_base 35: mod_base = OTHER; note = Cytosine phosphorothiorate
  modified_base 37: mod_base = OTHER; note = Adenosine phosphorothiorate
  modified_base 38: mod_base = OTHER; note = Adenosine phosphorothiorate
  modified_base 41: mod_base = OTHER; note = 2'-fluorocytosine
  modified_base 42: mod_base = OTHER; note = 2'-Omethyladenosine
  modified_base 43: mod_base = OTHER; note = 2'-Omethyladenosine
  modified_base 44: mod_base = OTHER; note = 2'-fluoroadenosine
  modified_base 49: mod_base = OTHER; note = 2'-Omethylcytosine
  modified_base 50: mod_base = OTHER; note = 2'-Omethylcytosine
  modified_base 52: mod_base = OTHER; note = 2'-Omethylguanosine
  modified_base 54: mod_base = OTHER; note = 2'-Omethyluridine
  modified_base 55: mod_base = OTHER; note = Uridine phosphorothiorate
  modified_base 56: mod_base = OTHER; note = 2'-Omethylcytosine
  modified_base 57: mod_base = OTHER; note = 2'-fluoroguanosine
  modified_base 59: mod_base = OTHER; note = 2'-Omethylguanosine
  modified_base 61: mod_base = OTHER; note = 2'-Omethylcytosine
  modified_base 65: mod_base = OTHER; note = 2'-Omethylguanosine
  modified_base 73: mod_base = OTHER; note = 2'-Omethylguanosine

SEQ ID NO: 2301 - RNA, 76 nt, synthetic construct; identical to SEQ ID NO: 625
  source 1..76: mol_type = other RNA
  modified_base 1: mod_base = OTHER; note = 2'-Omethylguanosine
  modified_base 2: mod_base = OTHER; note = 2'-Omethylguanosine
  modified_base 3: mod_base = OTHER; note = 2'-Omethylcytosine
  modified_base 4: mod_base = OTHER; note = 2'-Omethyluridine
  modified_base 5: mod_base = OTHER; note = 2'-Omethylcytosine
  modified_base 6: mod_base = OTHER; note = 2'-Omethylcytosine
  modified_base 10: mod_base = OTHER; note = 2'-Omethylguanosine
  modified_base 11: mod_base = OTHER; note = 2'-Omethylcytosine
  modified_base 12: mod_base = OTHER; note = 2'-Omethylguanosine
  modified_base 13: mod_base = OTHER; note = 2'-Omethylcytosine
  modified_base 14: mod_base = OTHER; note = 2'-Omethyladenosine
  modified_base 15: mod_base = OTHER; note = 2'-fluoroadenosine
  modified_base 16: mod_base = OTHER; note = 2'-Omethyluridine
  modified_base 17: mod_base = OTHER; note = 2'-Omethylguanosine
  modified_base 18: mod_base = OTHER; note = 2'-Omethylguanosine
  modified_base 20: mod_base = OTHER; note = 2'-Omethyluridine
  modified_base 22: mod_base = OTHER; note = 2'-Omethylguanosine
  modified_base 23: mod_base = OTHER; note = 2'-Omethylcytosine
  modified_base 24: mod_base = OTHER; note = 2'-Omethylguanosine
  modified_base 25: mod_base = OTHER; note = 2'-Omethylcytosine
  modified_base 33: mod_base = OTHER; note = 2'-fluorouridine
  modified_base 35: mod_base = OTHER; note = Cytosine phosphorothiorate
  modified_base 37: mod_base = OTHER; note = Adenosine phosphorothiorate
  modified_base 38: mod_base = OTHER; note = Adenosine phosphorothiorate
  modified_base 41: mod_base = OTHER; note = 2'-Omethylcytosine
  modified_base 42: mod_base = OTHER; note = 2'-Omethyladenosine
  modified_base 43: mod_base = OTHER; note = 2'-Omethyladenosine
  modified_base 44: mod_base = OTHER; note = 2'-Omethyladenosine
  modified_base 49: mod_base = OTHER; note = 2'-Omethylcytosine
  modified_base 50: mod_base = OTHER; note = 2'-Omethylcytosine
  modified_base 52: mod_base = OTHER; note = 2'-Omethylguanosine
  modified_base 54: mod_base = OTHER; note = 2'-Omethyluridine
  modified_base 55: mod_base = OTHER; note = Uridine phosphorothiorate
  modified_base 56: mod_base = OTHER; note = 2'-Omethylcytosine
  modified_base 57: mod_base = OTHER; note = 2'-fluoroguanosine
  modified_base 59: mod_base = OTHER; note = 2'-Omethylguanosine
  modified_base 61: mod_base = OTHER; note = 2'-Omethylcytosine
  modified_base 65: mod_base = OTHER; note = 2'-Omethylguanosine
  modified_base 73: mod_base = OTHER; note = 2'-Omethylguanosine

SEQ ID NO: 2302 - RNA, 76 nt, synthetic construct; identical to SEQ ID NO: 625
  source 1..76: mol_type = other RNA
  modified_base 1: mod_base = OTHER; note = 2'-Omethylguanosine
  modified_base 2: mod_base = OTHER; note = 2'-Omethylguanosine
  modified_base 3: mod_base = OTHER; note = 2'-Omethylcytosine
  modified_base 4: mod_base = OTHER; note = 2'-Omethyluridine
  modified_base 5: mod_base = OTHER; note = 2'-Omethylcytosine
  modified_base 6: mod_base = OTHER; note = 2'-Omethylcytosine
  modified_base 10: mod_base = OTHER; note = 2'-Omethylguanosine
  modified_base 11: mod_base = OTHER; note = 2'-Omethylcytosine
  modified_base 12: mod_base = OTHER; note = 2'-Omethylguanosine
  modified_base 13: mod_base = OTHER; note = 2'-Omethylcytosine
  modified_base 14: mod_base = OTHER; note = 2'-Omethyladenosine
  modified_base 15: mod_base = OTHER; note = 2'-fluoroadenosine
  modified_base 16: mod_base = OTHER; note = 2'-Omethyluridine
  modified_base 17: mod_base = OTHER; note = 2'-Omethylguanosine
  modified_base 18: mod_base = OTHER; note = 2'-Omethylguanosine
  modified_base 19: mod_base = OTHER; note = 2'-fluoroadenosine
  modified_base 20: mod_base = OTHER; note = 2'-Omethyluridine
  modified_base 22: mod_base = OTHER; note = 2'-Omethylguanosine
  modified_base 23: mod_base = OTHER; note = 2'-Omethylcytosine
  modified_base 24: mod_base = OTHER; note = 2'-Omethylguanosine
  modified_base 25: mod_base = OTHER; note = 2'-Omethylcytosine
  modified_base 33: mod_base = OTHER; note = 2'-fluorouridine
  modified_base 35: mod_base = OTHER; note = Cytosine phosphorothiorate
  modified_base 37: mod_base = OTHER; note = Adenosine phosphorothiorate
  modified_base 38: mod_base = OTHER; note = Adenosine phosphorothiorate
  modified_base 41: mod_base = OTHER; note = 2'-Omethylcytosine
  modified_base 42: mod_base = OTHER; note = 2'-Omethyladenosine
  modified_base 43: mod_base = OTHER; note = 2'-Omethyladenosine
  modified_base 44: mod_base = OTHER; note = 2'-Omethyladenosine
  modified_base 49: mod_base = OTHER; note = 2'-Omethylcytosine
  modified_base 50: mod_base = OTHER; note = 2'-Omethylcytosine
  modified_base 52: mod_base = OTHER; note = 2'-Omethylguanosine
  modified_base 54: mod_base = OTHER; note = 2'-Omethyluridine
  modified_base 55: mod_base = OTHER; note = Uridine phosphorothiorate
  modified_base 56: mod_base = OTHER; note = 2'-Omethylcytosine
  modified_base 57: mod_base = OTHER; note = 2'-fluoroguanosine
  modified_base 59: mod_base = OTHER; note = 2'-Omethylguanosine
  modified_base 61: mod_base = OTHER; note = 2'-Omethylcytosine
  modified_base 65: mod_base = OTHER; note = 2'-Omethylguanosine
  modified_base 73: mod_base = OTHER; note = 2'-Omethylguanosine

SEQ ID NO: 2303 - RNA, 76 nt, synthetic construct; identical to SEQ ID NO: 625
  source 1..76: mol_type = other RNA
  modified_base 1: mod_base = OTHER; note = 2'-Omethylguanosine
  modified_base 2: mod_base = OTHER; note = 2'-Omethylguanosine
  modified_base 3: mod_base = OTHER; note = 2'-Omethylcytosine
  modified_base 4: mod_base = OTHER; note = 2'-Omethyluridine
  modified_base 5: mod_base = OTHER; note = 2'-Omethylcytosine
  modified_base 6: mod_base = OTHER; note = 2'-Omethylcytosine
  modified_base 14: mod_base = OTHER; note = 2'-Omethyladenosine
  modified_base 15: mod_base = OTHER; note = 2'-Omethyladenosine
  modified_base 16: mod_base = OTHER; note = 2'-Omethyluridine
  modified_base 17: mod_base = OTHER; note = 2'-Omethylguanosine
  modified_base 18: mod_base = OTHER; note = 2'-Omethylguanosine
  modified_base 20: mod_base = OTHER; note = 2'-Omethyluridine
  modified_base 25: mod_base = OTHER; note = 2'-Omethylcytosine
  modified_base 41: mod_base = OTHER; note = 2'-Omethylcytosine
  modified_base 42: mod_base = OTHER; note = 2'-Omethyladenosine
  modified_base 43: mod_base = OTHER; note = 2'-Omethyladenosine
  modified_base 44: mod_base = OTHER; note = 2'-Omethyladenosine
  modified_base 49: mod_base = OTHER; note = 2'-Omethylcytosine
  modified_base 50: mod_base = OTHER; note = 2'-Omethylcytosine
  modified_base 52: mod_base = OTHER; note = 2'-Omethylguanosine
  modified_base 54: mod_base = OTHER; note = 2'-Omethyluridine
  modified_base 55: mod_base = OTHER; note = Uridine phosphorothiorate
  modified_base 56: mod_base = OTHER; note = 2'-Omethylcytosine
  modified_base 57: mod_base = OTHER; note = 2'-fluoroguanosine
  modified_base 59: mod_base = OTHER; note = 2'-Omethylguanosine
  modified_base 61: mod_base = OTHER; note = 2'-Omethylcytosine
  modified_base 62: mod_base = OTHER; note = 2'-Omethylcytosine
  modified_base 63: mod_base = OTHER; note = 2'-fluorocytosine
  modified_base 64: mod_base = OTHER; note = 2'-Omethylguanosine
  modified_base 65: mod_base = OTHER; note = 2'-Omethylguanosine
  modified_base 73: mod_base = OTHER; note = 2'-Omethylguanosine

SEQ ID NO: 2304 - RNA, 76 nt, synthetic construct; identical to SEQ ID NO: 625
  source 1..76: mol_type = other RNA
  modified_base 1: mod_base = OTHER; note = 2'-Omethylguanosine
  modified_base 2: mod_base = OTHER; note = 2'-Omethylguanosine
  modified_base 3: mod_base = OTHER; note = 2'-Omethylcytosine
  modified_base 4: mod_base = OTHER; note = 2'-Omethyluridine
  modified_base 5: mod_base = OTHER; note = 2'-Omethylcytosine
  modified_base 6: mod_base = OTHER; note = 2'-Omethylcytosine
  modified_base 14: mod_base = OTHER; note = 2'-Omethyladenosine
  modified_base 15: mod_base = OTHER; note = 2'-Omethyladenosine
  modified_base 16: mod_base = OTHER; note = 2'-Omethyluridine
  modified_base 17: mod_base = OTHER; note = 2'-Omethylguanosine
  modified_base 18: mod_base = OTHER; note = 2'-Omethylguanosine
  modified_base 20: mod_base = OTHER; note = 2'-Omethyluridine
  modified_base 25: mod_base = OTHER; note = 2'-Omethylcytosine
  modified_base 41: mod_base = OTHER; note = 2'-fluorocytosine
  modified_base 42: mod_base = OTHER; note = 2'-Omethyladenosine
  modified_base 43: mod_base = OTHER; note = 2'-Omethyladenosine
  modified_base 44: mod_base = OTHER; note = 2'-fluoroadenosine
  modified_base 49: mod_base = OTHER; note = 2'-Omethylcytosine
  modified_base 50: mod_base = OTHER; note = 2'-Omethylcytosine
  modified_base 52: mod_base = OTHER; note = 2'-Omethylguanosine
  modified_base 54: mod_base = OTHER; note = 2'-Omethyluridine
  modified_base 55: mod_base = OTHER; note = Uridine phosphorothiorate
  modified_base 56: mod_base = OTHER; note = 2'-Omethylcytosine
  modified_base 57: mod_base = OTHER; note = 2'-fluoroguanosine
  modified_base 59: mod_base = OTHER; note = 2'-Omethylguanosine
  modified_base 61: mod_base = OTHER; note = 2'-Omethylcytosine
  modified_base 62: mod_base = OTHER; note = 2'-Omethylcytosine
  modified_base 63: mod_base = OTHER; note = 2'-fluorocytosine
  modified_base 64: mod_base = OTHER; note = 2'-Omethylguanosine
  modified_base 65: mod_base = OTHER; note = 2'-Omethylguanosine
  modified_base 73: mod_base = OTHER; note = 2'-Omethylguanosine

SEQ ID NO: 2305 - RNA, 76 nt, synthetic construct; identical to SEQ ID NO: 625
  source 1..76: mol_type = other RNA
  modified_base 1: mod_base = OTHER; note = 2'-Omethylguanosine
  modified_base 2: mod_base = OTHER; note = 2'-Omethylguanosine
  modified_base 3: mod_base = OTHER; note = 2'-Omethylcytosine
  modified_base 4: mod_base = OTHER; note = 2'-Omethyluridine
  modified_base 5: mod_base = OTHER; note = 2'-Omethylcytosine
  modified_base 6: mod_base = OTHER; note = 2'-Omethylcytosine
  modified_base 16: mod_base = OTHER; note = 2'-Omethyluridine
  modified_base 17: mod_base = OTHER; note = 2'-Omethylguanosine
  modified_base 18: mod_base = OTHER; note = 2'-Omethylguanosine
  modified_base 20: mod_base = OTHER; note = 2'-Omethyluridine
  modified_base 25: mod_base = OTHER; note = 2'-Omethylcytosine
  modified_base 33: mod_base = OTHER; note = 2'-fluorouridine
  modified_base 35: mod_base = OTHER; note = Cytosine phosphorothiorate
  modified_base 37: mod_base = OTHER; note = Adenosine phosphorothiorate
  modified_base 38: mod_base = OTHER; note = Adenosine phosphorothiorate
  modified_base 41: mod_base = OTHER; note = 2'-Omethylcytosine
  modified_base 42: mod_base = OTHER; note = 2'-Omethyladenosine
  modified_base 43: mod_base = OTHER; note = 2'-Omethyladenosine
  modified_base 44: mod_base = OTHER; note = 2'-Omethyladenosine
  modified_base 49: mod_base = OTHER; note = 2'-Omethylcytosine
  modified_base 50: mod_base = OTHER; note = 2'-Omethylcytosine
  modified_base 52: mod_base = OTHER; note = 2'-Omethylguanosine
  modified_base 54: mod_base = OTHER; note = 2'-Omethyluridine
  modified_base 55: mod_base = OTHER; note = Uridine phosphorothiorate
  modified_base 56: mod_base = OTHER; note = 2'-Omethylcytosine
  modified_base 57: mod_base = OTHER; note = 2'-fluoroguanosine
  modified_base 59: mod_base = OTHER; note = 2'-Omethylguanosine
  modified_base 61: mod_base = OTHER; note = 2'-Omethylcytosine
  modified_base 62: mod_base = OTHER; note = 2'-Omethylcytosine
  modified_base 63: mod_base = OTHER; note = 2'-fluorocytosine
  modified_base 64: mod_base = OTHER; note = 2'-Omethylguanosine
  modified_base 65: mod_base = OTHER; note = 2'-Omethylguanosine
  modified_base 73: mod_base = OTHER; note = 2'-Omethylguanosine

SEQ ID NO: 2306 - RNA, 76 nt, synthetic construct; identical to SEQ ID NO: 625
  source 1..76: mol_type = other RNA
  modified_base 1: mod_base = OTHER; note = 2'-Omethylguanosine
  modified_base 2: mod_base = OTHER; note = 2'-Omethylguanosine
  modified_base 3: mod_base = OTHER; note = 2'-Omethylcytosine
  modified_base 4: mod_base = OTHER; note = 2'-Omethyluridine
  modified_base 5: mod_base = OTHER; note = 2'-Omethylcytosine
  modified_base 6: mod_base = OTHER; note = 2'-Omethylcytosine
  modified_base 16: mod_base = OTHER; note = 2'-Omethyluridine
  modified_base 17: mod_base = OTHER; note = 2'-Omethylguanosine
  modified_base 18: mod_base = OTHER; note = 2'-Omethylguanosine
  modified_base 20: mod_base = OTHER; note = 2'-Omethyluridine
  modified_base 25: mod_base = OTHER; note = 2'-Omethylcytosine
  modified_base 33: mod_base = OTHER; note = 2'-fluorouridine
  modified_base 35: mod_base = OTHER; note = Cytosine phosphorothiorate
  modified_base 37: mod_base = OTHER; note = Adenosine phosphorothiorate
  modified_base 38: mod_base = OTHER; note = Adenosine phosphorothiorate
  modified_base 41: mod_base = OTHER; note = 2'-fluorocytosine
  modified_base 42: mod_base = OTHER; note = 2'-Omethyladenosine
  modified_base 43: mod_base = OTHER; note = 2'-Omethyladenosine
  modified_base 44: mod_base = OTHER; note = 2'-fluoroadenosine
  modified_base 49: mod_base = OTHER; note = 2'-Omethylcytosine
  modified_base 50: mod_base = OTHER; note = 2'-Omethylcytosine
  modified_base 52: mod_base = OTHER; note = 2'-Omethylguanosine
  modified_base 54: mod_base = OTHER; note = 2'-Omethyluridine
  modified_base 55: mod_base = OTHER; note = Uridine phosphorothiorate
  modified_base 56: mod_base = OTHER; note = 2'-Omethylcytosine
  modified_base 57: mod_base = OTHER; note = 2'-fluoroguanosine
  modified_base 59: mod_base = OTHER; note = 2'-Omethylguanosine
  modified_base 61: mod_base = OTHER; note = 2'-Omethylcytosine
  modified_base 62: mod_base = OTHER; note = 2'-Omethylcytosine
  modified_base 63: mod_base = OTHER; note = 2'-fluorocytosine
  modified_base 64: mod_base = OTHER; note = 2'-Omethylguanosine
  modified_base 65: mod_base = OTHER; note = 2'-Omethylguanosine
  modified_base 73: mod_base = OTHER; note = 2'-Omethylguanosine

SEQ ID NO: 2307 - RNA, 76 nt, synthetic construct; identical to SEQ ID NO: 625
  source 1..76: mol_type = other RNA
  modified_base 1: mod_base = OTHER; note = 2'-Omethylguanosine
  modified_base 2: mod_base = OTHER; note = 2'-Omethylguanosine
  modified_base 3: mod_base = OTHER; note = 2'-Omethylcytosine
  modified_base 4: mod_base = OTHER; note = 2'-Omethyluridine
  modified_base 5: mod_base = OTHER; note = 2'-Omethylcytosine
  modified_base 6: mod_base = OTHER; note = 2'-Omethylcytosine
  modified_base 14: mod_base = OTHER; note = 2'-Omethyladenosine
  modified_base 15: mod_base = OTHER; note = 2'-Omethyladenosine
  modified_base 16: mod_base = OTHER; note = 2'-Omethyluridine
  modified_base 17: mod_base = OTHER; note = 2'-Omethylguanosine
  modified_base 18: mod_base = OTHER; note = 2'-Omethylguanosine
  modified_base 20: mod_base = OTHER; note = 2'-Omethyluridine
  modified_base 25: mod_base = OTHER; note = 2'-Omethylcytosine
  modified_base 33: mod_base = OTHER; note = 2'-fluorouridine
  modified_base 35: mod_base = OTHER; note = Cytosine phosphorothiorate
  modified_base 37: mod_base = OTHER; note = Adenosine phosphorothiorate
  modified_base 38: mod_base = OTHER; note = Adenosine phosphorothiorate
  modified_base 49: mod_base = OTHER; note = 2'-Omethylcytosine
  modified_base 50: mod_base = OTHER; note = 2'-Omethylcytosine
  modified_base 52: mod_base = OTHER; note = 2'-Omethylguanosine
  modified_base 54: mod_base = OTHER; note = 2'-Omethyluridine
  modified_base 55: mod_base = OTHER; note = Uridine phosphorothiorate
  modified_base 56: mod_base = OTHER; note = 2'-Omethylcytosine
  modified_base 57: mod_base = OTHER; note = 2'-fluoroguanosine
  modified_base 59: mod_base = OTHER; note = 2'-Omethylguanosine
  modified_base 61: mod_base = OTHER; note = 2'-Omethylcytosine
  modified_base 62: mod_base = OTHER; note = 2'-Omethylcytosine
  modified_base 63: mod_base = OTHER; note = 2'-fluorocytosine
  modified_base 64: mod_base = OTHER; note = 2'-Omethylguanosine
  modified_base 65: mod_base = OTHER; note = 2'-Omethylguanosine
  modified_base 73: mod_base = OTHER; note = 2'-Omethylguanosine

SEQ ID NO: 2308 - RNA, 76 nt, synthetic construct; identical to SEQ ID NO: 625
  source 1..76: mol_type = other RNA
  modified_base 1: mod_base = OTHER; note = 2'-Omethylguanosine
  modified_base 2: mod_base = OTHER; note = 2'-Omethylguanosine
  modified_base 3: mod_base = OTHER; note = 2'-Omethylcytosine
  modified_base 4: mod_base = OTHER; note = 2'-Omethyluridine
  modified_base 5: mod_base = OTHER; note = 2'-Omethylcytosine
  modified_base 6: mod_base = OTHER; note = 2'-Omethylcytosine
  modified_base 14: mod_base = OTHER; note = 2'-Omethyladenosine
  modified_base 15: mod_base = OTHER; note = 2'-Omethyladenosine
  modified_base 16: mod_base = OTHER; note = 2'-Omethyluridine
  modified_base 17: mod_base = OTHER; note = 2'-Omethylguanosine
  modified_base 18: mod_base = OTHER; note = 2'-Omethylguanosine
  modified_base 20: mod_base = OTHER; note = 2'-Omethyluridine
  modified_base 25: mod_base = OTHER; note = 2'-Omethylcytosine
  modified_base 33: mod_base = OTHER; note = 2'-fluorouridine
  modified_base 35: mod_base = OTHER; note = Cytosine phosphorothiorate
  modified_base 37: mod_base = OTHER; note = Adenosine phosphorothiorate
  modified_base 38: mod_base = OTHER; note = Adenosine phosphorothiorate
  modified_base 41: mod_base = OTHER; note = 2'-Omethylcytosine
  modified_base 42: mod_base = OTHER; note = 2'-Omethyladenosine
  modified_base 43: mod_base = OTHER; note = 2'-Omethyladenosine
  modified_base 44: mod_base = OTHER; note = 2'-Omethyladenosine
  modified_base 49: mod_base = OTHER; note = 2'-Omethylcytosine
  modified_base 50: mod_base = OTHER; note = 2'-Omethylcytosine
  modified_base 52: mod_base = OTHER; note = 2'-Omethylguanosine
  modified_base 54: mod_base = OTHER; note = 2'-Omethyluridine
  modified_base 55: mod_base = OTHER; note = Uridine phosphorothiorate
  modified_base 56: mod_base = OTHER; note = 2'-Omethylcytosine
  modified_base 57: mod_base = OTHER; note = 2'-fluoroguanosine
  modified_base 59: mod_base = OTHER; note = 2'-Omethylguanosine
  modified_base 61: mod_base = OTHER; note = 2'-Omethylcytosine
  modified_base 62: mod_base = OTHER; note = 2'-Omethylcytosine
  modified_base 63: mod_base = OTHER; note = 2'-fluorocytosine
  modified_base 64: mod_base = OTHER; note = 2'-Omethylguanosine
  modified_base 65: mod_base = OTHER; note = 2'-Omethylguanosine
  modified_base 73: mod_base = OTHER; note = 2'-Omethylguanosine

SEQ ID NO: 2309 - RNA, 76 nt, synthetic construct; identical to SEQ ID NO: 625
  source 1..76: mol_type = other RNA
  modified_base 1: mod_base = OTHER; note = 2'-Omethylguanosine
  modified_base 2: mod_base = OTHER; note = 2'-Omethylguanosine
  modified_base 3: mod_base = OTHER; note = 2'-Omethylcytosine
  modified_base 4: mod_base = OTHER; note = 2'-Omethyluridine
  modified_base 5: mod_base = OTHER; note = 2'-Omethylcytosine
  modified_base 6: mod_base = OTHER; note = 2'-Omethylcytosine
  modified_base 14: mod_base = OTHER; note = 2'-Omethyladenosine
  modified_base 15: mod_base = OTHER; note = 2'-Omethyladenosine
  modified_base 16: mod_base = OTHER; note = 2'-Omethyluridine
  modified_base 17: mod_base = OTHER; note = 2'-Omethylguanosine
  modified_base 18: mod_base = OTHER; note = 2'-Omethylguanosine
  modified_base 20: mod_base = OTHER; note = 2'-Omethyluridine
  modified_base 25: mod_base = OTHER; note = 2'-Omethylcytosine
  modified_base 33: mod_base = OTHER; note = 2'-fluorouridine
  modified_base 35: mod_base = OTHER; note = Cytosine phosphorothiorate
  modified_base 37: mod_base = OTHER; note = Adenosine phosphorothiorate
  modified_base 38: mod_base = OTHER; note = Adenosine phosphorothiorate
  modified_base 41: mod_base = OTHER; note = 2'-fluorocytosine
  modified_base 42: mod_base = OTHER; note = 2'-Omethyladenosine
  modified_base 43: mod_base = OTHER; note = 2'-Omethyladenosine
  modified_base 44: mod_base = OTHER; note = 2'-fluoroadenosine
  modified_base 49: mod_base = OTHER; note = 2'-Omethylcytosine
  modified_base 50: mod_base = OTHER; note = 2'-Omethylcytosine
  modified_base 52: mod_base = OTHER; note = 2'-Omethylguanosine
  modified_base 54: mod_base = OTHER; note = 2'-Omethyluridine
  modified_base 55: mod_base = OTHER; note = Uridine phosphorothiorate
  modified_base 56: mod_base = OTHER; note = 2'-Omethylcytosine
  modified_base 57: mod_base = OTHER; note = 2'-fluoroguanosine
  modified_base 59: mod_base = OTHER; note = 2'-Omethylguanosine
  modified_base 61: mod_base = OTHER; note = 2'-Omethylcytosine
  modified_base 62: mod_base = OTHER; note = 2'-Omethylcytosine
  modified_base 63: mod_base = OTHER; note = 2'-fluorocytosine
  modified_base 64: mod_base = OTHER; note = 2'-Omethylguanosine
  modified_base 65: mod_base = OTHER; note = 2'-Omethylguanosine
  modified_base 73: mod_base = OTHER; note = 2'-Omethylguanosine

SEQ ID NO: 2310 - RNA, 76 nt, synthetic construct; identical to SEQ ID NO: 625
  source 1..76: mol_type = other RNA
  modified_base 1: mod_base = OTHER; note = 2'-Omethylguanosine
  modified_base 2: mod_base = OTHER; note = 2'-Omethylguanosine
  modified_base 3: mod_base = OTHER; note = 2'-Omethylcytosine
  modified_base 4: mod_base = OTHER; note = 2'-Omethyluridine
  modified_base 5: mod_base = OTHER; note = 2'-Omethylcytosine
  modified_base 6: mod_base = OTHER; note = 2'-Omethylcytosine
  modified_base 16: mod_base = OTHER; note = 2'-Omethyluridine
  modified_base 17: mod_base = OTHER; note = 2'-Omethylguanosine
  modified_base 18: mod_base = OTHER; note = 2'-Omethylguanosine
  modified_base 20: mod_base = OTHER; note = 2'-Omethyluridine
  modified_base 22: mod_base = OTHER; note = 2'-Omethylguanosine
  modified_base 23: mod_base = OTHER; note = 2'-Omethylcytosine
  modified_base 24: mod_base = OTHER; note = 2'-Omethylguanosine
  modified_base 25: mod_base = OTHER; note = 2'-Omethylcytosine
  modified_base 33: mod_base = OTHER; note = 2'-fluorouridine
  modified_base 35: mod_base = OTHER; note = Cytosine phosphorothiorate
  modified_base 37: mod_base = OTHER; note = Adenosine phosphorothiorate
  modified_base 38: mod_base = OTHER; note = Adenosine phosphorothiorate
  modified_base 41: mod_base = OTHER; note = 2'-Omethylcytosine
  modified_base 42: mod_base = OTHER; note = 2'-Omethyladenosine
  modified_base 43: mod_base = OTHER; note = 2'-Omethyladenosine
  modified_base 44: mod_base = OTHER; note = 2'-Omethyladenosine
  modified_base 49: mod_base = OTHER; note = 2'-Omethylcytosine
  modified_base 50: mod_base = OTHER; note = 2'-Omethylcytosine
  modified_base 52: mod_base = OTHER; note = 2'-Omethylguanosine
  modified_base 54: mod_base = OTHER; note = 2'-Omethyluridine
  modified_base 55: mod_base = OTHER; note = Uridine phosphorothiorate
  modified_base 56: mod_base = OTHER; note = 2'-Omethylcytosine
  modified_base 57: mod_base = OTHER; note = 2'-fluoroguanosine
  modified_base 59: mod_base = OTHER; note = 2'-Omethylguanosine
  modified_base 61: mod_base = OTHER; note = 2'-Omethylcytosine
  modified_base 62: mod_base = OTHER; note = 2'-Omethylcytosine
  modified_base 63: mod_base = OTHER; note = 2'-fluorocytosine
  modified_base 64: mod_base = OTHER; note = 2'-Omethylguanosine
  modified_base 65: mod_base = OTHER; note = 2'-Omethylguanosine
  modified_base 73: mod_base = OTHER; note = 2'-Omethylguanosine

SEQ ID NO: 2311 - RNA, 76 nt, synthetic construct; identical to SEQ ID NO: 625
  source 1..76: mol_type = other RNA
  modified_base 1: mod_base = OTHER; note = 2'-Omethylguanosine
  modified_base 2: mod_base = OTHER; note = 2'-Omethylguanosine
  modified_base 3: mod_base = OTHER; note = 2'-Omethylcytosine
  modified_base 4: mod_base = OTHER; note = 2'-Omethyluridine
  modified_base 5: mod_base = OTHER; note = 2'-Omethylcytosine
  modified_base 6: mod_base = OTHER; note = 2'-Omethylcytosine
  modified_base 14: mod_base = OTHER; note = 2'-Omethyladenosine
  modified_base 15: mod_base = OTHER; note = 2'-Omethyladenosine
  modified_base 16: mod_base = OTHER; note = 2'-Omethyluridine
  modified_base 17: mod_base = OTHER; note = 2'-Omethylguanosine
  modified_base 18: mod_base = OTHER; note = 2'-Omethylguanosine
  modified_base 20: mod_base = OTHER; note = 2'-Omethyluridine
  modified_base 22: mod_base = OTHER; note = 2'-Omethylguanosine
  modified_base 23: mod_base = OTHER; note = 2'-Omethylcytosine
  modified_base 24: mod_base = OTHER; note = 2'-Omethylguanosine
  modified_base 25: mod_base = OTHER; note = 2'-Omethylcytosine
  modified_base 33: mod_base = OTHER; note = 2'-fluorouridine
  modified_base 35: mod_base = OTHER; note = Cytosine phosphorothiorate
  modified_base 37: mod_base = OTHER; note = Adenosine phosphorothiorate
  modified_base 38: mod_base = OTHER; note = Adenosine phosphorothiorate
  modified_base 41: mod_base = OTHER; note = 2'-Omethylcytosine
  modified_base 42: mod_base = OTHER; note = 2'-Omethyladenosine
  modified_base 43: mod_base = OTHER; note = 2'-Omethyladenosine
  modified_base 44: mod_base = OTHER; note = 2'-Omethyladenosine
  modified_base 49: mod_base = OTHER; note = 2'-Omethylcytosine
  modified_base 50: mod_base = OTHER; note = 2'-Omethylcytosine
  modified_base 52: mod_base = OTHER; note = 2'-Omethylguanosine
  modified_base 54: mod_base = OTHER; note = 2'-Omethyluridine
  modified_base 55: mod_base = OTHER; note = Uridine phosphorothiorate
  modified_base 56: mod_base = OTHER; note = 2'-Omethylcytosine
  modified_base 57: mod_base = OTHER; note = 2'-fluoroguanosine
  modified_base 59: mod_base = OTHER; note = 2'-Omethylguanosine
  modified_base 61: mod_base = OTHER; note = 2'-Omethylcytosine
  modified_base 62: mod_base = OTHER; note = 2'-Omethylcytosine
  modified_base 63: mod_base = OTHER; note = 2'-fluorocytosine
  modified_base 64: mod_base = OTHER; note = 2'-Omethylguanosine
  modified_base 65: mod_base = OTHER; note = 2'-Omethylguanosine
  modified_base 73: mod_base = OTHER; note = 2'-Omethylguanosine

SEQ ID NO: 2312 - RNA, 76 nt, synthetic construct; identical to SEQ ID NO: 625
  source 1..76: mol_type = other RNA
  modified_base 1: mod_base = OTHER; note = 2'-Omethylguanosine
  modified_base 2: mod_base = OTHER; note = 2'-Omethylguanosine
  modified_base 3: mod_base = OTHER; note = 2'-Omethylcytosine
  modified_base 4: mod_base = OTHER; note = 2'-Omethyluridine
  modified_base 5: mod_base = OTHER; note = 2'-Omethylcytosine
  modified_base 6: mod_base = OTHER; note = 2'-Omethylcytosine
  modified_base 16: mod_base = OTHER; note = 2'-Omethyluridine
  modified_base 17: mod_base = OTHER; note = 2'-Omethylguanosine
  modified_base 18: mod_base = OTHER; note = 2'-Omethylguanosine
  modified_base 20: mod_base = OTHER; note = 2'-Omethyluridine
  modified_base 22: mod_base = OTHER; note = 2'-Omethylguanosine
  modified_base 23: mod_base = OTHER; note = 2'-Omethylcytosine
  modified_base 24: mod_base = OTHER; note = 2'-Omethylguanosine
  modified_base 25: mod_base = OTHER; note = 2'-Omethylcytosine
  modified_base 33: mod_base = OTHER; note = 2'-fluorouridine
  modified_base 35: mod_base = OTHER; note = Cytosine phosphorothiorate
  modified_base 37: mod_base = OTHER; note = Adenosine phosphorothiorate
  modified_base 38: mod_base = OTHER; note = Adenosine phosphorothiorate
  modified_base 41: mod_base = OTHER; note = 2'-Omethylcytosine
  modified_base 42: mod_base = OTHER; note = 2'-Omethyladenosine
  modified_base 43: mod_base = OTHER; note = 2'-Omethyladenosine
  modified_base 44: mod_base = OTHER; note = 2'-Omethyladenosine
  modified_base 45: mod_base = OTHER; note = 2'-Omethylguanosine
  modified_base 46: mod_base = OTHER; note = 2'-fluoroguanosine
  modified_base 48: mod_base = OTHER; note = 2'-fluorouridine
  modified_base 49: mod_base = OTHER; note = 2'-Omethylcytosine
  modified_base 50: mod_base = OTHER; note = 2'-Omethylcytosine
  modified_base 52: mod_base = OTHER; note = 2'-Omethylguanosine
  modified_base 54: mod_base = OTHER; note = 2'-Omethyluridine
  modified_base 55: mod_base = OTHER; note = Uridine phosphorothiorate
  modified_base 56: mod_base = OTHER; note = 2'-Omethylcytosine
  modified_base 57: mod_base = OTHER; note = 2'-fluoroguanosine
  modified_base 59: mod_base = OTHER; note = 2'-Omethylguanosine
  modified_base 61: mod_base = OTHER; note = 2'-Omethylcytosine
  modified_base 65: mod_base = OTHER; note = 2'-Omethylguanosine
  modified_base 73: mod_base = OTHER; note = 2'-Omethylguanosine

SEQ ID NO: 2313 - RNA, 76 nt, synthetic construct; identical to SEQ ID NO: 625
  source 1..76: mol_type = other RNA
  modified_base 1: mod_base = OTHER; note = 2'-Omethylguanosine
  modified_base 2: mod_base = OTHER; note = 2'-Omethylguanosine
  modified_base 3: mod_base = OTHER; note = 2'-Omethylcytosine
  modified_base 4: mod_base = OTHER; note = 2'-Omethyluridine
  modified_base 5: mod_base = OTHER; note = 2'-Omethylcytosine
  modified_base 6: mod_base = OTHER; note = 2'-Omethylcytosine
  modified_base 16: mod_base = OTHER; note = 2'-Omethyluridine
  modified_base 17: mod_base = OTHER; note = 2'-Omethylguanosine
  modified_base 18: mod_base = OTHER; note = 2'-Omethylguanosine
  modified_base 20: mod_base = OTHER; note = 2'-Omethyluridine
  modified_base 22: mod_base = OTHER; note = 2'-Omethylguanosine
  modified_base 23: mod_base = OTHER; note = 2'-Omethylcytosine
  modified_base 24: mod_base = OTHER; note = 2'-Omethylguanosine
  modified_base 25: mod_base = OTHER; note = 2'-Omethylcytosine
  modified_base 33: mod_base = OTHER; note = 2'-fluorouridine
  modified_base 35: mod_base = OTHER; note = Cytosine phosphorothiorate
  modified_base 37: mod_base = OTHER; note = Adenosine phosphorothiorate
  modified_base 38: mod_base = OTHER; note = Adenosine phosphorothiorate
  modified_base 41: mod_base = OTHER; note = 2'-Omethylcytosine
  modified_base 42: mod_base = OTHER; note = 2'-Omethyladenosine
  modified_base 43: mod_base = OTHER; note = 2'-Omethyladenosine
  modified_base 44: mod_base = OTHER; note = 2'-Omethyladenosine
  modified_base 45: mod_base = OTHER; note = 2'-Omethylguanosine
  modified_base 46: mod_base = OTHER; note = 2'-fluoroguanosine
  modified_base 47: mod_base = OTHER; note = 2'-fluorouridine
  modified_base 48: mod_base = OTHER; note = 2'-fluorouridine
  modified_base 49: mod_base = OTHER; note = 2'-Omethylcytosine
  modified_base 50: mod_base = OTHER; note = 2'-Omethylcytosine
  modified_base 52: mod_base = OTHER; note = 2'-Omethylguanosine
  modified_base 54: mod_base = OTHER; note = 2'-Omethyluridine
  modified_base 55: mod_base = OTHER; note = Uridine phosphorothiorate
  modified_base 56: mod_base = OTHER; note = 2'-Omethylcytosine
  modified_base 57: mod_base = OTHER; note = 2'-fluoroguanosine
  modified_base 59: mod_base = OTHER; note = 2'-Omethylguanosine
  modified_base 61: mod_base = OTHER; note = 2'-Omethylcytosine
  modified_base 65: mod_base = OTHER; note = 2'-Omethylguanosine
  modified_base 73: mod_base = OTHER; note = 2'-Omethylguanosine

SEQ ID NO: 2314 - RNA, 76 nt, synthetic construct; identical to SEQ ID NO: 625
  source 1..76: mol_type = other RNA
  modified_base 1: mod_base = OTHER; note = 2'-Omethylguanosine
  modified_base 2: mod_base = OTHER; note = 2'-Omethylguanosine
  modified_base 3: mod_base = OTHER; note = 2'-Omethylcytosine
  modified_base 4: mod_base = OTHER; note = 2'-Omethyluridine
  modified_base 5: mod_base = OTHER; note = 2'-Omethylcytosine
  modified_base 6: mod_base = OTHER; note = 2'-Omethylcytosine
  modified_base 14: mod_base = OTHER; note = 2'-Omethyladenosine
  modified_base 15: mod_base = OTHER; note = 2'-Omethyladenosine
  modified_base 16: mod_base = OTHER; note = 2'-Omethyluridine
  modified_base 17: mod_base = OTHER; note = 2'-Omethylguanosine
  modified_base 18: mod_base = OTHER; note = 2'-Omethylguanosine
  modified_base 20: mod_base = OTHER; note = 2'-Omethyluridine
  modified_base 22: mod_base = OTHER; note = 2'-Omethylguanosine
  modified_base 23: mod_base = OTHER; note = 2'-Omethylcytosine
  modified_base 24: mod_base = OTHER; note = 2'-Omethylguanosine
  modified_base 25: mod_base = OTHER; note = 2'-Omethylcytosine
  modified_base 33: mod_base = OTHER; note = 2'-fluorouridine
  modified_base 35: mod_base = OTHER; note = Cytosine phosphorothiorate
  modified_base 37: mod_base = OTHER; note = Adenosine phosphorothiorate
  modified_base 38: mod_base = OTHER; note = Adenosine phosphorothiorate
  modified_base 41: mod_base = OTHER; note = 2'-Omethylcytosine
  modified_base 42: mod_base = OTHER; note = 2'-Omethyladenosine
  modified_base 43: mod_base = OTHER; note = 2'-Omethyladenosine
  modified_base 44: mod_base = OTHER; note = 2'-Omethyladenosine
  modified_base 45: mod_base = OTHER; note = 2'-Omethylguanosine
  modified_base 46: mod_base = OTHER; note = 2'-fluoroguanosine
  modified_base 48: mod_base = OTHER; note = 2'-fluorouridine
  modified_base 49: mod_base = OTHER; note = 2'-Omethylcytosine
  modified_base 50: mod_base = OTHER; note = 2'-Omethylcytosine
  modified_base 52: mod_base = OTHER; note = 2'-Omethylguanosine
  modified_base 54: mod_base = OTHER; note = 2'-Omethyluridine
  modified_base 55: mod_base = OTHER; note = Uridine phosphorothiorate
  modified_base 56: mod_base = OTHER; note = 2'-Omethylcytosine
  modified_base 57: mod_base = OTHER; note = 2'-fluoroguanosine
  modified_base 59: mod_base = OTHER; note = 2'-Omethylguanosine
  modified_base 61: mod_base = OTHER; note = 2'-Omethylcytosine
  modified_base 65: mod_base = OTHER; note = 2'-Omethylguanosine
  modified_base 73: mod_base = OTHER; note = 2'-Omethylguanosine

SEQ ID NO: 2315 - RNA, 76 nt, synthetic construct; identical to SEQ ID NO: 625
  source 1..76: mol_type = other RNA
  modified_base 1: mod_base = OTHER; note = 2'-Omethylguanosine
  modified_base 2: mod_base = OTHER; note = 2'-Omethylguanosine
  modified_base 3: mod_base = OTHER; note = 2'-Omethylcytosine
  modified_base 4: mod_base = OTHER; note = 2'-Omethyluridine
  modified_base 5: mod_base = OTHER; note = 2'-Omethylcytosine
  modified_base 6: mod_base = OTHER; note = 2'-Omethylcytosine
  modified_base 14: mod_base = OTHER; note = 2'-Omethyladenosine
  modified_base 15: mod_base = OTHER; note = 2'-Omethyladenosine
  modified_base 16: mod_base = OTHER; note = 2'-Omethyluridine
  modified_base 17: mod_base = OTHER; note = 2'-Omethylguanosine
  modified_base 18: mod_base = OTHER; note = 2'-Omethylguanosine
  modified_base 20: mod_base = OTHER; note = 2'-Omethyluridine
  modified_base 22: mod_base = OTHER; note = 2'-Omethylguanosine
  modified_base 23: mod_base = OTHER; note = 2'-Omethylcytosine
  modified_base 24: mod_base = OTHER; note = 2'-Omethylguanosine
  modified_base 25: mod_base = OTHER; note = 2'-Omethylcytosine
  modified_base 33: mod_base = OTHER; note = 2'-fluorouridine
  modified_base 35: mod_base = OTHER; note = Cytosine phosphorothiorate
  modified_base 37: mod_base = OTHER; note = Adenosine phosphorothiorate
  modified_base 38: mod_base = OTHER; note = Adenosine phosphorothiorate
  modified_base 41: mod_base = OTHER; note = 2'-Omethylcytosine
  modified_base 42: mod_base = OTHER; note = 2'-Omethyladenosine
  modified_base 43: mod_base = OTHER; note = 2'-Omethyladenosine
  modified_base 44: mod_base = OTHER; note = 2'-Omethyladenosine
  modified_base 45: mod_base = OTHER; note = 2'-Omethylguanosine
  modified_base 46: mod_base = OTHER; note = 2'-fluoroguanosine
  modified_base 47: mod_base = OTHER; note = 2'-fluorouridine
  modified_base 48: mod_base = OTHER; note = 2'-fluorouridine
  modified_base 49: mod_base = OTHER; note = 2'-Omethylcytosine
  modified_base 50: mod_base = OTHER; note = 2'-Omethylcytosine
  modified_base 52: mod_base = OTHER; note = 2'-Omethylguanosine
  modified_base 54: mod_base = OTHER; note = 2'-Omethyluridine
  modified_base 55: mod_base = OTHER; note = Uridine phosphorothiorate
  modified_base 56: mod_base = OTHER; note = 2'-Omethylcytosine
  modified_base 57: mod_base = OTHER; note = 2'-fluoroguanosine
  modified_base 59: mod_base = OTHER; note = 2'-Omethylguanosine
  modified_base 61: mod_base = OTHER; note = 2'-Omethylcytosine
  modified_base 65: mod_base = OTHER; note = 2'-Omethylguanosine
  modified_base 73: mod_base = OTHER; note = 2'-Omethylguanosine

SEQ ID NO: 2316 - RNA, 76 nt, synthetic construct; identical to SEQ ID NO: 625
  source 1..76: mol_type = other RNA
  modified_base 1: mod_base = OTHER; note = 2'-Omethylguanosine phosphorothiorate
  modified_base 2: mod_base = OTHER; note = 2'-Omethylguanosine phosphorothiorate
  modified_base 14: mod_base = OTHER; note = 2'-Omethyladenosine
  modified_base 17: mod_base = OTHER; note = 2'-Omethylguanosine
  modified_base 18: mod_base = OTHER; note = 2'-Omethylguanosine
  modified_base 20: mod_base = OTHER; note = 2'-Omethyluridine phosphorothiorate
  modified_base 22: mod_base = OTHER; note = 2'-Omethylguanosine
  modified_base 25: mod_base = OTHER; note = 2'-Omethylcytosine
  modified_base 27: mod_base = OTHER; note = 2'-Omethyluridine
  modified_base 33: mod_base = OTHER; note = 2'-fluorouridine
  modified_base 41: mod_base = OTHER; note = 2'-Omethylcytosine phosphorothiorate
  modified_base 44: mod_base = OTHER; note = 2'-Omethyladenosine phosphorothiorate
  modified_base 45: mod_base = OTHER; note = 2'-Omethylguanosine
  modified_base 46: mod_base = OTHER; note = 2'-fluoroguanosine
  modified_base 47: mod_base = OTHER; note = 2'-fluorouridine
  modified_base 48: mod_base = OTHER; note = 2'-fluorouridine
  modified_base 52: mod_base = OTHER; note = 2'-Omethylguanosine
  modified_base 55: mod_base = OTHER; note = Uridine phosphorothiorate
  modified_base 71: mod_base = OTHER; note = 2'-Omethyluridine
  modified_base 73: mod_base = OTHER; note = 2'-Omethylguanosine

SEQ ID NO: 2317 - RNA, 76 nt, synthetic construct; identical to SEQ ID NO: 625
  source 1..76: mol_type = other RNA
  modified_base 1: mod_base = OTHER; note = 2'-Omethylguanosine phosphorothiorate
  modified_base 2: mod_base = OTHER; note = 2'-Omethylguanosine phosphorothiorate
  modified_base 14: mod_base = OTHER; note = 2'-Omethyladenosine
  modified_base 17: mod_base = OTHER; note = 2'-Omethylguanosine
  modified_base 18: mod_base = OTHER; note = 2'-Omethylguanosine
  modified_base 20: mod_base = OTHER; note = 2'-Omethyluridine phosphorothiorate
  modified_base 22: mod_base = OTHER; note = 2'-Omethylguanosine
  modified_base 25: mod_base = OTHER; note = 2'-Omethylcytosine
  modified_base 27: mod_base = OTHER; note = 2'-Omethyluridine
  modified_base 33: mod_base = OTHER; note = 2'-fluorouridine
  modified_base 41: mod_base = OTHER; note = 2'-Omethylcytosine phosphorothiorate
  modified_base 44: mod_base = OTHER; note = 2'-Omethyladenosine
  modified_base 45: mod_base = OTHER; note = 2'-Omethylguanosine
  modified_base 46: mod_base = OTHER; note = 2'-fluoroguanosine
  modified_base 47: mod_base = OTHER; note = 2'-fluorouridine
  modified_base 48: mod_base = OTHER; note = 2'-fluorouridine
  modified_base 52: mod_base = OTHER; note = 2'-Omethylguanosine
  modified_base 55: mod_base = OTHER; note = Uridine phosphorothiorate
  modified_base 71: mod_base = OTHER; note = 2'-Omethyluridine
  modified_base 73: mod_base = OTHER; note = 2'-Omethylguanosine

SEQ ID NO: 2318 - RNA, 76 nt, synthetic construct; identical to SEQ ID NO: 625
  source 1..76: mol_type = other RNA
  modified_base 1: mod_base = OTHER; note = 2'-Omethylguanosine phosphorothiorate
  modified_base 2: mod_base = OTHER; note = 2'-Omethylguanosine phosphorothiorate
  modified_base 14: mod_base = OTHER; note = 2'-Omethyladenosine
  modified_base 17: mod_base = OTHER; note = 2'-Omethylguanosine
  modified_base 18: mod_base = OTHER; note = 2'-Omethylguanosine
  modified_base 20: mod_base = OTHER; note = 2'-Omethyluridine phosphorothiorate
  modified_base 22: mod_base = OTHER; note = 2'-Omethylguanosine
  modified_base 25: mod_base = OTHER; note = 2'-Omethylcytosine
  modified_base 27: mod_base = OTHER; note = 2'-Omethyluridine
  modified_base 33: mod_base = OTHER; note = 2'-fluorouridine
  modified_base 41: mod_base = OTHER; note = 2'-Omethylcytosine phosphorothiorate
  modified_base 44: mod_base = OTHER; note = 2'-Omethyladenosine
  modified_base 45: mod_base = OTHER; note = 2'-Omethylguanosine
  modified_base 46: mod_base = OTHER; note = 2'-fluoroguanosine
  modified_base 47: mod_base = OTHER; note = 2'-fluorouridine
  modified_base 48: mod_base = OTHER; note = 2'-fluorouridine
  modified_base 52: mod_base = OTHER; note = 2'-Omethylguanosine
  modified_base 55: mod_base = OTHER; note = Uridine phosphorothiorate
  modified_base 73: mod_base = OTHER; note = 2'-Omethylguanosine

SEQ ID NO: 2319 - RNA, 76 nt, synthetic construct; identical to SEQ ID NO: 625
  source 1..76: mol_type = other RNA
  modified_base 1: mod_base = OTHER; note = 2'-Omethylguanosine phosphorothiorate
  modified_base 2: mod_base = OTHER; note = 2'-Omethylguanosine phosphorothiorate
  modified_base 14: mod_base = OTHER; note = 2'-Omethyladenosine
  modified_base 17: mod_base = OTHER; note = 2'-Omethylguanosine
  modified_base 18: mod_base = OTHER; note = 2'-Omethylguanosine
  modified_base 20: mod_base = OTHER; note = 2'-Omethyluridine
  modified_base 22: mod_base = OTHER; note = 2'-Omethylguanosine
  modified_base 25: mod_base = OTHER; note = 2'-Omethylcytosine
  modified_base 27: mod_base = OTHER; note = 2'-Omethyluridine
  modified_base 33: mod_base = OTHER; note = 2'-fluorouridine
  modified_base 41: mod_base = OTHER; note = 2'-Omethylcytosine
  modified_base 44: mod_base = OTHER; note = 2'-Omethyladenosine
  modified_base 45: mod_base = OTHER; note = 2'-Omethylguanosine
  modified_base 46: mod_base = OTHER; note = 2'-fluoroguanosine
  modified_base 47: mod_base = OTHER; note = 2'-fluorouridine
  modified_base 48: mod_base = OTHER; note = 2'-fluorouridine
  modified_base 52: mod_base = OTHER; note = 2'-Omethylguanosine
  modified_base 55: mod_base = OTHER; note = Uridine phosphorothiorate
  modified_base 71: mod_base = OTHER; note = 2'-Omethyluridine
  modified_base 73: mod_base = OTHER; note = 2'-Omethylguanosine

SEQ ID NO: 2320 - RNA, 76 nt, synthetic construct; identical to SEQ ID NO: 625
  source 1..76: mol_type = other RNA
  modified_base 1: mod_base = OTHER; note = 2'-Omethylguanosine phosphorothiorate
  modified_base 2: mod_base = OTHER; note = 2'-Omethylguanosine phosphorothiorate
  modified_base 3: mod_base = OTHER; note = 2'-Omethylcytosine
  modified_base 4: mod_base = OTHER; note = 2'-Omethyluridine
  modified_base 5: mod_base = OTHER; note = 2'-Omethylcytosine
  modified_base 6: mod_base = OTHER; note = 2'-Omethylcytosine
  modified_base 14: mod_base = OTHER; note = 2'-Omethyladenosine
  modified_base 17: mod_base = OTHER; note = 2'-Omethylguanosine
  modified_base 18: mod_base = OTHER; note = 2'-Omethylguanosine
  modified_base 20: mod_base = OTHER; note = 2'-Omethyluridine
  modified_base 22: mod_base = OTHER; note = 2'-Omethylguanosine
  modified_base 25: mod_base = OTHER; note = 2'-Omethylcytosine
  modified_base 27: mod_base = OTHER; note = 2'-Omethyluridine
  modified_base 33: mod_base = OTHER; note = 2'-fluorouridine
  modified_base 41: mod_base = OTHER; note = 2'-Omethylcytosine
  modified_base 44: mod_base = OTHER; note = 2'-Omethyladenosine
  modified_base 45: mod_base = OTHER; note = 2'-Omethylguanosine
  modified_base 46: mod_base = OTHER; note = 2'-fluoroguanosine
  modified_base 47: mod_base = OTHER; note = 2'-fluorouridine
  modified_base 48: mod_base = OTHER; note = 2'-fluorouridine
  modified_base 52: mod_base = OTHER; note = 2'-Omethylguanosine
  modified_base 55: mod_base = OTHER; note = Uridine phosphorothiorate
  modified_base 71: mod_base = OTHER; note = 2'-Omethyluridine
  modified_base 73: mod_base = OTHER; note = 2'-Omethylguanosine

SEQ ID NO: 2321 - RNA, 76 nt, synthetic construct; identical to SEQ ID NO: 625
  source 1..76: mol_type = other RNA
  modified_base 1: mod_base = OTHER; note = 2'-Omethylguanosine
  modified_base 2: mod_base = OTHER; note = 2'-Omethylguanosine
  modified_base 3: mod_base = OTHER; note = 2'-Omethylcytosine
  modified_base 4: mod_base = OTHER; note = 2'-Omethyluridine
  modified_base 5: mod_base = OTHER; note = 2'-Omethylcytosine
  modified_base 6: mod_base = OTHER; note = 2'-Omethylcytosine
  modified_base 14: mod_base = OTHER; note = 2'-Omethyladenosine
  modified_base 17: mod_base = OTHER; note = 2'-Omethylguanosine
  modified_base 18: mod_base = OTHER; note = 2'-Omethylguanosine
  modified_base 20: mod_base = OTHER; note = 2'-Omethyluridine
  modified_base 22: mod_base = OTHER; note = 2'-Omethylguanosine
  modified_base 25: mod_base = OTHER; note = 2'-Omethylcytosine
  modified_base 27: mod_base = OTHER; note = 2'-Omethyluridine
  modified_base 33: mod_base = OTHER; note = 2'-fluorouridine
  modified_base 41: mod_base = OTHER; note = 2'-Omethylcytosine
  modified_base 44: mod_base = OTHER; note = 2'-Omethyladenosine
  modified_base 45: mod_base = OTHER; note = 2'-Omethylguanosine
  modified_base 46: mod_base = OTHER; note = 2'-fluoroguanosine
  modified_base 47: mod_base = OTHER; note = 2'-fluorouridine
  modified_base 48: mod_base = OTHER; note = 2'-fluorouridine
  modified_base 52: mod_base = OTHER; note = 2'-Omethylguanosine
  modified_base 55: mod_base = OTHER; note = Uridine phosphorothiorate
  modified_base 71: mod_base = OTHER; note = 2'-Omethyluridine
  modified_base 73: mod_base = OTHER; note = 2'-Omethylguanosine

SEQ ID NO: 2322 - RNA, 76 nt, synthetic construct; identical to SEQ ID NO: 625
  source 1..76: mol_type = other RNA
  modified_base 1: mod_base = OTHER; note = 2'-Omethylguanosine
  modified_base 2: mod_base = OTHER; note = 2'-Omethylguanosine
  modified_base 3: mod_base = OTHER; note = 2'-Omethylcytosine
  modified_base 4: mod_base = OTHER; note = 2'-Omethyluridine
  modified_base 5: mod_base = OTHER; note = 2'-Omethylcytosine
  modified_base 6: mod_base = OTHER; note = 2'-Omethylcytosine
  modified_base 14: mod_base = OTHER; note = 2'-Omethyladenosine
  modified_base 17: mod_base = OTHER; note = 2'-Omethylguanosine
  modified_base 18: mod_base = OTHER; note = 2'-Omethylguanosine
  modified_base 20: mod_base = OTHER; note = 2'-Omethyluridine
  modified_base 22: mod_base = OTHER; note = 2'-Omethylguanosine
  modified_base 25: mod_base = OTHER; note = 2'-Omethylcytosine
  modified_base 27: mod_base = OTHER; note = 2'-Omethyluridine
  modified_base 33: mod_base = OTHER; note = 2'-fluorouridine
  modified_base 41: mod_base = OTHER; note = 2'-Omethylcytosine
  modified_base 44: mod_base = OTHER; note = 2'-Omethyladenosine
  modified_base 45: mod_base = OTHER; note = 2'-Omethylguanosine
  modified_base 46: mod_base = OTHER; note = 2'-fluoroguanosine
  modified_base 47: mod_base = OTHER; note = 2'-fluorouridine
  modified_base 48: mod_base = OTHER; note = 2'-fluorouridine
  modified_base 52: mod_base = OTHER; note = 2'-Omethylguanosine
  modified_base 55: mod_base = OTHER; note = Uridine phosphorothiorate
  modified_base 73: mod_base = OTHER; note = 2'-Omethylguanosine

SEQ ID NO: 2323 - RNA, 76 nt, synthetic construct; identical to SEQ ID NO: 625
  source 1..76: mol_type = other RNA
  modified_base 33: mod_base = OTHER; note = 2'-fluorouridine
  modified_base 41: mod_base = OTHER; note = 2'-Omethylcytosine
  modified_base 44: mod_base = OTHER; note = 2'-Omethyladenosine
  modified_base 45: mod_base = OTHER; note = 2'-Omethylguanosine
  modified_base 46: mod_base = OTHER; note = 2'-fluoroguanosine
  modified_base 47: mod_base = OTHER; note = 2'-fluorouridine
  modified_base 48: mod_base = OTHER; note = 2'-fluorouridine
  modified_base 52: mod_base = OTHER; note = 2'-Omethylguanosine
  modified_base 55: mod_base = OTHER; note = Uridine phosphorothiorate
  modified_base 71: mod_base = OTHER; note = 2'-Omethyluridine
  modified_base 73: mod_base = OTHER; note = 2'-Omethylguanosine

SEQ ID NO: 2324 - RNA, 76 nt, synthetic construct; identical to SEQ ID NO: 625
  source 1..76: mol_type = other RNA
  modified_base 1: mod_base = OTHER; note = 2'-Omethylguanosine
  modified_base 2: mod_base = OTHER; note = 2'-Omethylguanosine
  modified_base 3: mod_base = OTHER; note = 2'-Omethylcytosine
  modified_base 4: mod_base = OTHER; note = 2'-Omethyluridine
  modified_base 5: mod_base = OTHER; note = 2'-Omethylcytosine
  modified_base 6: mod_base = OTHER; note = 2'-Omethylcytosine
  modified_base 14: mod_base = OTHER; note = 2'-Omethyladenosine
  modified_base 17: mod_base = OTHER; note = 2'-Omethylguanosine
  modified_base 18: mod_base = OTHER; note = 2'-Omethylguanosine
  modified_base 20: mod_base = OTHER; note = 2'-Omethyluridine
  modified_base 22: mod_base = OTHER; note = 2'-Omethylguanosine
  modified_base 25: mod_base = OTHER; note = 2'-Omethylcytosine
  modified_base 27: mod_base = OTHER; note = 2'-Omethyluridine
  modified_base 73: mod_base = OTHER; note = 2'-Omethylguanosine

SEQ ID NO: 2325 - RNA, 76 nt, synthetic construct; identical to SEQ ID NO: 625
  source 1..76: mol_type = other RNA
  modified_base 1: mod_base = OTHER; note = 2'-Omethylguanosine
  modified_base 2: mod_base = OTHER; note = 2'-Omethylguanosine
  modified_base 3: mod_base = OTHER; note = 2'-Omethylcytosine
  modified_base 4: mod_base = OTHER; note = 2'-Omethyluridine
  modified_base 5: mod_base = OTHER; note = 2'-Omethylcytosine
  modified_base 6: mod_base = OTHER; note = 2'-Omethylcytosine
  modified_base 33: mod_base = OTHER; note = 2'-fluorouridine
  modified_base 41: mod_base = OTHER; note = 2'-Omethylcytosine
  modified_base 44: mod_base = OTHER; note = 2'-Omethyladenosine
  modified_base 45: mod_base = OTHER; note = 2'-Omethylguanosine
  modified_base 46: mod_base = OTHER; note = 2'-fluoroguanosine
  modified_base 47: mod_base = OTHER; note = 2'-fluorouridine
  modified_base 48: mod_base = OTHER; note = 2'-fluorouridine
  modified_base 52: mod_base = OTHER; note = 2'-Omethylguanosine
  modified_base 55: mod_base = OTHER; note = Uridine phosphorothiorate
  modified_base 71: mod_base = OTHER; note = 2'-Omethyluridine
  modified_base 73: mod_base = OTHER; note = 2'-Omethylguanosine

SEQ ID NO: 2326 - RNA, 76 nt, synthetic construct; identical to SEQ ID NO: 625
  source 1..76: mol_type = other RNA
  modified_base 1: mod_base = OTHER; note = 2'-Omethylguanosine
  modified_base 2: mod_base = OTHER; note = 2'-Omethylguanosine
  modified_base 3: mod_base = OTHER; note = 2'-Omethylcytosine
  modified_base 4: mod_base = OTHER; note = 2'-Omethyluridine
  modified_base 5: mod_base = OTHER; note = 2'-Omethylcytosine
  modified_base 6: mod_base = OTHER; note = 2'-Omethylcytosine
  modified_base 14: mod_base = OTHER; note = 2'-Omethyladenosine
  modified_base 17: mod_base = OTHER; note = 2'-Omethylguanosine
  modified_base 18: mod_base = OTHER; note = 2'-Omethylguanosine
  modified_base 20: mod_base = OTHER; note = 2'-Omethyluridine
  modified_base 22: mod_base = OTHER; note = 2'-Omethylguanosine
  modified_base 25: mod_base = OTHER; note = 2'-Omethylcytosine
  modified_base 27: mod_base = OTHER; note = 2'-Omethyluridine
  modified_base 33: mod_base = OTHER; note = 2'-fluorouridine
  modified_base 71: mod_base = OTHER; note = 2'-Omethyluridine
  modified_base 73: mod_base = OTHER; note = 2'-Omethylguanosine

SEQ ID NO: 2327-2413 - skipped (87 entries)

SEQ ID NO: 2414 - RNA, 76 nt, synthetic construct; identical to SEQ ID NO: 625
  source 1..76: mol_type = other RNA
  modified_base 1: mod_base = OTHER; note = 2'-Omethylguanosine
  modified_base 2: mod_base = OTHER; note = 2'-fluoroguanosine
  modified_base 3: mod_base = OTHER; note = 2'-fluorocytosine
  modified_base 4: mod_base = OTHER; note = 2'-Omethyluridine
  modified_base 6: mod_base = OTHER; note = 2'-Omethylcytosine
  modified_base 7: mod_base = OTHER; note = Guanosine phosphorothiorate
  modified_base 10: mod_base = OTHER; note = 2'-Omethylguanosine
  modified_base 12: mod_base = OTHER; note = 2'-fluoroguanosine
  modified_base 17: mod_base = OTHER; note = 2'-Omethylguanosine
  modified_base 23: mod_base = OTHER; note = 2'-Omethylcytosine
  modified_base 27: mod_base = OTHER; note = 2'-Omethyluridine
  modified_base 28: mod_base = OTHER; note = Uridine phosphorothiorate
  modified_base 30: mod_base = OTHER; note = 2'-Omethylguanosine phosphorothiorate
  modified_base 31: mod_base = OTHER; note = 2'-Omethyladenosine
  modified_base 39: mod_base = OTHER; note = 2'-Omethyluridine
  modified_base 41: mod_base = OTHER; note = 2'-Omethylcytosine
  modified_base 42: mod_base = OTHER; note = 2'-Omethyladenosine
  modified_base 43: mod_base = OTHER; note = 2'-fluoroadenosine phosphorothiorate
  modified_base 49: mod_base = OTHER; note = 2'-Omethylcytosine
  modified_base 56: mod_base = OTHER; note = 2'-fluorocytosine
  modified_base 57: mod_base = OTHER; note = 2'-Omethylguanosine
  modified_base 59: mod_base = OTHER; note = 2'-Omethylguanosine
  modified_base 66: mod_base = OTHER; note = 2'-Omethylcytosine
  modified_base 70: mod_base = OTHER; note = 2'-Omethylguanosine phosphorothiorate
  modified_base 74: mod_base = OTHER; note = 2'-Omethylcytosine
  modified_base 75: mod_base = OTHER; note = 2'-fluorocytosine

SEQ ID NO: 2415 - RNA, 76 nt, synthetic construct; identical to SEQ ID NO: 625
  source 1..76: mol_type = other RNA
  modified_base 5: mod_base = OTHER; note = 2'-fluorocytosine
  modified_base 10: mod_base = OTHER; note = Guanosine phosphorothiorate
  modified_base 11: mod_base = OTHER; note = 2'-Omethylcytosine
  modified_base 13: mod_base = OTHER; note = 2'-Omethylcytosine
  modified_base 14: mod_base = OTHER; note = 2'-fluoroadenosine
  modified_base 15: mod_base = OTHER; note = Adenosine phosphorothiorate
  modified_base 18: mod_base = OTHER; note = 2'-Omethylguanosine
  modified_base 20: mod_base = OTHER; note = 2'-Omethyluridine
  modified_base 22: mod_base = OTHER; note = 2'-fluoroguanosine
  modified_base 24: mod_base = OTHER; note = 2'-fluoroguanosine
  modified_base 33: mod_base = OTHER; note = 2'-fluorouridine
  modified_base 34: mod_base = OTHER; note = 2'-fluorouridine
  modified_base 37: mod_base = OTHER; note = Adenosine phosphorothiorate
  modified_base 39: mod_base = OTHER; note = 2'-fluorouridine
  modified_base 42: mod_base = OTHER; note = 2'-Omethyladenosine phosphorothiorate
  modified_base 45: mod_base = OTHER; note = 2'-Omethylguanosine phosphorothiorate
  modified_base 53: mod_base = OTHER; note = 2'-Omethylguanosine
  modified_base 54: mod_base = OTHER; note = 2'-Omethyluridine
  modified_base 58: mod_base = OTHER; note = 2'-fluoroadenosine
  modified_base 59: mod_base = OTHER; note = 2'-fluoroguanosine phosphorothiorate
  modified_base 60: mod_base = OTHER; note = 2'-fluorouridine phosphorothiorate
  modified_base 65: mod_base = OTHER; note = 2'-fluoroguanosine
  modified_base 67: mod_base = OTHER; note = 2'-Omethylguanosine
  modified_base 68: mod_base = OTHER; note = 2'-fluoroguanosine
  modified_base 69: mod_base = OTHER; note = 2'-Omethyladenosine
  modified_base 70: mod_base = OTHER; note = Guanosine phosphorothiorate
  modified_base 71: mod_base = OTHER; note = 2'-fluorouridine phosphorothiorate
  modified_base 72: mod_base = OTHER; note = 2'-Omethylcytosine
  modified_base 73: mod_base = OTHER; note = 2'-Omethylguanosine phosphorothiorate
  modified_base 74: mod_base = OTHER; note = 2'-Omethylcytosine phosphorothiorate

SEQ ID NO: 2416 - RNA, 76 nt, synthetic construct; identical to SEQ ID NO: 625
  source 1..76: mol_type = other RNA
  modified_base 1: mod_base = OTHER; note = Guanosine phosphorothiorate
  modified_base 2: mod_base = OTHER; note = 2'-Omethylguanosine
  modified_base 6: mod_base = OTHER; note = 2'-fluorocytosine phosphorothiorate
  modified_base 9: mod_base = OTHER; note = Guanosine phosphorothiorate
  modified_base 10: mod_base = OTHER; note = 2'-fluoroguanosine phosphorothiorate
  modified_base 11: mod_base = OTHER; note = 2'-fluorocytosine
  modified_base 13: mod_base = OTHER; note = 2'-fluorocytosine
  modified_base 15: mod_base = OTHER; note = 2'-fluoroadenosine
  modified_base 16: mod_base = OTHER; note = 2'-fluorouridine
  modified_base 20: mod_base = OTHER; note = 2'-fluorouridine
  modified_base 23: mod_base = OTHER; note = Cytosine phosphorothiorate
  modified_base 25: mod_base = OTHER; note = 2'-fluorocytosine phosphorothiorate
  modified_base 28: mod_base = OTHER; note = 2'-fluorouridine phosphorothiorate
  modified_base 29: mod_base = OTHER; note = 2'-fluoroguanosine
  modified_base 34: mod_base = OTHER; note = Uridine phosphorothiorate
  modified_base 37: mod_base = OTHER; note = Adenosine phosphorothiorate
  modified_base 38: mod_base = OTHER; note = 2'-fluoroadenosine
  modified_base 40: mod_base = OTHER; note = 2'-fluorouridine
  modified_base 41: mod_base = OTHER; note = 2'-fluorocytosine
  modified_base 43: mod_base = OTHER; note = Adenosine phosphorothiorate
  modified_base 48: mod_base = OTHER; note = 2'-Omethyluridine
  modified_base 49: mod_base = OTHER; note = 2'-fluorocytosine
  modified_base 61: mod_base = OTHER; note = 2'-fluorocytosine
  modified_base 62: mod_base = OTHER; note = 2'-fluorocytosine
  modified_base 68: mod_base = OTHER; note = Guanosine phosphorothiorate
  modified_base 69: mod_base = OTHER; note = 2'-Omethyladenosine
  modified_base 72: mod_base = OTHER; note = 2'-fluorocytosine
  modified_base 76: mod_base = OTHER; note = 2'-Omethyladenosine

SEQ ID NO: 2417 - RNA, 76 nt, synthetic construct; identical to SEQ ID NO: 625
  source 1..76: mol_type = other RNA
  modified_base 3: mod_base = OTHER; note = 2'-Omethylcytosine
  modified_base 5: mod_base = OTHER; note = 2'-Omethylcytosine
  modified_base 6: mod_base = OTHER; note = Cytosine phosphorothiorate
  modified_base 10: mod_base = OTHER; note = 2'-Omethylguanosine
  modified_base 14: mod_base = OTHER; note = 2'-fluoroadenosine
  modified_base 19: mod_base = OTHER; note = Adenosine phosphorothiorate
  modified_base 20: mod_base = OTHER; note = Uridine phosphorothiorate
  modified_base 21: mod_base = OTHER; note = Adenosine phosphorothiorate
  modified_base 22: mod_base = OTHER; note = 2'-fluoroguanosine
  modified_base 24: mod_base = OTHER; note = Guanosine phosphorothiorate
  modified_base 25: mod_base = OTHER; note = Cytosine phosphorothiorate
  modified_base 26: mod_base = OTHER; note = 2'-fluoroadenosine phosphorothiorate
  modified_base 27: mod_base = OTHER; note = Uridine phosphorothiorate
  modified_base 28: mod_base = OTHER; note = 2'-fluorouridine
  modified_base 31: mod_base = OTHER; note = 2'-Omethyladenosine
  modified_base 39: mod_base = OTHER; note = Uridine phosphorothiorate
  modified_base 43: mod_base = OTHER; note = 2'-Omethyladenosine
  modified_base 46: mod_base = OTHER; note = 2'-fluoroguanosine
  modified_base 47: mod_base = OTHER; note = Uridine phosphorothiorate
  modified_base 48: mod_base = OTHER; note = 2'-Omethyluridine
  modified_base 53: mod_base = OTHER; note = 2'-fluoroguanosine
  modified_base 54: mod_base = OTHER; note = 2'-fluorouridine
  modified_base 56: mod_base = OTHER; note = 2'-fluorocytosine
  modified_base 57: mod_base = OTHER; note = 2'-Omethylguanosine
  modified_base 59: mod_base = OTHER; note = 2'-fluoroguanosine
  modified_base 60: mod_base = OTHER; note = 2'-fluorouridine
  modified_base 63: mod_base = OTHER; note = 2'-fluorocytosine
  modified_base 64: mod_base = OTHER; note = 2'-fluoroguanosine
  modified_base 66: mod_base = OTHER; note = 2'-fluorocytosine
  modified_base 67: mod_base = OTHER; note = 2'-fluoroguanosine
  modified_base 68: mod_base = OTHER; note = 2'-fluoroguanosine
  modified_base 69: mod_base = OTHER; note = 2'-Omethyladenosine phosphorothiorate

SEQ ID NO: 2418 - RNA, 76 nt, synthetic construct; identical to SEQ ID NO: 625
  source 1..76: mol_type = other RNA
  modified_base 1: mod_base = OTHER; note = 2'-Omethylguanosine
  modified_base 11: mod_base = OTHER; note = 2'-Omethylcytosine
  modified_base 12: mod_base = OTHER; note = 2'-Omethylguanosine
  modified_base 13: mod_base = OTHER; note = 2'-fluorocytosine
  modified_base 18: mod_base = OTHER; note = Guanosine phosphorothiorate
  modified_base 22: mod_base = OTHER; note = 2'-Omethylguanosine
  modified_base 23: mod_base = OTHER; note = 2'-fluorocytosine
  modified_base 24: mod_base = OTHER; note = 2'-fluoroguanosine
  modified_base 25: mod_base = OTHER; note = 2'-Omethylcytosine
  modified_base 27: mod_base = OTHER; note = 2'-fluorouridine phosphorothiorate
  modified_base 31: mod_base = OTHER; note = 2'-Omethyladenosine
  modified_base 32: mod_base = OTHER; note = 2'-fluorocytosine
  modified_base 36: mod_base = OTHER; note = Adenosine phosphorothiorate
  modified_base 38: mod_base = OTHER; note = 2'-Omethyladenosine
  modified_base 43: mod_base = OTHER; note = Adenosine phosphorothiorate
  modified_base 44: mod_base = OTHER; note = 2'-Omethyladenosine
  modified_base 45: mod_base = OTHER; note = Guanosine phosphorothiorate
  modified_base 47: mod_base = OTHER; note = 2'-fluorouridine
  modified_base 48: mod_base = OTHER; note = 2'-fluorouridine
  modified_base 52: mod_base = OTHER; note = 2'-Omethylguanosine
  modified_base 53: mod_base = OTHER; note = 2'-Omethylguanosine
  modified_base 54: mod_base = OTHER; note = Uridine phosphorothiorate
  modified_base 57: mod_base = OTHER; note = 2'-Omethylguanosine phosphorothiorate
  modified_base 59: mod_base = OTHER; note = 2'-Omethylguanosine
  modified_base 64: mod_base = OTHER; note = 2'-Omethylguanosine
  modified_base 70: mod_base = OTHER; note = 2'-fluoroguanosine
  modified_base 76: mod_base = OTHER; note = 2'-fluoroadenosine

SEQ ID NO: 2419 - RNA, 76 nt, synthetic construct; identical to SEQ ID NO: 625
  source 1..76: mol_type = other RNA
  modified_base 6: mod_base = OTHER; note = 2'-fluorocytosine
  modified_base 19: mod_base = OTHER; note = Adenosine phosphorothiorate
  modified_base 20: mod_base = OTHER; note = 2'-Omethyluridine
  modified_base 23: mod_base = OTHER; note = 2'-Omethylcytosine
  modified_base 26: mod_base = OTHER; note = Adenosine phosphorothiorate
  modified_base 27: mod_base = OTHER; note = 2'-fluorouridine phosphorothiorate
  modified_base 28: mod_base = OTHER; note = 2'-Omethyluridine
  modified_base 29: mod_base = OTHER; note = 2'-Omethylguanosine
  modified_base 30: mod_base = OTHER; note = 2'-fluoroguanosine
  modified_base 36: mod_base = OTHER; note = Adenosine phosphorothiorate
  modified_base 40: mod_base = OTHER; note = 2'-Omethyluridine
  modified_base 44: mod_base = OTHER; note = Adenosine phosphorothiorate
  modified_base 46: mod_base = OTHER; note = 2'-Omethylguanosine
  modified_base 50: mod_base = OTHER; note = 2'-Omethylcytosine
  modified_base 51: mod_base = OTHER; note = 2'-Omethylguanosine
  modified_base 53: mod_base = OTHER; note = 2'-Omethylguanosine
  modified_base 54: mod_base = OTHER; note = Uridine phosphorothiorate
  modified_base 56: mod_base = OTHER; note = 2'-Omethylcytosine phosphorothiorate
  modified_base 57: mod_base = OTHER; note = 2'-Omethylguanosine
  modified_base 58: mod_base = OTHER; note = Adenosine phosphorothiorate
  modified_base 59: mod_base = OTHER; note = 2'-fluoroguanosine
  modified_base 61: mod_base = OTHER; note = 2'-fluorocytosine phosphorothiorate
  modified_base 62: mod_base = OTHER; note = 2'-fluorocytosine
  modified_base 63: mod_base = OTHER; note = 2'-Omethylcytosine
  modified_base 64: mod_base = OTHER; note = Guanosine phosphorothiorate
  modified_base 65: mod_base = OTHER; note = 2'-Omethylguanosine
  modified_base 66: mod_base = OTHER; note = 2'-Omethylcytosine
  modified_base 67: mod_base = OTHER; note = 2'-fluoroguanosine phosphorothiorate
  modified_base 68: mod_base = OTHER; note = 2'-fluoroguanosine
  modified_base 71: mod_base = OTHER; note = 2'-fluorouridine
  modified_base 72: mod_base = OTHER; note = 2'-fluorocytosine phosphorothiorate
  modified_base 73: mod_base = OTHER; note = 2'-fluoroguanosine

SEQ ID NO: 2420 - RNA, 76 nt, synthetic construct; identical to SEQ ID NO: 625
  source 1..76: mol_type = other RNA
  modified_base 2: mod_base = OTHER; note = Guanosine phosphorothiorate
  modified_base 10: mod_base = OTHER; note = Guanosine phosphorothiorate
  modified_base 17: mod_base = OTHER; note = Guanosine phosphorothiorate
  modified_base 18: mod_base = OTHER; note = 2'-fluoroguanosine
  modified_base 22: mod_base = OTHER; note = Guanosine phosphorothiorate
  modified_base 23: mod_base = OTHER; note = 2'-fluorocytosine
  modified_base 25: mod_base = OTHER; note = 2'-fluorocytosine
  modified_base 26: mod_base = OTHER; note = 2'-fluoroadenosine
  modified_base 29: mod_base = OTHER; note = 2'-Omethylguanosine
  modified_base 32: mod_base = OTHER; note = 2'-fluorocytosine
  modified_base 33: mod_base = OTHER; note = 2'-fluorouridine
  modified_base 34: mod_base = OTHER; note = 2'-Omethyluridine
  modified_base 38: mod_base = OTHER; note = 2'-fluoroadenosine
  modified_base 41: mod_base = OTHER; note = 2'-fluorocytosine
  modified_base 42: mod_base = OTHER; note = Adenosine phosphorothiorate
  modified_base 43: mod_base = OTHER; note = 2'-fluoroadenosine
  modified_base 45: mod_base = OTHER; note = 2'-Omethylguanosine
  modified_base 47: mod_base = OTHER; note = 2'-fluorouridine
  modified_base 48: mod_base = OTHER; note = Uridine phosphorothiorate
  modified_base 49: mod_base = OTHER; note = 2'-Omethylcytosine
  modified_base 50: mod_base = OTHER; note = 2'-fluorocytosine
  modified_base 51: mod_base = OTHER; note = Guanosine phosphorothiorate
  modified_base 53: mod_base = OTHER; note = Guanosine phosphorothiorate
  modified_base 54: mod_base = OTHER; note = 2'-fluorouridine
  modified_base 56: mod_base = OTHER; note = 2'-Omethylcytosine phosphorothiorate
  modified_base 57: mod_base = OTHER; note = 2'-fluoroguanosine
  modified_base 60: mod_base = OTHER; note = 2'-fluorouridine
  modified_base 63: mod_base = OTHER; note = 2'-fluorocytosine
  modified_base 65: mod_base = OTHER; note = 2'-Omethylguanosine
  modified_base 67: mod_base = OTHER; note = 2'-Omethylguanosine
  modified_base 68: mod_base = OTHER; note = 2'-fluoroguanosine
  modified_base 70: mod_base = OTHER; note = 2'-Omethylguanosine
  modified_base 74: mod_base = OTHER; note = 2'-fluorocytosine

SEQ ID NO: 2421 - RNA, 76 nt, synthetic construct; identical to SEQ ID NO: 625
  source 1..76: mol_type = other RNA
  modified_base 2: mod_base = OTHER; note = 2'-Omethylguanosine
  modified_base 4: mod_base = OTHER; note = 2'-Omethyluridine
  modified_base 5: mod_base = OTHER; note = 2'-fluorocytosine
  modified_base 10: mod_base = OTHER; note = 2'-Omethylguanosine
  modified_base 11: mod_base = OTHER; note = 2'-fluorocytosine
  modified_base 12: mod_base = OTHER; note = 2'-fluoroguanosine
  modified_base 14: mod_base = OTHER; note = 2'-fluoroadenosine
  modified_base 15: mod_base = OTHER; note = 2'-fluoroadenosine
  modified_base 27: mod_base = OTHER; note = 2'-Omethyluridine
  modified_base 30: mod_base = OTHER; note = 2'-fluoroguanosine
  modified_base 31: mod_base = OTHER; note = 2'-fluoroadenosine
  modified_base 32: mod_base = OTHER; note = 2'-fluorocytosine
  modified_base 34: mod_base = OTHER; note = Uridine phosphorothiorate
  modified_base 36: mod_base = OTHER; note = Adenosine phosphorothiorate
  modified_base 38: mod_base = OTHER; note = 2'-Omethyladenosine phosphorothiorate
  modified_base 40: mod_base = OTHER; note = 2'-Omethyluridine
  modified_base 42: mod_base = OTHER; note = 2'-Omethyladenosine
  modified_base 45: mod_base = OTHER; note = 2'-fluoroguanosine
  modified_base 47: mod_base = OTHER; note = 2'-Omethyluridine
  modified_base 50: mod_base = OTHER; note = 2'-Omethylcytosine
  modified_base 52: mod_base = OTHER; note = 2'-fluoroguanosine
  modified_base 54: mod_base = OTHER; note = 2'-fluorouridine
  modified_base 56: mod_base = OTHER; note = 2'-fluorocytosine
  modified_base 59: mod_base = OTHER; note = Guanosine phosphorothiorate
  modified_base 62: mod_base = OTHER; note = 2'-fluorocytosine
  modified_base 64: mod_base = OTHER; note = 2'-fluoroguanosine
  modified_base 65: mod_base = OTHER; note = Guanosine phosphorothiorate
  modified_base 67: mod_base = OTHER; note = 2'-fluoroguanosine phosphorothiorate
  modified_base 69: mod_base = OTHER; note = 2'-Omethyladenosine
  modified_base 72: mod_base = OTHER; note = 2'-Omethylcytosine
  modified_base 75: mod_base = OTHER; note = 2'-fluorocytosine
  modified_base 76: mod_base = OTHER; note = 2'-fluoroadenosine

SEQ ID NO: 2422 - RNA, 76 nt, synthetic construct; identical to SEQ ID NO: 625
  source 1..76: mol_type = other RNA
  modified_base 1: mod_base = OTHER; note = 2'-fluoroguanosine
  modified_base 2: mod_base = OTHER; note = Guanosine phosphorothiorate
  modified_base 3: mod_base = OTHER; note = 2'-fluorocytosine
  modified_base 6: mod_base = OTHER; note = Cytosine phosphorothiorate
  modified_base 7: mod_base = OTHER; note = Guanosine phosphorothiorate
  modified_base 8: mod_base = OTHER; note = Uridine phosphorothiorate
  modified_base 11: mod_base = OTHER; note = 2'-Omethylcytosine phosphorothiorate
  modified_base 12: mod_base = OTHER; note = 2'-fluoroguanosine
  modified_base 14: mod_base = OTHER; note = 2'-Omethyladenosine
  modified_base 17: mod_base = OTHER; note = Guanosine phosphorothiorate
  modified_base 18: mod_base = OTHER; note = 2'-Omethylguanosine
  modified_base 24: mod_base = OTHER; note = 2'-Omethylguanosine
  modified_base 28: mod_base = OTHER; note = Uridine phosphorothiorate
  modified_base 29: mod_base = OTHER; note = 2'-Omethylguanosine
  modified_base 36: mod_base = OTHER; note = Adenosine phosphorothiorate
  modified_base 39: mod_base = OTHER; note = 2'-fluorouridine
  modified_base 40: mod_base = OTHER; note = 2'-Omethyluridine phosphorothiorate
  modified_base 44: mod_base = OTHER; note = Adenosine phosphorothiorate
  modified_base 46: mod_base = OTHER; note = 2'-fluoroguanosine phosphorothiorate
  modified_base 47: mod_base = OTHER; note = 2'-fluorouridine
  modified_base 49: mod_base = OTHER; note = 2'-fluorocytosine
  modified_base 53: mod_base = OTHER; note = 2'-fluoroguanosine
  modified_base 58: mod_base = OTHER; note = 2'-fluoroadenosine
  modified_base 59: mod_base = OTHER; note = 2'-Omethylguanosine
  modified_base 60: mod_base = OTHER; note = 2'-fluorouridine
  modified_base 61: mod_base = OTHER; note = 2'-Omethylcytosine
  modified_base 64: mod_base = OTHER; note = Guanosine phosphorothiorate
  modified_base 65: mod_base = OTHER; note = 2'-fluoroguanosine
  modified_base 69: mod_base = OTHER; note = 2'-fluoroadenosine
  modified_base 70: mod_base = OTHER; note = 2'-fluoroguanosine
  modified_base 72: mod_base = OTHER; note = Cytosine phosphorothiorate
  modified_base 73: mod_base = OTHER; note = 2'-fluoroguanosine
  modified_base 75: mod_base = OTHER; note = 2'-fluorocytosine phosphorothiorate
  modified_base 76: mod_base = OTHER; note = 2'-Omethyladenosine

SEQ ID NO: 2423 - RNA, 76 nt, synthetic construct; identical to SEQ ID NO: 625
  source 1..76: mol_type = other RNA
  modified_base 2: mod_base = OTHER; note = 2'-Omethylguanosine phosphorothiorate
  modified_base 3: mod_base = OTHER; note = 2'-Omethylcytosine
  modified_base 4: mod_base = OTHER; note = 2'-fluorouridine
  modified_base 7: mod_base = OTHER; note = Guanosine phosphorothiorate
  modified_base 10: mod_base = OTHER; note = Guanosine phosphorothiorate
  modified_base 11: mod_base = OTHER; note = 2'-Omethylcytosine
  modified_base 14: mod_base = OTHER; note = 2'-fluoroadenosine
  modified_base 16: mod_base = OTHER; note = 2'-Omethyluridine
  modified_base 17: mod_base = OTHER; note = Guanosine phosphorothiorate
  modified_base 20: mod_base = OTHER; note = 2'-Omethyluridine
  modified_base 22: mod_base = OTHER; note = 2'-fluoroguanosine phosphorothiorate
  modified_base 23: mod_base = OTHER; note = 2'-Omethylcytosine phosphorothiorate
  modified_base 24: mod_base = OTHER; note = 2'-Omethylguanosine
  modified_base 25: mod_base = OTHER; note = Cytosine phosphorothiorate
  modified_base 27: mod_base = OTHER; note = Uridine phosphorothiorate
  modified_base 29: mod_base = OTHER; note = Guanosine phosphorothiorate
  modified_base 34: mod_base = OTHER; note = Uridine phosphorothiorate
  modified_base 40: mod_base = OTHER; note = 2'-Omethyluridine
  modified_base 43: mod_base = OTHER; note = 2'-Omethyladenosine
  modified_base 44: mod_base = OTHER; note = Adenosine phosphorothiorate
  modified_base 45: mod_base = OTHER; note = 2'-Omethylguanosine phosphorothiorate
  modified_base 46: mod_base = OTHER; note = Guanosine phosphorothiorate
  modified_base 47: mod_base = OTHER; note = 2'-fluorouridine phosphorothiorate
  modified_base 48: mod_base = OTHER; note = 2'-fluorouridine
  modified_base 49: mod_base = OTHER; note = Cytosine phosphorothiorate
  modified_base 51: mod_base = OTHER; note = Guanosine phosphorothiorate
  modified_base 52: mod_base = OTHER; note = 2'-Omethylguanosine
  modified_base 56: mod_base = OTHER; note = Cytosine phosphorothiorate
  modified_base 57: mod_base = OTHER; note = 2'-Omethylguanosine
  modified_base 61: mod_base = OTHER; note = 2'-fluorocytosine
  modified_base 65: mod_base = OTHER; note = 2'-Omethylguanosine
  modified_base 66: mod_base = OTHER; note = 2'-fluorocytosine
  modified_base 72: mod_base = OTHER; note = Cytosine phosphorothiorate
  modified_base 73: mod_base = OTHER; note = 2'-fluoroguanosine
  modified_base 74: mod_base = OTHER; note = Cytosine phosphorothiorate
  modified_base 76: mod_base = OTHER; note = 2'-fluoroadenosine

SEQ ID NO: 2424 - RNA, 76 nt, synthetic construct; identical to SEQ ID NO: 625
  source 1..76: mol_type = other RNA
  modified_base 1: mod_base = OTHER; note = 2'-Omethylguanosine
  modified_base 2: mod_base = OTHER; note = 2'-Omethylguanosine
  modified_base 3: mod_base = OTHER; note = Cytosine phosphorothiorate
  modified_base 5: mod_base = OTHER; note = 2'-fluorocytosine
  modified_base 6: mod_base = OTHER; note = 2'-fluorocytosine
  modified_base 8: mod_base = OTHER; note = Uridine phosphorothiorate
  modified_base 9: mod_base = OTHER; note = Guanosine phosphorothiorate
  modified_base 10: mod_base = OTHER; note = 2'-fluoroguanosine
  modified_base 14: mod_base = OTHER; note = 2'-Omethyladenosine
  modified_base 16: mod_base = OTHER; note = 2'-fluorouridine
  modified_base 18: mod_base = OTHER; note = Guanosine phosphorothiorate
  modified_base 20: mod_base = OTHER; note = Uridine phosphorothiorate
  modified_base 26: mod_base = OTHER; note = 2'-Omethyladenosine
  modified_base 29: mod_base = OTHER; note = 2'-fluoroguanosine
  modified_base 31: mod_base = OTHER; note = 2'-fluoroadenosine
  modified_base 34: mod_base = OTHER; note = 2'-fluorouridine
  modified_base 37: mod_base = OTHER; note = Adenosine phosphorothiorate
  modified_base 38: mod_base = OTHER; note = 2'-fluoroadenosine
  modified_base 40: mod_base = OTHER; note = 2'-Omethyluridine
  modified_base 44: mod_base = OTHER; note = Adenosine phosphorothiorate
  modified_base 45: mod_base = OTHER; note = 2'-Omethylguanosine phosphorothiorate
  modified_base 46: mod_base = OTHER; note = 2'-fluoroguanosine
  modified_base 52: mod_base = OTHER; note = 2'-fluoroguanosine
  modified_base 54: mod_base = OTHER; note = 2'-fluorouridine
  modified_base 59: mod_base = OTHER; note = Guanosine phosphorothiorate
  modified_base 60: mod_base = OTHER; note = 2'-fluorouridine
  modified_base 62: mod_base = OTHER; note = Cytosine phosphorothiorate
  modified_base 63: mod_base = OTHER; note = Cytosine phosphorothiorate
  modified_base 65: mod_base = OTHER; note = 2'-fluoroguanosine phosphorothiorate
  modified_base 66: mod_base = OTHER; note = 2'-fluorocytosine
  modified_base 68: mod_base = OTHER; note = Guanosine phosphorothiorate
  modified_base 69: mod_base = OTHER; note = Adenosine phosphorothiorate
  modified_base 70: mod_base = OTHER; note = 2'-fluoroguanosine
  modified_base 71: mod_base = OTHER; note = 2'-Omethyluridine
  modified_base 73: mod_base = OTHER; note = Guanosine phosphorothiorate
  modified_base 74: mod_base = OTHER; note = 2'-Omethylcytosine
  modified_base 75: mod_base = OTHER; note = 2'-Omethylcytosine
  modified_base 76: mod_base = OTHER; note = 2'-Omethyladenosine

SEQ ID NO: 2425 - RNA, 76 nt, synthetic construct; identical to SEQ ID NO: 625
  source 1..76: mol_type = other RNA
  modified_base 1: mod_base = OTHER; note = 2'-fluoroguanosine
  modified_base 2: mod_base = OTHER; note = Guanosine phosphorothiorate
  modified_base 3: mod_base = OTHER; note = 2'-fluorocytosine
  modified_base 4: mod_base = OTHER; note = 2'-fluorouridine
  modified_base 6: mod_base = OTHER; note = 2'-Omethylcytosine
  modified_base 8: mod_base = OTHER; note = Uridine phosphorothiorate
  modified_base 14: mod_base = OTHER; note = 2'-fluoroadenosine
  modified_base 15: mod_base = OTHER; note = 2'-Omethyladenosine phosphorothiorate
  modified_base 16: mod_base = OTHER; note = 2'-fluorouridine
  modified_base 18: mod_base = OTHER; note = Guanosine phosphorothiorate
  modified_base 22: mod_base = OTHER; note = 2'-Omethylguanosine phosphorothiorate
  modified_base 23: mod_base = OTHER; note = 2'-Omethylcytosine
  modified_base 26: mod_base = OTHER; note = Adenosine phosphorothiorate
  modified_base 28: mod_base = OTHER; note = 2'-Omethyluridine
  modified_base 30: mod_base = OTHER; note = 2'-fluoroguanosine
  modified_base 31: mod_base = OTHER; note = 2'-Omethyladenosine
  modified_base 33: mod_base = OTHER; note = 2'-fluorouridine phosphorothiorate
  modified_base 34: mod_base = OTHER; note = 2'-Omethyluridine
  modified_base 37: mod_base = OTHER; note = Adenosine phosphorothiorate
  modified_base 38: mod_base = OTHER; note = 2'-Omethyladenosine
  modified_base 40: mod_base = OTHER; note = Uridine phosphorothiorate
  modified_base 42: mod_base = OTHER; note = 2'-fluoroadenosine
  modified_base 47: mod_base = OTHER; note = 2'-Omethyluridine
  modified_base 49: mod_base = OTHER; note = 2'-fluorocytosine
  modified_base 52: mod_base = OTHER; note = Guanosine phosphorothiorate
  modified_base 56: mod_base = OTHER; note = Cytosine phosphorothiorate
  modified_base 61: mod_base = OTHER; note = 2'-Omethylcytosine
  modified_base 63: mod_base = OTHER; note = Cytosine phosphorothiorate
  modified_base 64: mod_base = OTHER; note = 2'-Omethylguanosine
  modified_base 66: mod_base = OTHER; note = 2'-Omethylcytosine
  modified_base 67: mod_base = OTHER; note = Guanosine phosphorothiorate
  modified_base 68: mod_base = OTHER; note = 2'-fluoroguanosine
  modified_base 69: mod_base = OTHER; note = Adenosine phosphorothiorate
  modified_base 71: mod_base = OTHER; note = 2'-Omethyluridine
  modified_base 73: mod_base = OTHER; note = 2'-Omethylguanosine
  modified_base 74: mod_base = OTHER; note = Cytosine phosphorothiorate
  modified_base 75: mod_base = OTHER; note = 2'-Omethylcytosine phosphorothiorate
  modified_base 76: mod_base = OTHER; note = 2'-fluoroadenosine

SEQ ID NO: 2426 - RNA, 76 nt, synthetic construct; identical to SEQ ID NO: 625
  source 1..76: mol_type = other RNA
  modified_base 1: mod_base = OTHER; note = Guanosine phosphorothiorate
  modified_base 2: mod_base = OTHER; note = 2'-fluoroguanosine
  modified_base 4: mod_base = OTHER; note = 2'-Omethyluridine
  modified_base 5: mod_base = OTHER; note = Cytosine phosphorothiorate
  modified_base 6: mod_base = OTHER; note = 2'-fluorocytosine
  modified_base 7: mod_base = OTHER; note = Guanosine phosphorothiorate
  modified_base 11: mod_base = OTHER; note = 2'-fluorocytosine
  modified_base 12: mod_base = OTHER; note = 2'-fluoroguanosine phosphorothiorate
  modified_base 14: mod_base = OTHER; note = 2'-Omethyladenosine
  modified_base 15: mod_base = OTHER; note = 2'-fluoroadenosine
  modified_base 17: mod_base = OTHER; note = 2'-Omethylguanosine phosphorothiorate
  modified_base 18: mod_base = OTHER; note = 2'-fluoroguanosine
  modified_base 20: mod_base = OTHER; note = 2'-fluorouridine
  modified_base 22: mod_base = OTHER; note = Guanosine phosphorothiorate
  modified_base 23: mod_base = OTHER; note = 2'-fluorocytosine
  modified_base 29: mod_base = OTHER; note = 2'-fluoroguanosine
  modified_base 30: mod_base = OTHER; note = 2'-Omethylguanosine
  modified_base 31: mod_base = OTHER; note = 2'-fluoroadenosine
  modified_base 38: mod_base = OTHER; note = 2'-fluoroadenosine
  modified_base 43: mod_base = OTHER; note = 2'-fluoroadenosine
  modified_base 44: mod_base = OTHER; note = 2'-Omethyladenosine
  modified_base 45: mod_base = OTHER; note = 2'-fluoroguanosine
  modified_base 46: mod_base = OTHER; note = 2'-fluoroguanosine
  modified_base 48: mod_base = OTHER; note = 2'-fluorouridine
  modified_base 49: mod_base = OTHER; note = 2'-Omethylcytosine
  modified_base 50: mod_base = OTHER; note = 2'-fluorocytosine
  modified_base 52: mod_base = OTHER; note = 2'-fluoroguanosine
  modified_base 53: mod_base = OTHER; note = 2'-fluoroguanosine
  modified_base 58: mod_base = OTHER; note = 2'-fluoroadenosine
  modified_base 60: mod_base = OTHER; note = Uridine phosphorothiorate
  modified_base 62: mod_base = OTHER; note = 2'-Omethylcytosine
  modified_base 64: mod_base = OTHER; note = 2'-fluoroguanosine
  modified_base 68: mod_base = OTHER; note = 2'-Omethylguanosine
  modified_base 69: mod_base = OTHER; note = 2'-Omethyladenosine
  modified_base 73: mod_base = OTHER; note = 2'-Omethylguanosine phosphorothiorate
  modified_base 74: mod_base = OTHER; note = 2'-Omethylcytosine
  modified_base 76: mod_base = OTHER; note = 2'-Omethyladenosine

SEQ ID NO: 2427 - RNA, 76 nt, synthetic construct; identical to SEQ ID NO: 625
  source 1..76: mol_type = other RNA
  modified_base 8: mod_base = OTHER; note = Uridine phosphorothiorate
  modified_base 9: mod_base = OTHER; note = Guanosine phosphorothiorate
  modified_base 13: mod_base = OTHER; note = Cytosine phosphorothiorate
  modified_base 14: mod_base = OTHER; note = 2'-fluoroadenosine
  modified_base 15: mod_base = OTHER; note = 2'-fluoroadenosine
  modified_base 20: mod_base = OTHER; note = Uridine phosphorothiorate
  modified_base 23: mod_base = OTHER; note = Cytosine phosphorothiorate
  modified_base 24: mod_base = OTHER; note = 2'-fluoroguanosine
  modified_base 29: mod_base = OTHER; note = 2'-fluoroguanosine
  modified_base 30: mod_base = OTHER; note = 2'-Omethylguanosine
  modified_base 32: mod_base = OTHER; note = 2'-fluorocytosine
  modified_base 33: mod_base = OTHER; note = Uridine phosphorothiorate
  modified_base 34: mod_base = OTHER; note = 2'-Omethyluridine
  modified_base 36: mod_base = OTHER; note = Adenosine phosphorothiorate
  modified_base 41: mod_base = OTHER; note = 2'-Omethylcytosine phosphorothiorate
  modified_base 42: mod_base = OTHER; note = 2'-Omethyladenosine
  modified_base 44: mod_base = OTHER; note = 2'-Omethyladenosine
  modified_base 47: mod_base = OTHER; note = 2'-fluorouridine
  modified_base 48: mod_base = OTHER; note = Uridine phosphorothiorate
  modified_base 49: mod_base = OTHER; note = Cytosine phosphorothiorate
  modified_base 53: mod_base = OTHER; note = Guanosine phosphorothiorate
  modified_base 54: mod_base = OTHER; note = 2'-Omethyluridine
  modified_base 55: mod_base = OTHER; note = Uridine phosphorothiorate
  modified_base 58: mod_base = OTHER; note = 2'-fluoroadenosine
  modified_base 60: mod_base = OTHER; note = Uridine phosphorothiorate
  modified_base 62: mod_base = OTHER; note = Cytosine phosphorothiorate
  modified_base 64: mod_base = OTHER; note = 2'-Omethylguanosine
  modified_base 65: mod_base = OTHER; note = 2'-fluoroguanosine
  modified_base 66: mod_base = OTHER; note = 2'-fluorocytosine
  modified_base 68: mod_base = OTHER; note = 2'-Omethylguanosine
  modified_base 70: mod_base = OTHER; note = Guanosine phosphorothiorate
  modified_base 71: mod_base = OTHER; note = 2'-Omethyluridine
  modified_base 73: mod_base = OTHER; note = 2'-fluoroguanosine
  modified_base 76: mod_base = OTHER; note = 2'-Omethyladenosine

SEQ ID NO: 2428 - RNA, 76 nt, synthetic construct; identical to SEQ ID NO: 625
  source 1..76: mol_type = other RNA
  modified_base 2: mod_base = OTHER; note = 2'-Omethylguanosine
  modified_base 4: mod_base = OTHER; note = Uridine phosphorothiorate
  modified_base 6: mod_base = OTHER; note = Cytosine phosphorothiorate
  modified_base 8: mod_base = OTHER; note = Uridine phosphorothiorate
  modified_base 10: mod_base = OTHER; note = 2'-fluoroguanosine
  modified_base 12: mod_base = OTHER; note = 2'-fluoroguanosine
  modified_base 13: mod_base = OTHER; note = 2'-Omethylcytosine
  modified_base 16: mod_base = OTHER; note = 2'-fluorouridine
  modified_base 17: mod_base = OTHER; note = Guanosine phosphorothiorate
  modified_base 18: mod_base = OTHER; note = 2'-Omethylguanosine
  modified_base 24: mod_base = OTHER; note = Guanosine phosphorothiorate
  modified_base 27: mod_base = OTHER; note = 2'-fluorouridine
  modified_base 33: mod_base = OTHER; note = Uridine phosphorothiorate
  modified_base 38: mod_base = OTHER; note = 2'-Omethyladenosine phosphorothiorate
  modified_base 39: mod_base = OTHER; note = 2'-fluorouridine
  modified_base 43: mod_base = OTHER; note = 2'-Omethyladenosine
  modified_base 48: mod_base = OTHER; note = Uridine phosphorothiorate
  modified_base 49: mod_base = OTHER; note = 2'-Omethylcytosine
  modified_base 50: mod_base = OTHER; note = 2'-Omethylcytosine
  modified_base 57: mod_base = OTHER; note = 2'-fluoroguanosine
  modified_base 58: mod_base = OTHER; note = 2'-fluoroadenosine phosphorothiorate
  modified_base 59: mod_base = OTHER; note = 2'-Omethylguanosine
  modified_base 61: mod_base = OTHER; note = 2'-fluorocytosine
  modified_base 63: mod_base = OTHER; note = 2'-Omethylcytosine
  modified_base 64: mod_base = OTHER; note = 2'-fluoroguanosine
  modified_base 67: mod_base = OTHER; note = Guanosine phosphorothiorate
  modified_base 69: mod_base = OTHER; note = Adenosine phosphorothiorate
  modified_base 70: mod_base = OTHER; note = 2'-fluoroguanosine
  modified_base 71: mod_base = OTHER; note = 2'-fluorouridine
  modified_base 73: mod_base = OTHER; note = 2'-Omethylguanosine phosphorothiorate
  modified_base 74: mod_base = OTHER; note = 2'-fluorocytosine
  modified_base 75: mod_base = OTHER; note = Cytosine phosphorothiorate
  modified_base 76: mod_base = OTHER; note = 2'-fluoroadenosine

SEQ ID NO: 2429 - RNA, 76 nt, synthetic construct; identical to SEQ ID NO: 625
  source 1..76: mol_type = other RNA
  modified_base 1: mod_base = OTHER; note = 2'-Omethylguanosine
  modified_base 4: mod_base = OTHER; note = 2'-fluorouridine
  modified_base 10: mod_base = OTHER; note = 2'-fluoroguanosine
  modified_base 16: mod_base = OTHER; note = Uridine phosphorothiorate
  modified_base 20: mod_base = OTHER; note = 2'-Omethyluridine
  modified_base 24: mod_base = OTHER; note = 2'-Omethylguanosine
  modified_base 26: mod_base = OTHER; note = 2'-fluoroadenosine
  modified_base 30: mod_base = OTHER; note = 2'-fluoroguanosine phosphorothiorate
  modified_base 31: mod_base = OTHER; note = 2'-Omethyladenosine
  modified_base 34: mod_base = OTHER; note = 2'-Omethyluridine
  modified_base 38: mod_base = OTHER; note = 2'-Omethyladenosine
  modified_base 39: mod_base = OTHER; note = 2'-fluorouridine
  modified_base 40: mod_base = OTHER; note = 2'-fluorouridine
  modified_base 44: mod_base = OTHER; note = 2'-fluoroadenosine
  modified_base 45: mod_base = OTHER; note = Guanosine phosphorothiorate
  modified_base 46: mod_base = OTHER; note = 2'-Omethylguanosine phosphorothiorate
  modified_base 47: mod_base = OTHER; note = 2'-fluorouridine
  modified_base 48: mod_base = OTHER; note = 2'-Omethyluridine
  modified_base 50: mod_base = OTHER; note = Cytosine phosphorothiorate
  modified_base 51: mod_base = OTHER; note = 2'-Omethylguanosine
  modified_base 52: mod_base = OTHER; note = 2'-fluoroguanosine
  modified_base 53: mod_base = OTHER; note = 2'-fluoroguanosine
  modified_base 57: mod_base = OTHER; note = 2'-fluoroguanosine
  modified_base 58: mod_base = OTHER; note = 2'-fluoroadenosine
  modified_base 60: mod_base = OTHER; note = 2'-fluorouridine
  modified_base 61: mod_base = OTHER; note = Cytosine phosphorothiorate
  modified_base 62: mod_base = OTHER; note = 2'-Omethylcytosine
  modified_base 65: mod_base = OTHER; note = Guanosine phosphorothiorate
  modified_base 66: mod_base = OTHER; note = 2'-Omethylcytosine phosphorothiorate
  modified_base 67: mod_base = OTHER; note = 2'-fluoroguanosine
  modified_base 72: mod_base = OTHER; note = Cytosine phosphorothiorate
  modified_base 73: mod_base = OTHER; note = 2'-Omethylguanosine
  modified_base 74: mod_base = OTHER; note = 2'-fluorocytosine

SEQ ID NO: 2430 - RNA, 76 nt, synthetic construct; identical to SEQ ID NO: 625
  source 1..76: mol_type = other RNA
  modified_base 3: mod_base = OTHER; note = 2'-Omethylcytosine
  modified_base 4: mod_base = OTHER; note = 2'-fluorouridine
  modified_base 7: mod_base = OTHER; note = Guanosine phosphorothiorate
  modified_base 8: mod_base = OTHER; note = Uridine phosphorothiorate
  modified_base 10: mod_base = OTHER; note = 2'-fluoroguanosine
  modified_base 15: mod_base = OTHER; note = 2'-Omethyladenosine
  modified_base 16: mod_base = OTHER; note = 2'-Omethyluridine
  modified_base 18: mod_base = OTHER; note = 2'-Omethylguanosine
  modified_base 21: mod_base = OTHER; note = Adenosine phosphorothiorate
  modified_base 22: mod_base = OTHER; note = 2'-Omethylguanosine
  modified_base 23: mod_base = OTHER; note = 2'-fluorocytosine
  modified_base 24: mod_base = OTHER; note = 2'-Omethylguanosine
  modified_base 26: mod_base = OTHER; note = 2'-Omethyladenosine
  modified_base 27: mod_base = OTHER; note = 2'-Omethyluridine
  modified_base 29: mod_base = OTHER; note = 2'-Omethylguanosine
  modified_base 30: mod_base = OTHER; note = Guanosine phosphorothiorate
  modified_base 31: mod_base = OTHER; note = 2'-Omethyladenosine
  modified_base 32: mod_base = OTHER; note = 2'-fluorocytosine
  modified_base 39: mod_base = OTHER; note = Uridine phosphorothiorate
  modified_base 41: mod_base = OTHER; note = 2'-Omethylcytosine
  modified_base 47: mod_base = OTHER; note = 2'-Omethyluridine
  modified_base 48: mod_base = OTHER; note = 2'-Omethyluridine
  modified_base 50: mod_base = OTHER; note = 2'-Omethylcytosine
  modified_base 51: mod_base = OTHER; note = 2'-Omethylguanosine
  modified_base 58: mod_base = OTHER; note = Adenosine phosphorothiorate
  modified_base 67: mod_base = OTHER; note = 2'-fluoroguanosine
  modified_base 68: mod_base = OTHER; note = 2'-Omethylguanosine phosphorothiorate
  modified_base 69: mod_base = OTHER; note = 2'-fluoroadenosine phosphorothiorate
  modified_base 70: mod_base = OTHER; note = 2'-fluoroguanosine
  modified_base 76: mod_base = OTHER; note = 2'-fluoroadenosine

SEQ ID NO: 2431 - RNA, 76 nt, synthetic construct; identical to SEQ ID NO: 625
  source 1..76: mol_type = other RNA
  modified_base 1: mod_base = OTHER; note = 2'-Omethylguanosine
  modified_base 2: mod_base = OTHER; note = 2'-fluoroguanosine
  modified_base 3: mod_base = OTHER; note = Cytosine phosphorothiorate
  modified_base 4: mod_base = OTHER; note = 2'-fluorouridine
  modified_base 10: mod_base = OTHER; note = 2'-Omethylguanosine phosphorothiorate
  modified_base 11: mod_base = OTHER; note = 2'-fluorocytosine
  modified_base 13: mod_base = OTHER; note = Cytosine phosphorothiorate
  modified_base 15: mod_base = OTHER; note = Adenosine phosphorothiorate
  modified_base 16: mod_base = OTHER; note = 2'-fluorouridine
  modified_base 17: mod_base = OTHER; note = 2'-Omethylguanosine
  modified_base 18: mod_base = OTHER; note = 2'-Omethylguanosine
  modified_base 22: mod_base = OTHER; note = 2'-fluoroguanosine
  modified_base 23: mod_base = OTHER; note = 2'-Omethylcytosine
  modified_base 24: mod_base = OTHER; note = Guanosine phosphorothiorate
  modified_base 27: mod_base = OTHER; note = 2'-fluorouridine
  modified_base 40: mod_base = OTHER; note = 2'-Omethyluridine
  modified_base 43: mod_base = OTHER; note = 2'-fluoroadenosine
  modified_base 46: mod_base = OTHER; note = 2'-Omethylguanosine
  modified_base 47: mod_base = OTHER; note = 2'-fluorouridine
  modified_base 49: mod_base = OTHER; note = 2'-Omethylcytosine phosphorothiorate
  modified_base 50: mod_base = OTHER; note = 2'-fluorocytosine
  modified_base 52: mod_base = OTHER; note = 2'-fluoroguanosine
  modified_base 57: mod_base = OTHER; note = 2'-Omethylguanosine
  modified_base 58: mod_base = OTHER; note = Adenosine phosphorothiorate
  modified_base 59: mod_base = OTHER; note = 2'-Omethylguanosine
  modified_base 60: mod_base = OTHER; note = 2'-fluorouridine phosphorothiorate
  modified_base 61: mod_base = OTHER; note = 2'-fluorocytosine
  modified_base 62: mod_base = OTHER; note = 2'-fluorocytosine
  modified_base 64: mod_base = OTHER; note = 2'-fluoroguanosine
  modified_base 65: mod_base = OTHER; note = 2'-fluoroguanosine
  modified_base 67: mod_base = OTHER; note = 2'-Omethylguanosine
  modified_base 68: mod_base = OTHER; note = 2'-Omethylguanosine phosphorothiorate
  modified_base 69: mod_base = OTHER; note = 2'-Omethyladenosine
  modified_base 71: mod_base = OTHER; note = 2'-Omethyluridine
  modified_base 72: mod_base = OTHER; note = 2'-Omethylcytosine
  modified_base 73: mod_base = OTHER; note = 2'-Omethylguanosine

SEQ ID NO: 2432 - RNA, 76 nt, synthetic construct; identical to SEQ ID NO: 625
  source 1..76: mol_type = other RNA
  modified_base 3: mod_base = OTHER; note = 2'-fluorocytosine phosphorothiorate
  modified_base 4: mod_base = OTHER; note = 2'-Omethyluridine phosphorothiorate
  modified_base 5: mod_base = OTHER; note = 2'-Omethylcytosine
  modified_base 10: mod_base = OTHER; note = 2'-Omethylguanosine
  modified_base 11: mod_base = OTHER; note = 2'-Omethylcytosine
  modified_base 12: mod_base = OTHER; note = 2'-Omethylguanosine
  modified_base 14: mod_base = OTHER; note = 2'-Omethyladenosine
  modified_base 19: mod_base = OTHER; note = Adenosine phosphorothiorate
  modified_base 20: mod_base = OTHER; note = 2'-fluorouridine
  modified_base 24: mod_base = OTHER; note = 2'-Omethylguanosine
  modified_base 29: mod_base = OTHER; note = 2'-Omethylguanosine
  modified_base 30: mod_base = OTHER; note = 2'-Omethylguanosine
  modified_base 31: mod_base = OTHER; note = 2'-Omethyladenosine
  modified_base 37: mod_base = OTHER; note = Adenosine phosphorothiorate
  modified_base 38: mod_base = OTHER; note = 2'-Omethyladenosine
  modified_base 39: mod_base = OTHER; note = 2'-fluorouridine
  modified_base 41: mod_base = OTHER; note = 2'-fluorocytosine
  modified_base 43: mod_base = OTHER; note = 2'-fluoroadenosine phosphorothiorate
  modified_base 45: mod_base = OTHER; note = 2'-fluoroguanosine
  modified_base 47: mod_base = OTHER; note = 2'-Omethyluridine phosphorothiorate
  modified_base 48: mod_base = OTHER; note = 2'-Omethyluridine
  modified_base 49: mod_base = OTHER; note = Cytosine phosphorothiorate
  modified_base 51: mod_base = OTHER; note = 2'-Omethylguanosine
  modified_base 52: mod_base = OTHER; note = 2'-Omethylguanosine
  modified_base 57: mod_base = OTHER; note = Guanosine phosphorothiorate
  modified_base 59: mod_base = OTHER; note = 2'-Omethylguanosine
  modified_base 61: mod_base = OTHER; note = Cytosine phosphorothiorate
  modified_base 62: mod_base = OTHER; note = Cytosine phosphorothiorate
  modified_base 63: mod_base = OTHER; note = 2'-fluorocytosine
  modified_base 64: mod_base = OTHER; note = 2'-fluoroguanosine
  modified_base 65: mod_base = OTHER; note = 2'-Omethylguanosine
  modified_base 67: mod_base = OTHER; note = 2'-Omethylguanosine
  modified_base 68: mod_base = OTHER; note = 2'-Omethylguanosine
  modified_base 69: mod_base = OTHER; note = 2'-fluoroadenosine
  modified_base 73: mod_base = OTHER; note = 2'-fluoroguanosine
  modified_base 74: mod_base = OTHER; note = 2'-fluorocytosine

SEQ ID NO: 2433 - RNA, 76 nt, synthetic construct; identical to SEQ ID NO: 625
  source 1..76: mol_type = other RNA
  modified_base 3: mod_base = OTHER; note = 2'-Omethylcytosine
  modified_base 6: mod_base = OTHER; note = 2'-Omethylcytosine
  modified_base 9: mod_base = OTHER; note = Guanosine phosphorothiorate
  modified_base 10: mod_base = OTHER; note = 2'-fluoroguanosine
  modified_base 12: mod_base = OTHER; note = 2'-fluoroguanosine phosphorothiorate
  modified_base 14: mod_base = OTHER; note = 2'-fluoroadenosine phosphorothiorate
  modified_base 15: mod_base = OTHER; note = 2'-fluoroadenosine
  modified_base 22: mod_base = OTHER; note = 2'-fluoroguanosine
  modified_base 24: mod_base = OTHER; note = Guanosine phosphorothiorate
  modified_base 25: mod_base = OTHER; note = 2'-fluorocytosine
  modified_base 26: mod_base = OTHER; note = 2'-Omethyladenosine
  modified_base 28: mod_base = OTHER; note = 2'-fluorouridine
  modified_base 29: mod_base = OTHER; note = 2'-Omethylguanosine
  modified_base 42: mod_base = OTHER; note = 2'-fluoroadenosine
  modified_base 43: mod_base = OTHER; note = 2'-fluoroadenosine
  modified_base 44: mod_base = OTHER; note = 2'-fluoroadenosine
  modified_base 46: mod_base = OTHER; note = 2'-Omethylguanosine
  modified_base 47: mod_base = OTHER; note = 2'-Omethyluridine
  modified_base 48: mod_base = OTHER; note = 2'-fluorouridine phosphorothiorate
  modified_base 50: mod_base = OTHER; note = 2'-fluorocytosine
  modified_base 51: mod_base = OTHER; note = 2'-Omethylguanosine
  modified_base 52: mod_base = OTHER; note = 2'-Omethylguanosine
  modified_base 54: mod_base = OTHER; note = 2'-Omethyluridine
  modified_base 56: mod_base = OTHER; note = 2'-fluorocytosine
  modified_base 60: mod_base = OTHER; note = 2'-fluorouridine
  modified_base 61: mod_base = OTHER; note = Cytosine phosphorothiorate
  modified_base 62: mod_base = OTHER; note = 2'-Omethylcytosine
  modified_base 63: mod_base = OTHER; note = 2'-Omethylcytosine
  modified_base 64: mod_base = OTHER; note = 2'-Omethylguanosine
  modified_base 65: mod_base = OTHER; note = Guanosine phosphorothiorate
  modified_base 66: mod_base = OTHER; note = 2'-Omethylcytosine
  modified_base 71: mod_base = OTHER; note = Uridine phosphorothiorate
  modified_base 74: mod_base = OTHER; note = 2'-fluorocytosine
  modified_base 76: mod_base = OTHER; note = 2'-Omethyladenosine

SEQ ID NO: 2434 - RNA, 76 nt, synthetic construct; identical to SEQ ID NO: 625
  source 1..76: mol_type = other RNA
  modified_base 1: mod_base = OTHER; note = 2'-Omethylguanosine phosphorothiorate
  modified_base 2: mod_base = OTHER; note = 2'-fluoroguanosine
  modified_base 3: mod_base = OTHER; note = 2'-Omethylcytosine
  modified_base 10: mod_base = OTHER; note = 2'-fluoroguanosine
  modified_base 12: mod_base = OTHER; note = Guanosine phosphorothiorate
  modified_base 18: mod_base = OTHER; note = 2'-Omethylguanosine
  modified_base 19: mod_base = OTHER; note = Adenosine phosphorothiorate
  modified_base 20: mod_base = OTHER; note = 2'-fluorouridine phosphorothiorate
  modified_base 23: mod_base = OTHER; note = 2'-Omethylcytosine
  modified_base 38: mod_base = OTHER; note = 2'-Omethyladenosine phosphorothiorate
  modified_base 39: mod_base = OTHER; note = 2'-Omethyluridine
  modified_base 41: mod_base = OTHER; note = 2'-fluorocytosine
  modified_base 42: mod_base = OTHER; note = 2'-fluoroadenosine
  modified_base 43: mod_base = OTHER; note = 2'-Omethyladenosine
  modified_base 45: mod_base = OTHER; note = 2'-Omethylguanosine
  modified_base 47: mod_base = OTHER; note = 2'-fluorouridine phosphorothiorate
  modified_base 48: mod_base = OTHER; note = 2'-Omethyluridine
  modified_base 52: mod_base = OTHER; note = 2'-Omethylguanosine
  modified_base 54: mod_base = OTHER; note = 2'-fluorouridine
  modified_base 56: mod_base = OTHER; note = 2'-fluorocytosine
  modified_base 57: mod_base = OTHER; note = Guanosine phosphorothiorate
  modified_base 59: mod_base = OTHER; note = Guanosine phosphorothiorate
  modified_base 61: mod_base = OTHER; note = 2'-fluorocytosine phosphorothiorate
  modified_base 62: mod_base = OTHER; note = 2'-Omethylcytosine
  modified_base 63: mod_base = OTHER; note = Cytosine phosphorothiorate
  modified_base 69: mod_base = OTHER; note = 2'-fluoroadenosine
  modified_base 70: mod_base = OTHER; note = 2'-fluoroguanosine
  modified_base 71: mod_base = OTHER; note = 2'-fluorouridine
  modified_base 72: mod_base = OTHER; note = 2'-fluorocytosine phosphorothiorate
  modified_base 73: mod_base = OTHER; note = 2'-Omethylguanosine

SEQ ID NO: 2435 - RNA, 76 nt, synthetic construct; identical to SEQ ID NO: 625
  source 1..76: mol_type = other RNA
  modified_base 1: mod_base = OTHER; note = 2'-fluoroguanosine
  modified_base 2: mod_base = OTHER; note = 2'-Omethylguanosine
  modified_base 3: mod_base = OTHER; note = 2'-fluorocytosine
  modified_base 4: mod_base = OTHER; note = Uridine phosphorothiorate
  modified_base 5: mod_base = OTHER; note = 2'-fluorocytosine
  modified_base 6: mod_base = OTHER; note = Cytosine phosphorothiorate
  modified_base 8: mod_base = OTHER; note = Uridine phosphorothiorate
  modified_base 10: mod_base = OTHER; note = 2'-fluoroguanosine
  modified_base 11: mod_base = OTHER; note = 2'-Omethylcytosine
  modified_base 12: mod_base = OTHER; note = 2'-Omethylguanosine
  modified_base 16: mod_base = OTHER; note = 2'-fluorouridine
  modified_base 22: mod_base = OTHER; note = 2'-Omethylguanosine
  modified_base 26: mod_base = OTHER; note = 2'-Omethyladenosine
  modified_base 28: mod_base = OTHER; note = 2'-fluorouridine
  modified_base 29: mod_base = OTHER; note = 2'-fluoroguanosine phosphorothiorate
  modified_base 30: mod_base = OTHER; note = 2'-fluoroguanosine
  modified_base 37: mod_base = OTHER; note = Adenosine phosphorothiorate
  modified_base 38: mod_base = OTHER; note = 2'-fluoroadenosine
  modified_base 39: mod_base = OTHER; note = 2'-Omethyluridine phosphorothiorate
  modified_base 40: mod_base = OTHER; note = 2'-Omethyluridine
  modified_base 41: mod_base = OTHER; note = 2'-fluorocytosine
  modified_base 42: mod_base = OTHER; note = 2'-Omethyladenosine
  modified_base 46: mod_base = OTHER; note = Guanosine phosphorothiorate
  modified_base 47: mod_base = OTHER; note = 2'-fluorouridine
  modified_base 50: mod_base = OTHER; note = 2'-Omethylcytosine
  modified_base 52: mod_base = OTHER; note = 2'-fluoroguanosine phosphorothiorate
  modified_base 53: mod_base = OTHER; note = 2'-fluoroguanosine
  modified_base 54: mod_base = OTHER; note = 2'-Omethyluridine phosphorothiorate
  modified_base 58: mod_base = OTHER; note = 2'-fluoroadenosine phosphorothiorate
  modified_base 60: mod_base = OTHER; note = 2'-Omethyluridine
  modified_base 62: mod_base = OTHER; note = 2'-Omethylcytosine
  modified_base 68: mod_base = OTHER; note = 2'-Omethylguanosine
  modified_base 70: mod_base = OTHER; note = Guanosine phosphorothiorate
  modified_base 71: mod_base = OTHER; note = Uridine phosphorothiorate
  modified_base 72: mod_base = OTHER; note = 2'-fluorocytosine
  modified_base 74: mod_base = OTHER; note = 2'-Omethylcytosine
  modified_base 76: mod_base = OTHER; note = 2'-Omethyladenosine

SEQ ID NO: 2436 - RNA, 76 nt, synthetic construct; identical to SEQ ID NO: 625
  source 1..76: mol_type = other RNA
  modified_base 1: mod_base = OTHER; note = 2'-Omethylguanosine
  modified_base 8: mod_base = OTHER; note = Uridine phosphorothiorate
  modified_base 10: mod_base = OTHER; note = 2'-Omethylguanosine
  modified_base 13: mod_base = OTHER; note = 2'-Omethylcytosine
  modified_base 16: mod_base = OTHER; note = Uridine phosphorothiorate
  modified_base 17: mod_base = OTHER; note = Guanosine phosphorothiorate
  modified_base 18: mod_base = OTHER; note = 2'-fluoroguanosine
  modified_base 20: mod_base = OTHER; note = 2'-fluorouridine
  modified_base 22: mod_base = OTHER; note = 2'-fluoroguanosine
  modified_base 24: mod_base = OTHER; note = 2'-Omethylguanosine
  modified_base 27: mod_base = OTHER; note = 2'-Omethyluridine
  modified_base 30: mod_base = OTHER; note = 2'-fluoroguanosine
  modified_base 31: mod_base = OTHER; note = 2'-Omethyladenosine
  modified_base 33: mod_base = OTHER; note = 2'-fluorouridine
  modified_base 34: mod_base = OTHER; note = 2'-fluorouridine phosphorothiorate
  modified_base 41: mod_base = OTHER; note = Cytosine phosphorothiorate
  modified_base 42: mod_base = OTHER; note = 2'-Omethyladenosine
  modified_base 43: mod_base = OTHER; note = Adenosine phosphorothiorate
  modified_base 44: mod_base = OTHER; note = 2'-fluoroadenosine phosphorothiorate
  modified_base 48: mod_base = OTHER; note = Uridine phosphorothiorate
  modified_base 49: mod_base = OTHER; note = 2'-fluorocytosine
  modified_base 50: mod_base = OTHER; note = 2'-fluorocytosine
  modified_base 51: mod_base = OTHER; note = 2'-Omethylguanosine
  modified_base 56: mod_base = OTHER; note = 2'-fluorocytosine phosphorothiorate
  modified_base 57: mod_base = OTHER; note = 2'-Omethylguanosine
  modified_base 60: mod_base = OTHER; note = 2'-fluorouridine
  modified_base 62: mod_base = OTHER; note = Cytosine phosphorothiorate
  modified_base 64: mod_base = OTHER; note = 2'-Omethylguanosine phosphorothiorate
  modified_base 65: mod_base = OTHER; note = 2'-fluoroguanosine
  modified_base 69: mod_base = OTHER; note = 2'-Omethyladenosine
  modified_base 71: mod_base = OTHER; note = Uridine phosphorothiorate
  modified_base 75: mod_base = OTHER; note = 2'-fluorocytosine phosphorothiorate

SEQ ID NO: 2437 - RNA, 76 nt, synthetic construct; identical to SEQ ID NO: 625
  source 1..76: mol_type = other RNA
  modified_base 1: mod_base = OTHER; note = Guanosine phosphorothiorate
  modified_base 2: mod_base = OTHER; note = Guanosine phosphorothiorate
  modified_base 4: mod_base = OTHER; note = 2'-fluorouridine phosphorothiorate
  modified_base 5: mod_base = OTHER; note = 2'-Omethylcytosine
  modified_base 6: mod_base = OTHER; note = 2'-Omethylcytosine
  modified_base 11: mod_base = OTHER; note = Cytosine phosphorothiorate
  modified_base 12: mod_base = OTHER; note = 2'-fluoroguanosine
  modified_base 18: mod_base = OTHER; note = Guanosine phosphorothiorate
  modified_base 20: mod_base = OTHER; note = 2'-fluorouridine
  modified_base 22: mod_base = OTHER; note = Guanosine phosphorothiorate
  modified_base 24: mod_base = OTHER; note = 2'-fluoroguanosine
  modified_base 28: mod_base = OTHER; note = 2'-fluorouridine
  modified_base 29: mod_base = OTHER; note = Guanosine phosphorothiorate
  modified_base 30: mod_base = OTHER; note = 2'-Omethylguanosine
  modified_base 31: mod_base = OTHER; note = 2'-Omethyladenosine
  modified_base 32: mod_base = OTHER; note = 2'-fluorocytosine
  modified_base 39: mod_base = OTHER; note = 2'-fluorouridine
  modified_base 40: mod_base = OTHER; note = Uridine phosphorothiorate
  modified_base 41: mod_base = OTHER; note = 2'-fluorocytosine phosphorothiorate
  modified_base 42: mod_base = OTHER; note = 2'-fluoroadenosine
  modified_base 50: mod_base = OTHER; note = 2'-fluorocytosine
  modified_base 58: mod_base = OTHER; note = Adenosine phosphorothiorate
  modified_base 60: mod_base = OTHER; note = 2'-Omethyluridine
  modified_base 63: mod_base = OTHER; note = 2'-fluorocytosine
  modified_base 65: mod_base = OTHER; note = 2'-fluoroguanosine phosphorothiorate
  modified_base 66: mod_base = OTHER; note = 2'-fluorocytosine phosphorothiorate
  modified_base 69: mod_base = OTHER; note = 2'-Omethyladenosine
  modified_base 71: mod_base = OTHER; note = 2'-Omethyluridine
  modified_base 73: mod_base = OTHER; note = 2'-Omethylguanosine
  modified_base 74: mod_base = OTHER; note = 2'-fluorocytosine
  modified_base 75: mod_base = OTHER; note = 2'-Omethylcytosine
  modified_base 76: mod_base = OTHER; note = 2'-fluoroadenosine

SEQ ID NO: 2438 - RNA, 76 nt, synthetic construct; identical to SEQ ID NO: 625
  source 1..76: mol_type = other RNA
  modified_base 5: mod_base = OTHER; note = 2'-fluorocytosine
  modified_base 6: mod_base = OTHER; note = 2'-Omethylcytosine
  modified_base 14: mod_base = OTHER; note = Adenosine phosphorothiorate
  modified_base 15: mod_base = OTHER; note = 2'-fluoroadenosine
  modified_base 16: mod_base = OTHER; note = Uridine phosphorothiorate
  modified_base 18: mod_base = OTHER; note = Guanosine phosphorothiorate
  modified_base 24: mod_base = OTHER; note = Guanosine phosphorothiorate
  modified_base 25: mod_base = OTHER; note = 2'-Omethylcytosine phosphorothiorate
  modified_base 26: mod_base = OTHER; note = 2'-Omethyladenosine phosphorothiorate
  modified_base 27: mod_base = OTHER; note = 2'-Omethyluridine
  modified_base 29: mod_base = OTHER; note = Guanosine phosphorothiorate
  modified_base 30: mod_base = OTHER; note = 2'-Omethylguanosine
  modified_base 32: mod_base = OTHER; note = 2'-fluorocytosine
  modified_base 38: mod_base = OTHER; note = 2'-fluoroadenosine
  modified_base 39: mod_base = OTHER; note = 2'-Omethyluridine
  modified_base 40: mod_base = OTHER; note = 2'-fluorouridine
  modified_base 42: mod_base = OTHER; note = 2'-Omethyladenosine phosphorothiorate
  modified_base 43: mod_base = OTHER; note = 2'-fluoroadenosine
  modified_base 46: mod_base = OTHER; note = Guanosine phosphorothiorate
  modified_base 48: mod_base = OTHER; note = 2'-fluorouridine phosphorothiorate
  modified_base 52: mod_base = OTHER; note = 2'-fluoroguanosine
  modified_base 54: mod_base = OTHER; note = Uridine phosphorothiorate
  modified_base 55: mod_base = OTHER; note = Uridine phosphorothiorate
  modified_base 56: mod_base = OTHER; note = 2'-fluorocytosine
  modified_base 58: mod_base = OTHER; note = 2'-fluoroadenosine
  modified_base 59: mod_base = OTHER; note = 2'-Omethylguanosine
  modified_base 60: mod_base = OTHER; note = 2'-Omethyluridine
  modified_base 61: mod_base = OTHER; note = 2'-fluorocytosine
  modified_base 65: mod_base = OTHER; note = 2'-fluoroguanosine
  modified_base 68: mod_base = OTHER; note = Guanosine phosphorothiorate
  modified_base 69: mod_base = OTHER; note = 2'-fluoroadenosine
  modified_base 70: mod_base = OTHER; note = 2'-fluoroguanosine phosphorothiorate
  modified_base 72: mod_base = OTHER; note = 2'-fluorocytosine
  modified_base 75: mod_base = OTHER; note = 2'-Omethylcytosine

SEQ ID NO: 2439 - RNA, 76 nt, synthetic construct; identical to SEQ ID NO: 625
  source 1..76: mol_type = other RNA
  modified_base 2: mod_base = OTHER; note = 2'-Omethylguanosine
  modified_base 4: mod_base = OTHER; note = Uridine phosphorothiorate
  modified_base 5: mod_base = OTHER; note = 2'-fluorocytosine
  modified_base 11: mod_base = OTHER; note = 2'-fluorocytosine phosphorothiorate
  modified_base 12: mod_base = OTHER; note = 2'-Omethylguanosine
  modified_base 14: mod_base = OTHER; note = Adenosine phosphorothiorate
  modified_base 15: mod_base = OTHER; note = 2'-Omethyladenosine
  modified_base 18: mod_base = OTHER; note = 2'-Omethylguanosine
  modified_base 20: mod_base = OTHER; note = 2'-Omethyluridine phosphorothiorate
  modified_base 23: mod_base = OTHER; note = 2'-Omethylcytosine phosphorothiorate
  modified_base 27: mod_base = OTHER; note = 2'-Omethyluridine
  modified_base 28: mod_base = OTHER; note = 2'-Omethyluridine
  modified_base 34: mod_base = OTHER; note = 2'-fluorouridine phosphorothiorate
  modified_base 40: mod_base = OTHER; note = Uridine phosphorothiorate
  modified_base 41: mod_base = OTHER; note = 2'-fluorocytosine
  modified_base 43: mod_base = OTHER; note = 2'-fluoroadenosine
  modified_base 46: mod_base = OTHER; note = 2'-fluoroguanosine
  modified_base 48: mod_base = OTHER; note = 2'-fluorouridine
  modified_base 49: mod_base = OTHER; note = 2'-Omethylcytosine
  modified_base 51: mod_base = OTHER; note = 2'-Omethylguanosine
  modified_base 53: mod_base = OTHER; note = 2'-Omethylguanosine
  modified_base 54: mod_base = OTHER; note = 2'-Omethyluridine phosphorothiorate
  modified_base 64: mod_base = OTHER; note = 2'-Omethylguanosine
  modified_base 67: mod_base = OTHER; note = 2'-fluoroguanosine
  modified_base 68: mod_base = OTHER; note = 2'-Omethylguanosine
  modified_base 69: mod_base = OTHER; note = 2'-fluoroadenosine
  modified_base 71: mod_base = OTHER; note = 2'-Omethyluridine
  modified_base 74: mod_base = OTHER; note = 2'-fluorocytosine

SEQ ID NO: 2440 - RNA, 76 nt, synthetic construct; identical to SEQ ID NO: 625
  source 1..76: mol_type = other RNA
  modified_base 1: mod_base = OTHER; note = 2'-Omethylguanosine
  modified_base 2: mod_base = OTHER; note = 2'-Omethylguanosine
  modified_base 4: mod_base = OTHER; note = 2'-Omethyluridine
  modified_base 5: mod_base = OTHER; note = 2'-fluorocytosine phosphorothiorate
  modified_base 7: mod_base = OTHER; note = Guanosine phosphorothiorate
  modified_base 8: mod_base = OTHER; note = Uridine phosphorothiorate
  modified_base 11: mod_base = OTHER; note = 2'-fluorocytosine
  modified_base 12: mod_base = OTHER; note = Guanosine phosphorothiorate
  modified_base 13: mod_base = OTHER; note = 2'-Omethylcytosine
  modified_base 15: mod_base = OTHER; note = 2'-Omethyladenosine
  modified_base 16: mod_base = OTHER; note = 2'-fluorouridine
  modified_base 17: mod_base = OTHER; note = 2'-Omethylguanosine
  modified_base 21: mod_base = OTHER; note = Adenosine phosphorothiorate
  modified_base 22: mod_base = OTHER; note = 2'-fluoroguanosine
  modified_base 24: mod_base = OTHER; note = 2'-fluoroguanosine
  modified_base 26: mod_base = OTHER; note = 2'-fluoroadenosine
  modified_base 27: mod_base = OTHER; note = Uridine phosphorothiorate
  modified_base 28: mod_base = OTHER; note = 2'-fluorouridine
  modified_base 34: mod_base = OTHER; note = 2'-fluorouridine
  modified_base 39: mod_base = OTHER; note = 2'-fluorouridine
  modified_base 48: mod_base = OTHER; note = Uridine phosphorothiorate
  modified_base 49: mod_base = OTHER; note = 2'-Omethylcytosine
  modified_base 52: mod_base = OTHER; note = 2'-Omethylguanosine
  modified_base 53: mod_base = OTHER; note = 2'-Omethylguanosine
  modified_base 55: mod_base = OTHER; note = Uridine phosphorothiorate
  modified_base 58: mod_base = OTHER; note = 2'-fluoroadenosine
  modified_base 60: mod_base = OTHER; note = 2'-Omethyluridine
  modified_base 62: mod_base = OTHER; note = 2'-fluorocytosine
  modified_base 63: mod_base = OTHER; note = 2'-Omethylcytosine phosphorothiorate
  modified_base 64: mod_base = OTHER; note = 2'-fluoroguanosine
  modified_base 65: mod_base = OTHER; note = 2'-fluoroguanosine
  modified_base 66: mod_base = OTHER; note = 2'-fluorocytosine
  modified_base 67: mod_base = OTHER; note = 2'-Omethylguanosine
  modified_base 68: mod_base = OTHER; note = 2'-Omethylguanosine
  modified_base 72: mod_base = OTHER; note = 2'-Omethylcytosine
  modified_base 74: mod_base = OTHER; note = Cytosine phosphorothiorate
  modified_base 75: mod_base = OTHER; note = 2'-Omethylcytosine

SEQ ID NO: 2441 - RNA, 76 nt, synthetic construct; identical to SEQ ID NO: 625
  source 1..76: mol_type = other RNA
  modified_base 1: mod_base = OTHER; note = Guanosine phosphorothiorate
  modified_base 2: mod_base = OTHER; note = 2'-fluoroguanosine phosphorothiorate
  modified_base 3: mod_base = OTHER; note = 2'-Omethylcytosine
  modified_base 4: mod_base = OTHER; note = 2'-Omethyluridine
  modified_base 5: mod_base = OTHER; note = Cytosine phosphorothiorate
  modified_base 10: mod_base = OTHER; note = 2'-fluoroguanosine
  modified_base 11: mod_base = OTHER; note = 2'-Omethylcytosine
  modified_base 12: mod_base = OTHER; note = 2'-fluoroguanosine
  modified_base 15: mod_base = OTHER; note = 2'-fluoroadenosine
  modified_base 16: mod_base = OTHER; note = 2'-Omethyluridine
  modified_base 18: mod_base = OTHER; note = 2'-Omethylguanosine
  modified_base 24: mod_base = OTHER; note = 2'-Omethylguanosine
  modified_base 25: mod_base = OTHER; note = 2'-Omethylcytosine
  modified_base 30: mod_base = OTHER; note = 2'-Omethylguanosine
  modified_base 31: mod_base = OTHER; note = 2'-fluoroadenosine
  modified_base 32: mod_base = OTHER; note = 2'-fluorocytosine
  modified_base 34: mod_base = OTHER; note = 2'-Omethyluridine
  modified_base 37: mod_base = OTHER; note = Adenosine phosphorothiorate
  modified_base 39: mod_base = OTHER; note = 2'-Omethyluridine
  modified_base 44: mod_base = OTHER; note = 2'-Omethyladenosine phosphorothiorate
  modified_base 45: mod_base = OTHER; note = 2'-fluoroguanosine
  modified_base 46: mod_base = OTHER; note = 2'-fluoroguanosine
  modified_base 50: mod_base = OTHER; note = Cytosine phosphorothiorate
  modified_base 51: mod_base = OTHER; note = Guanosine phosphorothiorate
  modified_base 52: mod_base = OTHER; note = 2'-fluoroguanosine
  modified_base 54: mod_base = OTHER; note = 2'-Omethyluridine
  modified_base 56: mod_base = OTHER; note = 2'-Omethylcytosine
  modified_base 59: mod_base = OTHER; note = 2'-fluoroguanosine
  modified_base 61: mod_base = OTHER; note = 2'-Omethylcytosine
  modified_base 63: mod_base = OTHER; note = 2'-fluorocytosine
  modified_base 64: mod_base = OTHER; note = 2'-Omethylguanosine
  modified_base 65: mod_base = OTHER; note = 2'-fluoroguanosine
  modified_base 75: mod_base = OTHER; note = 2'-Omethylcytosine

SEQ ID NO: 2442 - RNA, 76 nt, synthetic construct; identical to SEQ ID NO: 625
  source 1..76: mol_type = other RNA
  modified_base 1: mod_base = OTHER; note = 2'-fluoroguanosine
  modified_base 2: mod_base = OTHER; note = 2'-fluoroguanosine
  modified_base 3: mod_base = OTHER; note = 2'-fluorocytosine
  modified_base 4: mod_base = OTHER; note = 2'-Omethyluridine
  modified_base 5: mod_base = OTHER; note = 2'-fluorocytosine
  modified_base 9: mod_base = OTHER; note = Guanosine phosphorothiorate
  modified_base 10: mod_base = OTHER; note = 2'-fluoroguanosine
  modified_base 11: mod_base = OTHER; note = 2'-Omethylcytosine
  modified_base 13: mod_base = OTHER; note = 2'-Omethylcytosine
  modified_base 15: mod_base = OTHER; note = 2'-Omethyladenosine phosphorothiorate
  modified_base 16: mod_base = OTHER; note = 2'-Omethyluridine
  modified_base 17: mod_base = OTHER; note = Guanosine phosphorothiorate
  modified_base 23: mod_base = OTHER; note = 2'-Omethylcytosine
  modified_base 26: mod_base = OTHER; note = 2'-Omethyladenosine
  modified_base 33: mod_base = OTHER; note = 2'-fluorouridine
  modified_base 34: mod_base = OTHER; note = 2'-Omethyluridine
  modified_base 38: mod_base = OTHER; note = 2'-fluoroadenosine
  modified_base 40: mod_base = OTHER; note = 2'-fluorouridine
  modified_base 41: mod_base = OTHER; note = 2'-fluorocytosine
  modified_base 43: mod_base = OTHER; note = Adenosine phosphorothiorate
  modified_base 44: mod_base = OTHER; note = 2'-fluoroadenosine
  modified_base 46: mod_base = OTHER; note = Guanosine phosphorothiorate
  modified_base 47: mod_base = OTHER; note = 2'-fluorouridine phosphorothiorate
  modified_base 50: mod_base = OTHER; note = 2'-fluorocytosine
  modified_base 51: mod_base = OTHER; note = 2'-Omethylguanosine
  modified_base 54: mod_base = OTHER; note = Uridine phosphorothiorate
  modified_base 58: mod_base = OTHER; note = 2'-fluoroadenosine
  modified_base 59: mod_base = OTHER; note = 2'-Omethylguanosine
  modified_base 60: mod_base = OTHER; note = Uridine phosphorothiorate
  modified_base 63: mod_base = OTHER; note = 2'-Omethylcytosine
  modified_base 64: mod_base = OTHER; note = 2'-Omethylguanosine
  modified_base 69: mod_base = OTHER; note = 2'-Omethyladenosine
  modified_base 73: mod_base = OTHER; note = 2'-Omethylguanosine
  modified_base 74: mod_base = OTHER; note = Cytosine phosphorothiorate
  modified_base 75: mod_base = OTHER; note = 2'-Omethylcytosine

SEQ ID NO: 2443 - RNA, 76 nt, synthetic construct; identical to SEQ ID NO: 625
  source 1..76: mol_type = other RNA
  modified_base 1: mod_base = OTHER; note = 2'-Omethylguanosine
  modified_base 3: mod_base = OTHER; note = 2'-fluorocytosine
  modified_base 6: mod_base = OTHER; note = 2'-fluorocytosine
  modified_base 7: mod_base = OTHER; note = Guanosine phosphorothiorate
  modified_base 12: mod_base = OTHER; note = Guanosine phosphorothiorate
  modified_base 18: mod_base = OTHER; note = 2'-fluoroguanosine phosphorothiorate
  modified_base 20: mod_base = OTHER; note = 2'-fluorouridine
  modified_base 22: mod_base = OTHER; note = 2'-Omethylguanosine
  modified_base 24: mod_base = OTHER; note = 2'-Omethylguanosine
  modified_base 25: mod_base = OTHER; note = 2'-fluorocytosine
  modified_base 26: mod_base = OTHER; note = 2'-Omethyladenosine
  modified_base 28: mod_base = OTHER; note = 2'-fluorouridine
  modified_base 33: mod_base = OTHER; note = 2'-fluorouridine
  modified_base 34: mod_base = OTHER; note = 2'-fluorouridine
  modified_base 38: mod_base = OTHER; note = Adenosine phosphorothiorate
  modified_base 39: mod_base = OTHER; note = 2'-fluorouridine
  modified_base 40: mod_base = OTHER; note = Uridine phosphorothiorate
  modified_base 41: mod_base = OTHER; note = 2'-Omethylcytosine
  modified_base 42: mod_base = OTHER; note = 2'-Omethyladenosine phosphorothiorate
  modified_base 43: mod_base = OTHER; note = 2'-fluoroadenosine
  modified_base 45: mod_base = OTHER; note = 2'-fluoroguanosine
  modified_base 47: mod_base = OTHER; note = 2'-Omethyluridine
  modified_base 48: mod_base = OTHER; note = 2'-Omethyluridine
  modified_base 50: mod_base = OTHER; note = 2'-Omethylcytosine
  modified_base 57: mod_base = OTHER; note = 2'-fluoroguanosine
  modified_base 59: mod_base = OTHER; note = 2'-Omethylguanosine
  modified_base 62: mod_base = OTHER; note = 2'-Omethylcytosine phosphorothiorate
  modified_base 63: mod_base = OTHER; note = 2'-Omethylcytosine
  modified_base 64: mod_base = OTHER; note = 2'-fluoroguanosine
  modified_base 68: mod_base = OTHER; note = Guanosine phosphorothiorate
  modified_base 70: mod_base = OTHER; note = 2'-fluoroguanosine
  modified_base 71: mod_base = OTHER; note = Uridine phosphorothiorate
  modified_base 72: mod_base = OTHER; note = 2'-Omethylcytosine
  modified_base 73: mod_base = OTHER; note = 2'-fluoroguanosine
  modified_base 74: mod_base = OTHER; note = 2'-fluorocytosine phosphorothiorate
  modified_base 76: mod_base = OTHER; note = 2'-fluoroadenosine

SEQ ID NO: 2444 - RNA, 76 nt, synthetic construct; identical to SEQ ID NO: 625
  source 1..76: mol_type = other RNA
  modified_base 1: mod_base = OTHER; note = 2'-Omethylguanosine
  modified_base 2: mod_base = OTHER; note = 2'-fluoroguanosine
  modified_base 3: mod_base = OTHER; note = 2'-Omethylcytosine
  modified_base 4: mod_base = OTHER; note = 2'-fluorouridine phosphorothiorate
  modified_base 6: mod_base = OTHER; note = 2'-Omethylcytosine
  modified_base 9: mod_base = OTHER; note = Guanosine phosphorothiorate
  modified_base 10: mod_base = OTHER; note = 2'-fluoroguanosine
  modified_base 13: mod_base = OTHER; note = 2'-fluorocytosine
  modified_base 16: mod_base = OTHER; note = Uridine phosphorothiorate
  modified_base 17: mod_base = OTHER; note = 2'-Omethylguanosine
  modified_base 22: mod_base = OTHER; note = 2'-Omethylguanosine phosphorothiorate
  modified_base 25: mod_base = OTHER; note = 2'-fluorocytosine phosphorothiorate
  modified_base 26: mod_base = OTHER; note = 2'-fluoroadenosine
  modified_base 29: mod_base = OTHER; note = 2'-Omethylguanosine
  modified_base 30: mod_base = OTHER; note = Guanosine phosphorothiorate
  modified_base 33: mod_base = OTHER; note = 2'-fluorouridine
  modified_base 37: mod_base = OTHER; note = Adenosine phosphorothiorate
  modified_base 38: mod_base = OTHER; note = 2'-Omethyladenosine
  modified_base 47: mod_base = OTHER; note = Uridine phosphorothiorate
  modified_base 48: mod_base = OTHER; note = 2'-fluorouridine
  modified_base 52: mod_base = OTHER; note = 2'-fluoroguanosine
  modified_base 56: mod_base = OTHER; note = 2'-Omethylcytosine
  modified_base 58: mod_base = OTHER; note = 2'-fluoroadenosine phosphorothiorate
  modified_base 59: mod_base = OTHER; note = 2'-fluoroguanosine
  modified_base 60: mod_base = OTHER; note = Uridine phosphorothiorate
  modified_base 61: mod_base = OTHER; note = 2'-Omethylcytosine
  modified_base 62: mod_base = OTHER; note = 2'-Omethylcytosine phosphorothiorate
  modified_base 63: mod_base = OTHER; note = 2'-Omethylcytosine
  modified_base 68: mod_base = OTHER; note = 2'-Omethylguanosine
  modified_base 69: mod_base = OTHER; note = Adenosine phosphorothiorate
  modified_base 70: mod_base = OTHER; note = 2'-Omethylguanosine
  modified_base 71: mod_base = OTHER; note = 2'-Omethyluridine
  modified_base 72: mod_base = OTHER; note = Cytosine phosphorothiorate
  modified_base 73: mod_base = OTHER; note = 2'-Omethylguanosine phosphorothiorate
  modified_base 76: mod_base = OTHER; note = 2'-fluoroadenosine

SEQ ID NO: 2445 - RNA, 76 nt, synthetic construct; identical to SEQ ID NO: 625
  source 1..76: mol_type = other RNA
  modified_base 1: mod_base = OTHER; note = 2'-fluoroguanosine
  modified_base 2: mod_base = OTHER; note = 2'-fluoroguanosine
  modified_base 3: mod_base = OTHER; note = 2'-Omethylcytosine
  modified_base 6: mod_base = OTHER; note = 2'-fluorocytosine
  modified_base 12: mod_base = OTHER; note = 2'-Omethylguanosine
  modified_base 15: mod_base = OTHER; note = 2'-Omethyladenosine phosphorothiorate
  modified_base 19: mod_base = OTHER; note = Adenosine phosphorothiorate
  modified_base 22: mod_base = OTHER; note = 2'-fluoroguanosine
  modified_base 23: mod_base = OTHER; note = Cytosine phosphorothiorate
  modified_base 24: mod_base = OTHER; note = 2'-fluoroguanosine
  modified_base 25: mod_base = OTHER; note = 2'-fluorocytosine phosphorothiorate
  modified_base 26: mod_base = OTHER; note = 2'-Omethyladenosine
  modified_base 33: mod_base = OTHER; note = Uridine phosphorothiorate
  modified_base 34: mod_base = OTHER; note = 2'-fluorouridine
  modified_base 41: mod_base = OTHER; note = 2'-Omethylcytosine phosphorothiorate
  modified_base 42: mod_base = OTHER; note = 2'-Omethyladenosine
  modified_base 46: mod_base = OTHER; note = Guanosine phosphorothiorate
  modified_base 47: mod_base = OTHER; note = 2'-fluorouridine
  modified_base 52: mod_base = OTHER; note = 2'-fluoroguanosine phosphorothiorate
  modified_base 53: mod_base = OTHER; note = 2'-fluoroguanosine
  modified_base 54: mod_base = OTHER; note = 2'-fluorouridine
  modified_base 57: mod_base = OTHER; note = 2'-fluoroguanosine
  modified_base 58: mod_base = OTHER; note = Adenosine phosphorothiorate
  modified_base 63: mod_base = OTHER; note = 2'-Omethylcytosine
  modified_base 65: mod_base = OTHER; note = 2'-Omethylguanosine phosphorothiorate
  modified_base 67: mod_base = OTHER; note = Guanosine phosphorothiorate
  modified_base 70: mod_base = OTHER; note = 2'-fluoroguanosine
  modified_base 71: mod_base = OTHER; note = Uridine phosphorothiorate
  modified_base 75: mod_base = OTHER; note = 2'-fluorocytosine

SEQ ID NO: 2446 - RNA, 76 nt, synthetic construct; identical to SEQ ID NO: 625
  source 1..76: mol_type = other RNA
  modified_base 3: mod_base = OTHER; note = 2'-Omethylcytosine
  modified_base 4: mod_base = OTHER; note = Uridine phosphorothiorate
  modified_base 10: mod_base = OTHER; note = Guanosine phosphorothiorate
  modified_base 11: mod_base = OTHER; note = 2'-Omethylcytosine
  modified_base 13: mod_base = OTHER; note = 2'-fluorocytosine
  modified_base 14: mod_base = OTHER; note = 2'-fluoroadenosine
  modified_base 16: mod_base = OTHER; note = 2'-Omethyluridine phosphorothiorate
  modified_base 17: mod_base = OTHER; note = 2'-Omethylguanosine
  modified_base 20: mod_base = OTHER; note = 2'-fluorouridine
  modified_base 21: mod_base = OTHER; note = Adenosine phosphorothiorate
  modified_base 22: mod_base = OTHER; note = 2'-fluoroguanosine
  modified_base 29: mod_base = OTHER; note = Guanosine phosphorothiorate
  modified_base 30: mod_base = OTHER; note = 2'-Omethylguanosine
  modified_base 31: mod_base = OTHER; note = 2'-Omethyladenosine
  modified_base 36: mod_base = OTHER; note = Adenosine phosphorothiorate
  modified_base 38: mod_base = OTHER; note = 2'-fluoroadenosine
  modified_base 39: mod_base = OTHER; note = 2'-Omethyluridine
  modified_base 40: mod_base = OTHER; note = 2'-fluorouridine
  modified_base 41: mod_base = OTHER; note = 2'-fluorocytosine
  modified_base 42: mod_base = OTHER; note = 2'-fluoroadenosine
  modified_base 46: mod_base = OTHER; note = 2'-fluoroguanosine phosphorothiorate
  modified_base 47: mod_base = OTHER; note = 2'-Omethyluridine
  modified_base 49: mod_base = OTHER; note = 2'-fluorocytosine
  modified_base 50: mod_base = OTHER; note = Cytosine phosphorothiorate
  modified_base 53: mod_base = OTHER; note = 2'-Omethylguanosine phosphorothiorate
  modified_base 54: mod_base = OTHER; note = 2'-Omethyluridine
  modified_base 56: mod_base = OTHER; note = 2'-fluorocytosine
  modified_base 57: mod_base = OTHER; note = 2'-fluoroguanosine phosphorothiorate
  modified_base 59: mod_base = OTHER; note = 2'-Omethylguanosine
  modified_base 60: mod_base = OTHER; note = 2'-Omethyluridine
  modified_base 61: mod_base = OTHER; note = 2'-Omethylcytosine
  modified_base 66: mod_base = OTHER; note = Cytosine phosphorothiorate
  modified_base 67: mod_base = OTHER; note = 2'-Omethylguanosine
  modified_base 72: mod_base = OTHER; note = Cytosine phosphorothiorate
  modified_base 75: mod_base = OTHER; note = 2'-Omethylcytosine

SEQ ID NO: 2447 - RNA, 76 nt, synthetic construct; identical to SEQ ID NO: 625
  source 1..76: mol_type = other RNA
  modified_base 1: mod_base = OTHER; note = 2'-Omethylguanosine
  modified_base 5: mod_base = OTHER; note = 2'-fluorocytosine
  modified_base 8: mod_base = OTHER; note = Uridine phosphorothiorate
  modified_base 10: mod_base = OTHER; note = Guanosine phosphorothiorate
  modified_base 11: mod_base = OTHER; note = 2'-fluorocytosine
  modified_base 12: mod_base = OTHER; note = 2'-fluoroguanosine
  modified_base 14: mod_base = OTHER; note = 2'-Omethyladenosine
  modified_base 15: mod_base = OTHER; note = 2'-Omethyladenosine
  modified_base 16: mod_base = OTHER; note = 2'-fluorouridine
  modified_base 18: mod_base = OTHER; note = Guanosine phosphorothiorate
  modified_base 21: mod_base = OTHER; note = Adenosine phosphorothiorate
  modified_base 22: mod_base = OTHER; note = Guanosine phosphorothiorate
  modified_base 23: mod_base = OTHER; note = 2'-Omethylcytosine
  modified_base 25: mod_base = OTHER; note = 2'-Omethylcytosine
  modified_base 27: mod_base = OTHER; note = 2'-Omethyluridine
  modified_base 30: mod_base = OTHER; note = 2'-fluoroguanosine phosphorothiorate
  modified_base 31: mod_base = OTHER; note = 2'-Omethyladenosine
  modified_base 38: mod_base = OTHER; note = 2'-Omethyladenosine phosphorothiorate
  modified_base 39: mod_base = OTHER; note = 2'-Omethyluridine
  modified_base 48: mod_base = OTHER; note = 2'-Omethyluridine
  modified_base 50: mod_base = OTHER; note = 2'-fluorocytosine phosphorothiorate
  modified_base 51: mod_base = OTHER; note = 2'-Omethylguanosine phosphorothiorate
  modified_base 52: mod_base = OTHER; note = 2'-fluoroguanosine
  modified_base 53: mod_base = OTHER; note = Guanosine phosphorothiorate
  modified_base 60: mod_base = OTHER; note = Uridine phosphorothiorate
  modified_base 61: mod_base = OTHER; note = 2'-fluorocytosine
  modified_base 63: mod_base = OTHER; note = 2'-fluorocytosine
  modified_base 65: mod_base = OTHER; note = 2'-Omethylguanosine
  modified_base 67: mod_base = OTHER; note = 2'-fluoroguanosine
  modified_base 71: mod_base = OTHER; note = Uridine phosphorothiorate
  modified_base 72: mod_base = OTHER; note = 2'-Omethylcytosine
  modified_base 73: mod_base = OTHER; note = 2'-Omethylguanosine
  modified_base 74: mod_base = OTHER; note = Cytosine phosphorothiorate
  modified_base 75: mod_base = OTHER; note = 2'-Omethylcytosine

SEQ ID NO: 2448 - RNA, 76 nt, synthetic construct; identical to SEQ ID NO: 625
  source 1..76: mol_type = other RNA
  modified_base 2: mod_base = OTHER; note = 2'-Omethylguanosine
  modified_base 5: mod_base = OTHER; note = 2'-Omethylcytosine
  modified_base 6: mod_base = OTHER; note = 2'-Omethylcytosine
  modified_base 11: mod_base = OTHER; note = 2'-Omethylcytosine
  modified_base 12: mod_base = OTHER; note = Guanosine phosphorothiorate
  modified_base 13: mod_base = OTHER; note = 2'-Omethylcytosine
  modified_base 14: mod_base = OTHER; note = 2'-Omethyladenosine
  modified_base 16: mod_base = OTHER; note = Uridine phosphorothiorate
  modified_base 20: mod_base = OTHER; note = 2'-fluorouridine
  modified_base 24: mod_base = OTHER; note = 2'-Omethylguanosine
  modified_base 29: mod_base = OTHER; note = 2'-fluoroguanosine
  modified_base 33: mod_base = OTHER; note = Uridine phosphorothiorate
  modified_base 38: mod_base = OTHER; note = Adenosine phosphorothiorate
  modified_base 39: mod_base = OTHER; note = 2'-fluorouridine
  modified_base 40: mod_base = OTHER; note = 2'-fluorouridine phosphorothiorate
  modified_base 41: mod_base = OTHER; note = 2'-fluorocytosine phosphorothiorate
  modified_base 42: mod_base = OTHER; note = 2'-fluoroadenosine
  modified_base 43: mod_base = OTHER; note = Adenosine phosphorothiorate
  modified_base 44: mod_base = OTHER; note = 2'-Omethyladenosine
  modified_base 47: mod_base = OTHER; note = Uridine phosphorothiorate
  modified_base 48: mod_base = OTHER; note = 2'-fluorouridine
  modified_base 49: mod_base = OTHER; note = 2'-fluorocytosine
  modified_base 51: mod_base = OTHER; note = 2'-Omethylguanosine
  modified_base 53: mod_base = OTHER; note = Guanosine phosphorothiorate
  modified_base 54: mod_base = OTHER; note = 2'-fluorouridine
  modified_base 56: mod_base = OTHER; note = 2'-Omethylcytosine
  modified_base 59: mod_base = OTHER; note = 2'-Omethylguanosine phosphorothiorate
  modified_base 60: mod_base = OTHER; note = 2'-fluorouridine
  modified_base 61: mod_base = OTHER; note = 2'-fluorocytosine
  modified_base 63: mod_base = OTHER; note = Cytosine phosphorothiorate
  modified_base 64: mod_base = OTHER; note = 2'-fluoroguanosine
  modified_base 65: mod_base = OTHER; note = 2'-fluoroguanosine phosphorothiorate
  modified_base 66: mod_base = OTHER; note = 2'-Omethylcytosine
  modified_base 67: mod_base = OTHER; note = 2'-Omethylguanosine
  modified_base 68: mod_base = OTHER; note = 2'-fluoroguanosine
  modified_base 70: mod_base = OTHER; note = 2'-fluoroguanosine phosphorothiorate
  modified_base 73: mod_base = OTHER; note = 2'-Omethylguanosine

SEQ ID NO: 2449 - RNA, 76 nt, synthetic construct; identical to SEQ ID NO: 625
  source 1..76: mol_type = other RNA
  modified_base 1: mod_base = OTHER; note = 2'-Omethylguanosine
  modified_base 4: mod_base = OTHER; note = 2'-Omethyluridine
  modified_base 5: mod_base = OTHER; note = 2'-Omethylcytosine
  modified_base 8: mod_base = OTHER; note = Uridine phosphorothiorate
  modified_base 10: mod_base = OTHER; note = 2'-fluoroguanosine
  modified_base 14: mod_base = OTHER; note = 2'-fluoroadenosine phosphorothiorate
  modified_base 16: mod_base = OTHER; note = 2'-Omethyluridine
  modified_base 17: mod_base = OTHER; note = Guanosine phosphorothiorate
  modified_base 22: mod_base = OTHER; note = 2'-fluoroguanosine
  modified_base 23: mod_base = OTHER; note = Cytosine phosphorothiorate
  modified_base 24: mod_base = OTHER; note = 2'-fluoroguanosine
  modified_base 25: mod_base = OTHER; note = 2'-fluorocytosine
  modified_base 26: mod_base = OTHER; note = Adenosine phosphorothiorate
  modified_base 27: mod_base = OTHER; note = 2'-Omethyluridine
  modified_base 28: mod_base = OTHER; note = 2'-fluorouridine
  modified_base 30: mod_base = OTHER; note = 2'-Omethylguanosine
  modified_base 33: mod_base = OTHER; note = 2'-fluorouridine
  modified_base 40: mod_base = OTHER; note = 2'-fluorouridine
  modified_base 46: mod_base = OTHER; note = 2'-Omethylguanosine
  modified_base 48: mod_base = OTHER; note = 2'-fluorouridine
  modified_base 53: mod_base = OTHER; note = 2'-Omethylguanosine
  modified_base 54: mod_base = OTHER; note = 2'-Omethyluridine
  modified_base 57: mod_base = OTHER; note = 2'-fluoroguanosine
  modified_base 61: mod_base = OTHER; note = Cytosine phosphorothiorate
  modified_base 62: mod_base = OTHER; note = 2'-fluorocytosine phosphorothiorate
  modified_base 63: mod_base = OTHER; note = 2'-fluorocytosine
  modified_base 64: mod_base = OTHER; note = 2'-Omethylguanosine
  modified_base 68: mod_base = OTHER; note = Guanosine phosphorothiorate
  modified_base 69: mod_base = OTHER; note = 2'-fluoroadenosine
  modified_base 71: mod_base = OTHER; note = 2'-fluorouridine
  modified_base 74: mod_base = OTHER; note = 2'-Omethylcytosine
  modified_base 75: mod_base = OTHER; note = 2'-Omethylcytosine phosphorothiorate
  modified_base 76: mod_base = OTHER; note = 2'-fluoroadenosine

SEQ ID NO: 2450 - RNA, 76 nt, synthetic construct; identical to SEQ ID NO: 625
  source 1..76: mol_type = other RNA
  modified_base 1: mod_base = OTHER; note = 2'-fluoroguanosine phosphorothiorate
  modified_base 2: mod_base = OTHER; note = 2'-Omethylguanosine phosphorothiorate
  modified_base 3: mod_base = OTHER; note = 2'-Omethylcytosine
  modified_base 5: mod_base = OTHER; note = 2'-fluorocytosine
  modified_base 9: mod_base = OTHER; note = Guanosine phosphorothiorate
  modified_base 10: mod_base = OTHER; note = 2'-Omethylguanosine
  modified_base 11: mod_base = OTHER; note = 2'-Omethylcytosine
  modified_base 13: mod_base = OTHER; note = 2'-Omethylcytosine phosphorothiorate
  modified_base 14: mod_base = OTHER; note = 2'-Omethyladenosine phosphorothiorate
  modified_base 18: mod_base = OTHER; note = 2'-Omethylguanosine
  modified_base 20: mod_base = OTHER; note = 2'-fluorouridine
  modified_base 25: mod_base = OTHER; note = 2'-Omethylcytosine
  modified_base 26: mod_base = OTHER; note = 2'-fluoroadenosine
  modified_base 28: mod_base = OTHER; note = 2'-Omethyluridine phosphorothiorate
  modified_base 29: mod_base = OTHER; note = 2'-Omethylguanosine
  modified_base 31: mod_base = OTHER; note = 2'-Omethyladenosine
  modified_base 48: mod_base = OTHER; note = Uridine phosphorothiorate
  modified_base 49: mod_base = OTHER; note = 2'-fluorocytosine phosphorothiorate
  modified_base 50: mod_base = OTHER; note = Cytosine phosphorothiorate
  modified_base 54: mod_base = OTHER; note = Uridine phosphorothiorate
  modified_base 59: mod_base = OTHER; note = Guanosine phosphorothiorate
  modified_base 60: mod_base = OTHER; note = 2'-Omethyluridine
  modified_base 64: mod_base = OTHER; note = 2'-fluoroguanosine phosphorothiorate
  modified_base 65: mod_base = OTHER; note = 2'-fluoroguanosine
  modified_base 67: mod_base = OTHER; note = 2'-Omethylguanosine
  modified_base 69: mod_base = OTHER; note = Adenosine phosphorothiorate
  modified_base 71: mod_base = OTHER; note = 2'-fluorouridine
  modified_base 73: mod_base = OTHER; note = 2'-Omethylguanosine
  modified_base 74: mod_base = OTHER; note = 2'-Omethylcytosine
  modified_base 76: mod_base = OTHER; note = 2'-fluoroadenosine

SEQ ID NO: 2451 - RNA, 76 nt, synthetic construct; identical to SEQ ID NO: 625
  source 1..76: mol_type = other RNA
  modified_base 1: mod_base = OTHER; note = 2'-Omethylguanosine
  modified_base 2: mod_base = OTHER; note = Guanosine phosphorothiorate
  modified_base 3: mod_base = OTHER; note = 2'-Omethylcytosine
  modified_base 4: mod_base = OTHER; note = 2'-Omethyluridine
  modified_base 5: mod_base = OTHER; note = Cytosine phosphorothiorate
  modified_base 6: mod_base = OTHER; note = 2'-Omethylcytosine
  modified_base 7: mod_base = OTHER; note = Guanosine phosphorothiorate
  modified_base 8: mod_base = OTHER; note = Uridine phosphorothiorate
  modified_base 11: mod_base = OTHER; note = 2'-Omethylcytosine
  modified_base 13: mod_base = OTHER; note = 2'-fluorocytosine
  modified_base 20: mod_base = OTHER; note = 2'-Omethyluridine
  modified_base 24: mod_base = OTHER; note = 2'-fluoroguanosine
  modified_base 25: mod_base = OTHER; note = 2'-fluorocytosine phosphorothiorate
  modified_base 27: mod_base = OTHER; note = Uridine phosphorothiorate
  modified_base 28: mod_base = OTHER; note = 2'-Omethyluridine
  modified_base 30: mod_base = OTHER; note = 2'-Omethylguanosine
  modified_base 33: mod_base = OTHER; note = 2'-fluorouridine
  modified_base 38: mod_base = OTHER; note = 2'-fluoroadenosine phosphorothiorate
  modified_base 41: mod_base = OTHER; note = 2'-Omethylcytosine
  modified_base 43: mod_base = OTHER; note = 2'-fluoroadenosine
  modified_base 46: mod_base = OTHER; note = Guanosine phosphorothiorate
  modified_base 48: mod_base = OTHER; note = 2'-Omethyluridine phosphorothiorate
  modified_base 49: mod_base = OTHER; note = 2'-fluorocytosine
  modified_base 50: mod_base = OTHER; note = Cytosine phosphorothiorate
  modified_base 52: mod_base = OTHER; note = 2'-fluoroguanosine
  modified_base 54: mod_base = OTHER; note = Uridine phosphorothiorate
  modified_base 61: mod_base = OTHER; note = 2'-Omethylcytosine
  modified_base 62: mod_base = OTHER; note = 2'-Omethylcytosine
  modified_base 65: mod_base = OTHER; note = 2'-fluoroguanosine
  modified_base 66: mod_base = OTHER; note = 2'-Omethylcytosine
  modified_base 67: mod_base = OTHER; note = 2'-fluoroguanosine
  modified_base 68: mod_base = OTHER; note = 2'-fluoroguanosine
  modified_base 70: mod_base = OTHER; note = 2'-fluoroguanosine
  modified_base 71: mod_base = OTHER; note = 2'-fluorouridine

SEQ ID NO: 2452 - RNA, 76 nt, synthetic construct; identical to SEQ ID NO: 625
  source 1..76: mol_type = other RNA
  modified_base 2: mod_base = OTHER; note = 2'-fluoroguanosine
  modified_base 3: mod_base = OTHER; note = 2'-fluorocytosine phosphorothiorate
  modified_base 4: mod_base = OTHER; note = 2'-Omethyluridine
  modified_base 5: mod_base = OTHER; note = 2'-fluorocytosine
  modified_base 9: mod_base = OTHER; note = Guanosine phosphorothiorate
  modified_base 11: mod_base = OTHER; note = 2'-fluorocytosine
  modified_base 12: mod_base = OTHER; note = 2'-fluoroguanosine
  modified_base 15: mod_base = OTHER; note = Adenosine phosphorothiorate
  modified_base 16: mod_base = OTHER; note = 2'-Omethyluridine phosphorothiorate
  modified_base 17: mod_base = OTHER; note = 2'-Omethylguanosine
  modified_base 20: mod_base = OTHER; note = 2'-Omethyluridine
  modified_base 21: mod_base = OTHER; note = Adenosine phosphorothiorate
  modified_base 22: mod_base = OTHER; note = Guanosine phosphorothiorate
  modified_base 26: mod_base = OTHER; note = 2'-Omethyladenosine
  modified_base 27: mod_base = OTHER; note = 2'-fluorouridine
  modified_base 29: mod_base = OTHER; note = 2'-Omethylguanosine
  modified_base 31: mod_base = OTHER; note = 2'-fluoroadenosine
  modified_base 37: mod_base = OTHER; note = Adenosine phosphorothiorate
  modified_base 38: mod_base = OTHER; note = 2'-Omethyladenosine
  modified_base 40: mod_base = OTHER; note = 2'-fluorouridine phosphorothiorate
  modified_base 41: mod_base = OTHER; note = 2'-Omethylcytosine
  modified_base 45: mod_base = OTHER; note = 2'-fluoroguanosine
  modified_base 46: mod_base = OTHER; note = 2'-Omethylguanosine
  modified_base 47: mod_base = OTHER; note = 2'-Omethyluridine
  modified_base 53: mod_base = OTHER; note = 2'-Omethylguanosine
  modified_base 54: mod_base = OTHER; note = 2'-Omethyluridine
  modified_base 62: mod_base = OTHER; note = Cytosine phosphorothiorate
  modified_base 63: mod_base = OTHER; note = 2'-fluorocytosine
  modified_base 65: mod_base = OTHER; note = 2'-Omethylguanosine
  modified_base 68: mod_base = OTHER; note = 2'-fluoroguanosine
  modified_base 72: mod_base = OTHER; note = 2'-fluorocytosine
  modified_base 73: mod_base = OTHER; note = 2'-Omethylguanosine
  modified_base 75: mod_base = OTHER; note = 2'-fluorocytosine
  modified_base 76: mod_base = OTHER; note = 2'-Omethyladenosine

SEQ ID NO: 2453 - RNA, 76 nt, synthetic construct; identical to SEQ ID NO: 625
  source 1..76: mol_type = other RNA
  modified_base 1: mod_base = OTHER; note = 2'-Omethylguanosine
  modified_base 3: mod_base = OTHER; note = 2'-Omethylcytosine phosphorothiorate
  modified_base 4: mod_base = OTHER; note = 2'-fluorouridine
  modified_base 10: mod_base = OTHER; note = 2'-Omethylguanosine phosphorothiorate
  modified_base 11: mod_base = OTHER; note = 2'-Omethylcytosine
  modified_base 12: mod_base = OTHER; note = 2'-fluoroguanosine
  modified_base 15: mod_base = OTHER; note = Adenosine phosphorothiorate
  modified_base 17: mod_base = OTHER; note = Guanosine phosphorothiorate
  modified_base 18: mod_base = OTHER; note = 2'-fluoroguanosine
  modified_base 22: mod_base = OTHER; note = 2'-Omethylguanosine
  modified_base 23: mod_base = OTHER; note = Cytosine phosphorothiorate
  modified_base 24: mod_base = OTHER; note = 2'-fluoroguanosine
  modified_base 25: mod_base = OTHER; note = Cytosine phosphorothiorate
  modified_base 26: mod_base = OTHER; note = 2'-Omethyladenosine
  modified_base 29: mod_base = OTHER; note = 2'-Omethylguanosine
  modified_base 30: mod_base = OTHER; note = 2'-fluoroguanosine
  modified_base 34: mod_base = OTHER; note = 2'-fluorouridine
  modified_base 36: mod_base = OTHER; note = Adenosine phosphorothiorate
  modified_base 39: mod_base = OTHER; note = Uridine phosphorothiorate
  modified_base 41: mod_base = OTHER; note = 2'-fluorocytosine
  modified_base 43: mod_base = OTHER; note = 2'-Omethyladenosine
  modified_base 44: mod_base = OTHER; note = 2'-fluoroadenosine
  modified_base 45: mod_base = OTHER; note = Guanosine phosphorothiorate
  modified_base 47: mod_base = OTHER; note = Uridine phosphorothiorate
  modified_base 48: mod_base = OTHER; note = 2'-Omethyluridine
  modified_base 51: mod_base = OTHER; note = 2'-Omethylguanosine phosphorothiorate
  modified_base 52: mod_base = OTHER; note = 2'-fluoroguanosine
  modified_base 53: mod_base = OTHER; note = 2'-fluoroguanosine
  modified_base 62: mod_base = OTHER; note = Cytosine phosphorothiorate
  modified_base 63: mod_base = OTHER; note = 2'-Omethylcytosine
  modified_base 64: mod_base = OTHER; note = Guanosine phosphorothiorate
  modified_base 66: mod_base = OTHER; note = 2'-Omethylcytosine
  modified_base 68: mod_base = OTHER; note = 2'-Omethylguanosine
  modified_base 70: mod_base = OTHER; note = 2'-fluoroguanosine
  modified_base 71: mod_base = OTHER; note = 2'-Omethyluridine
  modified_base 72: mod_base = OTHER; note = 2'-fluorocytosine phosphorothiorate
  modified_base 73: mod_base = OTHER; note = 2'-Omethylguanosine
  modified_base 74: mod_base = OTHER; note = 2'-fluorocytosine
  modified_base 75: mod_base = OTHER; note = 2'-Omethylcytosine
  modified_base 76: mod_base = OTHER; note = 2'-fluoroadenosine

SEQ ID NO: 2454 - RNA, 76 nt, synthetic construct; identical to SEQ ID NO: 625
  source 1..76: mol_type = other RNA
  modified_base 1: mod_base = OTHER; note = 2'-fluoroguanosine
  modified_base 5: mod_base = OTHER; note = 2'-Omethylcytosine phosphorothiorate
  modified_base 12: mod_base = OTHER; note = 2'-Omethylguanosine
  modified_base 13: mod_base = OTHER; note = 2'-fluorocytosine
  modified_base 14: mod_base = OTHER; note = 2'-fluoroadenosine phosphorothiorate
  modified_base 15: mod_base = OTHER; note = 2'-Omethyladenosine
  modified_base 17: mod_base = OTHER; note = 2'-Omethylguanosine
  modified_base 23: mod_base = OTHER; note = Cytosine phosphorothiorate
  modified_base 26: mod_base = OTHER; note = Adenosine phosphorothiorate
  modified_base 27: mod_base = OTHER; note = 2'-fluorouridine phosphorothiorate
  modified_base 28: mod_base = OTHER; note = 2'-fluorouridine
  modified_base 29: mod_base = OTHER; note = 2'-Omethylguanosine
  modified_base 30: mod_base = OTHER; note = 2'-Omethylguanosine
  modified_base 32: mod_base = OTHER; note = 2'-fluorocytosine
  modified_base 34: mod_base = OTHER; note = 2'-Omethyluridine
  modified_base 36: mod_base = OTHER; note = Adenosine phosphorothiorate
  modified_base 40: mod_base = OTHER; note = 2'-fluorouridine
  modified_base 41: mod_base = OTHER; note = 2'-fluorocytosine
  modified_base 44: mod_base = OTHER; note = Adenosine phosphorothiorate
  modified_base 45: mod_base = OTHER; note = 2'-fluoroguanosine phosphorothiorate
  modified_base 46: mod_base = OTHER; note = 2'-Omethylguanosine
  modified_base 48: mod_base = OTHER; note = 2'-Omethyluridine
  modified_base 55: mod_base = OTHER; note = Uridine phosphorothiorate
  modified_base 56: mod_base = OTHER; note = Cytosine phosphorothiorate
  modified_base 57: mod_base = OTHER; note = 2'-Omethylguanosine
  modified_base 59: mod_base = OTHER; note = Guanosine phosphorothiorate
  modified_base 60: mod_base = OTHER; note = 2'-Omethyluridine
  modified_base 61: mod_base = OTHER; note = 2'-fluorocytosine
  modified_base 64: mod_base = OTHER; note = 2'-fluoroguanosine phosphorothiorate
  modified_base 66: mod_base = OTHER; note = 2'-fluorocytosine
  modified_base 68: mod_base = OTHER; note = 2'-Omethylguanosine phosphorothiorate
  modified_base 69: mod_base = OTHER; note = 2'-fluoroadenosine
  modified_base 70: mod_base = OTHER; note = 2'-fluoroguanosine
  modified_base 72: mod_base = OTHER; note = 2'-Omethylcytosine
  modified_base 74: mod_base = OTHER; note = 2'-Omethylcytosine

SEQ ID NO: 2455 - RNA, 76 nt, synthetic construct; identical to SEQ ID NO: 625
  source 1..76: mol_type = other RNA
  modified_base 1: mod_base = OTHER; note = 2'-fluoroguanosine
  modified_base 2: mod_base = OTHER; note = 2'-fluoroguanosine
  modified_base 4: mod_base = OTHER; note = 2'-Omethyluridine
  modified_base 6: mod_base = OTHER; note = 2'-Omethylcytosine
  modified_base 7: mod_base = OTHER; note = Guanosine phosphorothiorate
  modified_base 14: mod_base = OTHER; note = 2'-fluoroadenosine
  modified_base 15: mod_base = OTHER; note = 2'-fluoroadenosine
  modified_base 17: mod_base = OTHER; note = 2'-Omethylguanosine
  modified_base 18: mod_base = OTHER; note = Guanosine phosphorothiorate
  modified_base 20: mod_base = OTHER; note = 2'-Omethyluridine
  modified_base 24: mod_base = OTHER; note = 2'-fluoroguanosine
  modified_base 25: mod_base = OTHER; note = Cytosine phosphorothiorate
  modified_base 27: mod_base = OTHER; note = 2'-Omethyluridine
  modified_base 31: mod_base = OTHER; note = 2'-Omethyladenosine
  modified_base 32: mod_base = OTHER; note = 2'-fluorocytosine
  modified_base 33: mod_base = OTHER; note = 2'-fluorouridine
  modified_base 37: mod_base = OTHER; note = Adenosine phosphorothiorate
  modified_base 38: mod_base = OTHER; note = 2'-Omethyladenosine
  modified_base 42: mod_base = OTHER; note = 2'-Omethyladenosine
  modified_base 44: mod_base = OTHER; note = 2'-fluoroadenosine
  modified_base 46: mod_base = OTHER; note = 2'-fluoroguanosine
  modified_base 48: mod_base = OTHER; note = 2'-Omethyluridine
  modified_base 49: mod_base = OTHER; note = Cytosine phosphorothiorate
  modified_base 50: mod_base = OTHER; note = 2'-fluorocytosine
  modified_base 56: mod_base = OTHER; note = 2'-Omethylcytosine phosphorothiorate
  modified_base 57: mod_base = OTHER; note = 2'-Omethylguanosine
  modified_base 60: mod_base = OTHER; note = 2'-fluorouridine
  modified_base 62: mod_base = OTHER; note = 2'-fluorocytosine phosphorothiorate
  modified_base 65: mod_base = OTHER; note = 2'-fluoroguanosine
  modified_base 67: mod_base = OTHER; note = 2'-fluoroguanosine
  modified_base 68: mod_base = OTHER; note = 2'-fluoroguanosine
  modified_base 69: mod_base = OTHER; note = 2'-Omethyladenosine
  modified_base 70: mod_base = OTHER; note = Guanosine phosphorothiorate
  modified_base 71: mod_base = OTHER; note = 2'-fluorouridine
  modified_base 72: mod_base = OTHER; note = 2'-Omethylcytosine phosphorothiorate
  modified_base 73: mod_base = OTHER; note = 2'-Omethylguanosine
  modified_base 75: mod_base = OTHER; note = 2'-fluorocytosine

SEQ ID NO: 2456 - RNA, 76 nt, synthetic construct; identical to SEQ ID NO: 625
  source 1..76: mol_type = other RNA
  modified_base 2: mod_base = OTHER; note = 2'-Omethylguanosine
  modified_base 4: mod_base = OTHER; note = 2'-fluorouridine
  modified_base 6: mod_base = OTHER; note = Cytosine phosphorothiorate
  modified_base 7: mod_base = OTHER; note = Guanosine phosphorothiorate
  modified_base 10: mod_base = OTHER; note = 2'-fluoroguanosine phosphorothiorate
  modified_base 14: mod_base = OTHER; note = 2'-fluoroadenosine
  modified_base 15: mod_base = OTHER; note = Adenosine phosphorothiorate
  modified_base 16: mod_base = OTHER; note = 2'-fluorouridine
  modified_base 18: mod_base = OTHER; note = 2'-fluoroguanosine phosphorothiorate
  modified_base 20: mod_base = OTHER; note = Uridine phosphorothiorate
  modified_base 24: mod_base = OTHER; note = Guanosine phosphorothiorate
  modified_base 25: mod_base = OTHER; note = 2'-fluorocytosine
  modified_base 27: mod_base = OTHER; note = 2'-Omethyluridine
  modified_base 28: mod_base = OTHER; note = Uridine phosphorothiorate
  modified_base 31: mod_base = OTHER; note = 2'-Omethyladenosine
  modified_base 33: mod_base = OTHER; note = Uridine phosphorothiorate
  modified_base 39: mod_base = OTHER; note = 2'-fluorouridine
  modified_base 40: mod_base = OTHER; note = Uridine phosphorothiorate
  modified_base 41: mod_base = OTHER; note = 2'-Omethylcytosine phosphorothiorate
  modified_base 42: mod_base = OTHER; note = 2'-Omethyladenosine
  modified_base 43: mod_base = OTHER; note = 2'-fluoroadenosine
  modified_base 45: mod_base = OTHER; note = 2'-Omethylguanosine
  modified_base 48: mod_base = OTHER; note = Uridine phosphorothiorate
  modified_base 49: mod_base = OTHER; note = 2'-Omethylcytosine
  modified_base 51: mod_base = OTHER; note = 2'-Omethylguanosine
  modified_base 56: mod_base = OTHER; note = 2'-Omethylcytosine
  modified_base 57: mod_base = OTHER; note = Guanosine phosphorothiorate
  modified_base 58: mod_base = OTHER; note = 2'-fluoroadenosine
  modified_base 60: mod_base = OTHER; note = 2'-Omethyluridine
  modified_base 61: mod_base = OTHER; note = 2'-fluorocytosine phosphorothiorate
  modified_base 62: mod_base = OTHER; note = 2'-fluorocytosine
  modified_base 63: mod_base = OTHER; note = 2'-Omethylcytosine
  modified_base 64: mod_base = OTHER; note = Guanosine phosphorothiorate
  modified_base 66: mod_base = OTHER; note = 2'-fluorocytosine
  modified_base 67: mod_base = OTHER; note = 2'-fluoroguanosine
  modified_base 72: mod_base = OTHER; note = 2'-Omethylcytosine
  modified_base 73: mod_base = OTHER; note = Guanosine phosphorothiorate

SEQ ID NO: 2457 - RNA, 76 nt, synthetic construct; identical to SEQ ID NO: 625
  source 1..76: mol_type = other RNA
  modified_base 3: mod_base = OTHER; note = 2'-fluorocytosine
  modified_base 11: mod_base = OTHER; note = 2'-fluorocytosine
  modified_base 13: mod_base = OTHER; note = 2'-Omethylcytosine
  modified_base 14: mod_base = OTHER; note = 2'-fluoroadenosine
  modified_base 16: mod_base = OTHER; note = Uridine phosphorothiorate
  modified_base 17: mod_base = OTHER; note = 2'-Omethylguanosine
  modified_base 20: mod_base = OTHER; note = 2'-Omethyluridine
  modified_base 24: mod_base = OTHER; note = 2'-fluoroguanosine
  modified_base 26: mod_base = OTHER; note = 2'-fluoroadenosine
  modified_base 27: mod_base = OTHER; note = 2'-Omethyluridine
  modified_base 29: mod_base = OTHER; note = 2'-fluoroguanosine
  modified_base 37: mod_base = OTHER; note = Adenosine phosphorothiorate
  modified_base 38: mod_base = OTHER; note = 2'-Omethyladenosine
  modified_base 41: mod_base = OTHER; note = Cytosine phosphorothiorate
  modified_base 42: mod_base = OTHER; note = 2'-Omethyladenosine
  modified_base 45: mod_base = OTHER; note = 2'-Omethylguanosine
  modified_base 46: mod_base = OTHER; note = 2'-Omethylguanosine
  modified_base 47: mod_base = OTHER; note = 2'-Omethyluridine phosphorothiorate
  modified_base 49: mod_base = OTHER; note = 2'-Omethylcytosine
  modified_base 51: mod_base = OTHER; note = Guanosine phosphorothiorate
  modified_base 52: mod_base = OTHER; note = 2'-Omethylguanosine
  modified_base 54: mod_base = OTHER; note = 2'-fluorouridine
  modified_base 56: mod_base = OTHER; note = 2'-Omethylcytosine
  modified_base 57: mod_base = OTHER; note = 2'-fluoroguanosine
  modified_base 58: mod_base = OTHER; note = 2'-fluoroadenosine
  modified_base 61: mod_base = OTHER; note = 2'-fluorocytosine
  modified_base 62: mod_base = OTHER; note = 2'-Omethylcytosine phosphorothiorate
  modified_base 63: mod_base = OTHER; note = 2'-Omethylcytosine
  modified_base 64: mod_base = OTHER; note = 2'-Omethylguanosine
  modified_base 67: mod_base = OTHER; note = 2'-Omethylguanosine
  modified_base 68: mod_base = OTHER; note = 2'-Omethylguanosine phosphorothiorate
  modified_base 70: mod_base = OTHER; note = 2'-fluoroguanosine
  modified_base 71: mod_base = OTHER; note = 2'-fluorouridine phosphorothiorate
  modified_base 72: mod_base = OTHER; note = 2'-fluorocytosine
  modified_base 74: mod_base = OTHER; note = 2'-fluorocytosine
  modified_base 75: mod_base = OTHER; note = Cytosine phosphorothiorate
  modified_base 76: mod_base = OTHER; note = 2'-fluoroadenosine

SEQ ID NO: 2458 - RNA, 76 nt, synthetic construct; identical to SEQ ID NO: 625
  source 1..76: mol_type = other RNA
  modified_base 5: mod_base = OTHER; note = Cytosine phosphorothiorate
  modified_base 6: mod_base = OTHER; note = 2'-fluorocytosine
  modified_base 11: mod_base = OTHER; note = 2'-Omethylcytosine
  modified_base 12: mod_base = OTHER; note = 2'-Omethylguanosine
  modified_base 13: mod_base = OTHER; note = 2'-Omethylcytosine
  modified_base 16: mod_base = OTHER; note = 2'-Omethyluridine
  modified_base 18: mod_base = OTHER; note = 2'-fluoroguanosine phosphorothiorate
  modified_base 21: mod_base = OTHER; note = Adenosine phosphorothiorate
  modified_base 22: mod_base = OTHER; note = 2'-Omethylguanosine
  modified_base 24: mod_base = OTHER; note = Guanosine phosphorothiorate
  modified_base 26: mod_base = OTHER; note = 2'-Omethyladenosine
  modified_base 27: mod_base = OTHER; note = 2'-Omethyluridine
  modified_base 28: mod_base = OTHER; note = 2'-fluorouridine
  modified_base 30: mod_base = OTHER; note = 2'-fluoroguanosine
  modified_base 34: mod_base = OTHER; note = 2'-Omethyluridine phosphorothiorate
  modified_base 39: mod_base = OTHER; note = 2'-fluorouridine
  modified_base 40: mod_base = OTHER; note = 2'-Omethyluridine
  modified_base 41: mod_base = OTHER; note = 2'-Omethylcytosine
  modified_base 42: mod_base = OTHER; note = 2'-Omethyladenosine
  modified_base 45: mod_base = OTHER; note = 2'-Omethylguanosine
  modified_base 46: mod_base = OTHER; note = 2'-fluoroguanosine phosphorothiorate
  modified_base 47: mod_base = OTHER; note = 2'-Omethyluridine
  modified_base 48: mod_base = OTHER; note = Uridine phosphorothiorate
  modified_base 50: mod_base = OTHER; note = 2'-Omethylcytosine
  modified_base 51: mod_base = OTHER; note = Guanosine phosphorothiorate
  modified_base 52: mod_base = OTHER; note = 2'-fluoroguanosine
  modified_base 54: mod_base = OTHER; note = Uridine phosphorothiorate
  modified_base 62: mod_base = OTHER; note = 2'-Omethylcytosine
  modified_base 63: mod_base = OTHER; note = 2'-Omethylcytosine
  modified_base 64: mod_base = OTHER; note = 2'-Omethylguanosine
  modified_base 66: mod_base = OTHER; note = 2'-Omethylcytosine
  modified_base 70: mod_base = OTHER; note = 2'-Omethylguanosine
  modified_base 74: mod_base = OTHER; note = Cytosine phosphorothiorate
  modified_base 75: mod_base = OTHER; note = 2'-Omethylcytosine

SEQ ID NO: 2459 - RNA, 76 nt, synthetic construct; identical to SEQ ID NO: 625
  source 1..76: mol_type = other RNA
  modified_base 1: mod_base = OTHER; note = 2'-fluoroguanosine
  modified_base 2: mod_base = OTHER; note = 2'-Omethylguanosine
  modified_base 3: mod_base = OTHER; note = 2'-fluorocytosine
  modified_base 13: mod_base = OTHER; note = 2'-fluorocytosine
  modified_base 14: mod_base = OTHER; note = 2'-Omethyladenosine
  modified_base 18: mod_base = OTHER; note = Guanosine phosphorothiorate
  modified_base 20: mod_base = OTHER; note = 2'-Omethyluridine
  modified_base 22: mod_base = OTHER; note = 2'-fluoroguanosine
  modified_base 24: mod_base = OTHER; note = Guanosine phosphorothiorate
  modified_base 25: mod_base = OTHER; note = 2'-Omethylcytosine
  modified_base 28: mod_base = OTHER; note = 2'-fluorouridine
  modified_base 29: mod_base = OTHER; note = 2'-fluoroguanosine
  modified_base 31: mod_base = OTHER; note = 2'-fluoroadenosine
  modified_base 39: mod_base = OTHER; note = 2'-fluorouridine phosphorothiorate
  modified_base 41: mod_base = OTHER; note = 2'-Omethylcytosine
  modified_base 44: mod_base = OTHER; note = 2'-Omethyladenosine
  modified_base 47: mod_base = OTHER; note = Uridine phosphorothiorate
  modified_base 48: mod_base = OTHER; note = 2'-Omethyluridine
  modified_base 51: mod_base = OTHER; note = Guanosine phosphorothiorate
  modified_base 52: mod_base = OTHER; note = 2'-fluoroguanosine
  modified_base 54: mod_base = OTHER; note = 2'-Omethyluridine
  modified_base 56: mod_base = OTHER; note = 2'-Omethylcytosine phosphorothiorate
  modified_base 57: mod_base = OTHER; note = 2'-Omethylguanosine
  modified_base 59: mod_base = OTHER; note = 2'-fluoroguanosine
  modified_base 60: mod_base = OTHER; note = 2'-Omethyluridine phosphorothiorate
  modified_base 61: mod_base = OTHER; note = 2'-fluorocytosine
  modified_base 63: mod_base = OTHER; note = 2'-fluorocytosine
  modified_base 65: mod_base = OTHER; note = 2'-Omethylguanosine
  modified_base 67: mod_base = OTHER; note = 2'-fluoroguanosine
  modified_base 68: mod_base = OTHER; note = 2'-Omethylguanosine
  modified_base 69: mod_base = OTHER; note = 2'-fluoroadenosine
  modified_base 71: mod_base = OTHER; note = 2'-Omethyluridine
  modified_base 72: mod_base = OTHER; note = 2'-Omethylcytosine
  modified_base 73: mod_base = OTHER; note = Guanosine phosphorothiorate
  modified_base 74: mod_base = OTHER; note = 2'-Omethylcytosine
  modified_base 76: mod_base = OTHER; note = 2'-Omethyladenosine

SEQ ID NO: 2460 - RNA, 76 nt, synthetic construct; identical to SEQ ID NO: 625
  source 1..76: mol_type = other RNA
  modified_base 1: mod_base = OTHER; note = Guanosine phosphorothiorate
  modified_base 2: mod_base = OTHER; note = 2'-Omethylguanosine
  modified_base 3: mod_base = OTHER; note = Cytosine phosphorothiorate
  modified_base 6: mod_base = OTHER; note = Cytosine phosphorothiorate
  modified_base 13: mod_base = OTHER; note = 2'-Omethylcytosine phosphorothiorate
  modified_base 16: mod_base = OTHER; note = 2'-Omethyluridine
  modified_base 17: mod_base = OTHER; note = 2'-Omethylguanosine
  modified_base 21: mod_base = OTHER; note = Adenosine phosphorothiorate
  modified_base 22: mod_base = OTHER; note = 2'-fluoroguanosine
  modified_base 23: mod_base = OTHER; note = 2'-Omethylcytosine
  modified_base 25: mod_base = OTHER; note = 2'-Omethylcytosine
  modified_base 26: mod_base = OTHER; note = 2'-fluoroadenosine
  modified_base 32: mod_base = OTHER; note = 2'-fluorocytosine
  modified_base 33: mod_base = OTHER; note = Uridine phosphorothiorate
  modified_base 38: mod_base = OTHER; note = 2'-Omethyladenosine
  modified_base 40: mod_base = OTHER; note = 2'-fluorouridine
  modified_base 42: mod_base = OTHER; note = 2'-fluoroadenosine
  modified_base 45: mod_base = OTHER; note = Guanosine phosphorothiorate
  modified_base 46: mod_base = OTHER; note = 2'-fluoroguanosine
  modified_base 47: mod_base = OTHER; note = 2'-Omethyluridine
  modified_base 48: mod_base = OTHER; note = 2'-Omethyluridine
  modified_base 50: mod_base = OTHER; note = 2'-fluorocytosine
  modified_base 53: mod_base = OTHER; note = 2'-Omethylguanosine
  modified_base 56: mod_base = OTHER; note = 2'-fluorocytosine
  modified_base 59: mod_base = OTHER; note = Guanosine phosphorothiorate
  modified_base 63: mod_base = OTHER; note = Cytosine phosphorothiorate
  modified_base 64: mod_base = OTHER; note = Guanosine phosphorothiorate
  modified_base 65: mod_base = OTHER; note = 2'-fluoroguanosine
  modified_base 66: mod_base = OTHER; note = 2'-fluorocytosine
  modified_base 68: mod_base = OTHER; note = Guanosine phosphorothiorate
  modified_base 71: mod_base = OTHER; note = 2'-Omethyluridine

SEQ ID NO: 2461 - RNA, 76 nt, synthetic construct; identical to SEQ ID NO: 625
  source 1..76: mol_type = other RNA
  modified_base 1: mod_base = OTHER; note = 2'-fluoroguanosine
  modified_base 3: mod_base = OTHER; note = 2'-fluorocytosine
  modified_base 5: mod_base = OTHER; note = 2'-fluorocytosine
  modified_base 6: mod_base = OTHER; note = Cytosine phosphorothiorate
  modified_base 9: mod_base = OTHER; note = Guanosine phosphorothiorate
  modified_base 11: mod_base = OTHER; note = Cytosine phosphorothiorate
  modified_base 13: mod_base = OTHER; note = Cytosine phosphorothiorate
  modified_base 14: mod_base = OTHER; note = 2'-Omethyladenosine
  modified_base 15: mod_base = OTHER; note = 2'-Omethyladenosine phosphorothiorate
  modified_base 20: mod_base = OTHER; note = 2'-fluorouridine
  modified_base 23: mod_base = OTHER; note = 2'-fluorocytosine
  modified_base 24: mod_base = OTHER; note = Guanosine phosphorothiorate
  modified_base 25: mod_base = OTHER; note = 2'-Omethylcytosine
  modified_base 26: mod_base = OTHER; note = 2'-Omethyladenosine
  modified_base 28: mod_base = OTHER; note = 2'-fluorouridine
  modified_base 29: mod_base = OTHER; note = 2'-Omethylguanosine
  modified_base 30: mod_base = OTHER; note = Guanosine phosphorothiorate
  modified_base 31: mod_base = OTHER; note = 2'-fluoroadenosine
  modified_base 33: mod_base = OTHER; note = 2'-fluorouridine
  modified_base 34: mod_base = OTHER; note = 2'-fluorouridine
  modified_base 38: mod_base = OTHER; note = 2'-fluoroadenosine phosphorothiorate
  modified_base 39: mod_base = OTHER; note = 2'-Omethyluridine
  modified_base 42: mod_base = OTHER; note = 2'-Omethyladenosine
  modified_base 46: mod_base = OTHER; note = 2'-Omethylguanosine
  modified_base 47: mod_base = OTHER; note = 2'-fluorouridine
  modified_base 55: mod_base = OTHER; note = Uridine phosphorothiorate
  modified_base 56: mod_base = OTHER; note = Cytosine phosphorothiorate
  modified_base 57: mod_base = OTHER; note = 2'-Omethylguanosine phosphorothiorate
  modified_base 58: mod_base = OTHER; note = 2'-fluoroadenosine
  modified_base 60: mod_base = OTHER; note = 2'-Omethyluridine
  modified_base 61: mod_base = OTHER; note = 2'-Omethylcytosine
  modified_base 64: mod_base = OTHER; note = Guanosine phosphorothiorate
  modified_base 65: mod_base = OTHER; note = 2'-Omethylguanosine
  modified_base 66: mod_base = OTHER; note = 2'-fluorocytosine
  modified_base 68: mod_base = OTHER; note = 2'-fluoroguanosine
  modified_base 70: mod_base = OTHER; note = 2'-fluoroguanosine

SEQ ID NO: 2462 - RNA, 76 nt, synthetic construct; identical to SEQ ID NO: 625
  source 1..76: mol_type = other RNA
  modified_base 4: mod_base = OTHER; note = Uridine phosphorothiorate
  modified_base 5: mod_base = OTHER; note = 2'-Omethylcytosine
  modified_base 6: mod_base = OTHER; note = 2'-fluorocytosine
  modified_base 10: mod_base = OTHER; note = Guanosine phosphorothiorate
  modified_base 11: mod_base = OTHER; note = 2'-Omethylcytosine
  modified_base 12: mod_base = OTHER; note = 2'-Omethylguanosine
  modified_base 14: mod_base = OTHER; note = Adenosine phosphorothiorate
  modified_base 18: mod_base = OTHER; note = 2'-fluoroguanosine
  modified_base 20: mod_base = OTHER; note = 2'-Omethyluridine phosphorothiorate
  modified_base 22: mod_base = OTHER; note = Guanosine phosphorothiorate
  modified_base 23: mod_base = OTHER; note = 2'-fluorocytosine
  modified_base 24: mod_base = OTHER; note = 2'-Omethylguanosine
  modified_base 25: mod_base = OTHER; note = 2'-fluorocytosine
  modified_base 26: mod_base = OTHER; note = 2'-fluoroadenosine phosphorothiorate
  modified_base 27: mod_base = OTHER; note = 2'-fluorouridine
  modified_base 28: mod_base = OTHER; note = Uridine phosphorothiorate
  modified_base 29: mod_base = OTHER; note = 2'-Omethylguanosine
  modified_base 31: mod_base = OTHER; note = 2'-fluoroadenosine
  modified_base 34: mod_base = OTHER; note = 2'-Omethyluridine
  modified_base 39: mod_base = OTHER; note = 2'-fluorouridine
  modified_base 40: mod_base = OTHER; note = 2'-Omethyluridine
  modified_base 41: mod_base = OTHER; note = Cytosine phosphorothiorate
  modified_base 43: mod_base = OTHER; note = 2'-Omethyladenosine
  modified_base 44: mod_base = OTHER; note = 2'-fluoroadenosine
  modified_base 45: mod_base = OTHER; note = 2'-Omethylguanosine
  modified_base 47: mod_base = OTHER; note = 2'-Omethyluridine
  modified_base 48: mod_base = OTHER; note = 2'-fluorouridine
  modified_base 56: mod_base = OTHER; note = 2'-fluorocytosine
  modified_base 63: mod_base = OTHER; note = Cytosine phosphorothiorate
  modified_base 64: mod_base = OTHER; note = 2'-Omethylguanosine
  modified_base 68: mod_base = OTHER; note = Guanosine phosphorothiorate
  modified_base 70: mod_base = OTHER; note = Guanosine phosphorothiorate
  modified_base 71: mod_base = OTHER; note = 2'-Omethyluridine phosphorothiorate
  modified_base 76: mod_base = OTHER; note = 2'-fluoroadenosine

SEQ ID NO: 2463 - RNA, 76 nt, synthetic construct; identical to SEQ ID NO: 625
  source 1..76: mol_type = other RNA
  modified_base 4: mod_base = OTHER; note = 2'-fluorouridine
  modified_base 6: mod_base = OTHER; note = Cytosine phosphorothiorate
  modified_base 11: mod_base = OTHER; note = Cytosine phosphorothiorate
  modified_base 12: mod_base = OTHER; note = 2'-fluoroguanosine
  modified_base 15: mod_base = OTHER; note = 2'-Omethyladenosine phosphorothiorate
  modified_base 16: mod_base = OTHER; note = 2'-fluorouridine
  modified_base 19: mod_base = OTHER; note = Adenosine phosphorothiorate
  modified_base 20: mod_base = OTHER; note = 2'-fluorouridine phosphorothiorate
  modified_base 22: mod_base = OTHER; note = 2'-Omethylguanosine phosphorothiorate
  modified_base 23: mod_base = OTHER; note = 2'-Omethylcytosine
  modified_base 24: mod_base = OTHER; note = Guanosine phosphorothiorate
  modified_base 25: mod_base = OTHER; note = 2'-Omethylcytosine
  modified_base 26: mod_base = OTHER; note = 2'-fluoroadenosine
  modified_base 27: mod_base = OTHER; note = 2'-Omethyluridine
  modified_base 28: mod_base = OTHER; note = 2'-fluorouridine
  modified_base 29: mod_base = OTHER; note = 2'-fluoroguanosine phosphorothiorate
  modified_base 39: mod_base = OTHER; note = Uridine phosphorothiorate
  modified_base 40: mod_base = OTHER; note = 2'-fluorouridine
  modified_base 41: mod_base = OTHER; note = 2'-Omethylcytosine
  modified_base 42: mod_base = OTHER; note = 2'-Omethyladenosine
  modified_base 43: mod_base = OTHER; note = 2'-Omethyladenosine
  modified_base 45: mod_base = OTHER; note = 2'-fluoroguanosine phosphorothiorate
  modified_base 47: mod_base = OTHER; note = 2'-fluorouridine
  modified_base 59: mod_base = OTHER; note = 2'-fluoroguanosine
  modified_base 60: mod_base = OTHER; note = 2'-fluorouridine phosphorothiorate
  modified_base 62: mod_base = OTHER; note = 2'-fluorocytosine
  modified_base 63: mod_base = OTHER; note = 2'-fluorocytosine
  modified_base 65: mod_base = OTHER; note = 2'-fluoroguanosine
  modified_base 66: mod_base = OTHER; note = 2'-Omethylcytosine
  modified_base 68: mod_base = OTHER; note = 2'-Omethylguanosine
  modified_base 69: mod_base = OTHER; note = 2'-Omethyladenosine
  modified_base 70: mod_base = OTHER; note = 2'-Omethylguanosine
  modified_base 71: mod_base = OTHER; note = 2'-fluorouridine
  modified_base 74: mod_base = OTHER; note = 2'-fluorocytosine
  modified_base 75: mod_base = OTHER; note = 2'-fluorocytosine
  modified_base 76: mod_base = OTHER; note = 2'-Omethyladenosine

SEQ ID NO: 2464 - RNA, 76 nt, synthetic construct; identical to SEQ ID NO: 625
  source 1..76: mol_type = other RNA
  modified_base 4: mod_base = OTHER; note = 2'-fluorouridine
  modified_base 5: mod_base = OTHER; note = 2'-fluorocytosine
  modified_base 6: mod_base = OTHER; note = Cytosine phosphorothiorate
  modified_base 10: mod_base = OTHER; note = Guanosine phosphorothiorate
  modified_base 11: mod_base = OTHER; note = 2'-fluorocytosine phosphorothiorate
  modified_base 13: mod_base = OTHER; note = 2'-fluorocytosine phosphorothiorate
  modified_base 17: mod_base = OTHER; note = Guanosine phosphorothiorate
  modified_base 18: mod_base = OTHER; note = 2'-fluoroguanosine
  modified_base 22: mod_base = OTHER; note = 2'-fluoroguanosine
  modified_base 25: mod_base = OTHER; note = Cytosine phosphorothiorate
  modified_base 26: mod_base = OTHER; note = 2'-fluoroadenosine
  modified_base 28: mod_base = OTHER; note = 2'-Omethyluridine
  modified_base 33: mod_base = OTHER; note = 2'-fluorouridine phosphorothiorate
  modified_base 34: mod_base = OTHER; note = 2'-Omethyluridine
  modified_base 38: mod_base = OTHER; note = 2'-Omethyladenosine
  modified_base 40: mod_base = OTHER; note = Uridine phosphorothiorate
  modified_base 41: mod_base = OTHER; note = 2'-fluorocytosine
  modified_base 48: mod_base = OTHER; note = Uridine phosphorothiorate
  modified_base 49: mod_base = OTHER; note = Cytosine phosphorothiorate
  modified_base 50: mod_base = OTHER; note = 2'-fluorocytosine
  modified_base 51: mod_base = OTHER; note = Guanosine phosphorothiorate
  modified_base 52: mod_base = OTHER; note = 2'-Omethylguanosine
  modified_base 54: mod_base = OTHER; note = 2'-fluorouridine
  modified_base 55: mod_base = OTHER; note = Uridine phosphorothiorate
  modified_base 56: mod_base = OTHER; note = 2'-Omethylcytosine
  modified_base 61: mod_base = OTHER; note = 2'-Omethylcytosine
  modified_base 62: mod_base = OTHER; note = 2'-Omethylcytosine
  modified_base 64: mod_base = OTHER; note = Guanosine phosphorothiorate
  modified_base 66: mod_base = OTHER; note = Cytosine phosphorothiorate
  modified_base 67: mod_base = OTHER; note = 2'-fluoroguanosine
  modified_base 71: mod_base = OTHER; note = 2'-fluorouridine
  modified_base 73: mod_base = OTHER; note = 2'-fluoroguanosine
  modified_base 75: mod_base = OTHER; note = 2'-Omethylcytosine phosphorothiorate

SEQ ID NO: 2465 - RNA, 76 nt, synthetic construct; identical to SEQ ID NO: 625
  source 1..76: mol_type = other RNA
  modified_base 1: mod_base = OTHER; note = 2'-fluoroguanosine
  modified_base 5: mod_base = OTHER; note = 2'-Omethylcytosine phosphorothiorate
  modified_base 6: mod_base = OTHER; note = 2'-fluorocytosine
  modified_base 9: mod_base = OTHER; note = Guanosine phosphorothiorate
  modified_base 13: mod_base = OTHER; note = 2'-Omethylcytosine phosphorothiorate
  modified_base 15: mod_base = OTHER; note = 2'-Omethyladenosine
  modified_base 18: mod_base = OTHER; note = 2'-Omethylguanosine
  modified_base 23: mod_base = OTHER; note = 2'-fluorocytosine
  modified_base 25: mod_base = OTHER; note = 2'-fluorocytosine
  modified_base 28: mod_base = OTHER; note = Uridine phosphorothiorate
  modified_base 29: mod_base = OTHER; note = 2'-fluoroguanosine phosphorothiorate
  modified_base 34: mod_base = OTHER; note = 2'-fluorouridine
  modified_base 37: mod_base = OTHER; note = Adenosine phosphorothiorate
  modified_base 38: mod_base = OTHER; note = 2'-Omethyladenosine
  modified_base 41: mod_base = OTHER; note = 2'-Omethylcytosine
  modified_base 43: mod_base = OTHER; note = Adenosine phosphorothiorate
  modified_base 44: mod_base = OTHER; note = Adenosine phosphorothiorate
  modified_base 45: mod_base = OTHER; note = 2'-fluoroguanosine
  modified_base 46: mod_base = OTHER; note = 2'-fluoroguanosine
  modified_base 47: mod_base = OTHER; note = 2'-Omethyluridine
  modified_base 48: mod_base = OTHER; note = Uridine phosphorothiorate
  modified_base 49: mod_base = OTHER; note = 2'-Omethylcytosine
  modified_base 52: mod_base = OTHER; note = 2'-fluoroguanosine
  modified_base 53: mod_base = OTHER; note = 2'-fluoroguanosine
  modified_base 57: mod_base = OTHER; note = 2'-fluoroguanosine
  modified_base 58: mod_base = OTHER; note = 2'-fluoroadenosine
  modified_base 59: mod_base = OTHER; note = 2'-Omethylguanosine
  modified_base 61: mod_base = OTHER; note = 2'-Omethylcytosine
  modified_base 62: mod_base = OTHER; note = 2'-fluorocytosine
  modified_base 63: mod_base = OTHER; note = 2'-fluorocytosine
  modified_base 65: mod_base = OTHER; note = Guanosine phosphorothiorate
  modified_base 67: mod_base = OTHER; note = 2'-fluoroguanosine
  modified_base 71: mod_base = OTHER; note = 2'-Omethyluridine
  modified_base 72: mod_base = OTHER; note = 2'-Omethylcytosine
  modified_base 76: mod_base = OTHER; note = 2'-Omethyladenosine

SEQ ID NO: 2466 - RNA, 76 nt, synthetic construct; identical to SEQ ID NO: 625
  source 1..76: mol_type = other RNA
  modified_base 2: mod_base = OTHER; note = 2'-Omethylguanosine
  modified_base 7: mod_base = OTHER; note = Guanosine phosphorothiorate
  modified_base 12: mod_base = OTHER; note = 2'-fluoroguanosine
  modified_base 15: mod_base = OTHER; note = 2'-fluoroadenosine
  modified_base 17: mod_base = OTHER; note = 2'-Omethylguanosine
  modified_base 25: mod_base = OTHER; note = Cytosine phosphorothiorate
  modified_base 26: mod_base = OTHER; note = 2'-fluoroadenosine
  modified_base 27: mod_base = OTHER; note = 2'-Omethyluridine
  modified_base 28: mod_base = OTHER; note = 2'-fluorouridine
  modified_base 33: mod_base = OTHER; note = 2'-fluorouridine
  modified_base 36: mod_base = OTHER; note = Adenosine phosphorothiorate
  modified_base 38: mod_base = OTHER; note = 2'-Omethyladenosine
  modified_base 40: mod_base = OTHER; note = 2'-Omethyluridine phosphorothiorate
  modified_base 41: mod_base = OTHER; note = 2'-Omethylcytosine phosphorothiorate
  modified_base 42: mod_base = OTHER; note = 2'-fluoroadenosine
  modified_base 46: mod_base = OTHER; note = 2'-Omethylguanosine
  modified_base 47: mod_base = OTHER; note = 2'-Omethyluridine
  modified_base 48: mod_base = OTHER; note = 2'-fluorouridine
  modified_base 49: mod_base = OTHER; note = Cytosine phosphorothiorate
  modified_base 51: mod_base = OTHER; note = 2'-Omethylguanosine phosphorothiorate
  modified_base 52: mod_base = OTHER; note = 2'-fluoroguanosine
  modified_base 53: mod_base = OTHER; note = 2'-fluoroguanosine
  modified_base 57: mod_base = OTHER; note = 2'-fluoroguanosine phosphorothiorate
  modified_base 58: mod_base = OTHER; note = 2'-fluoroadenosine
  modified_base 60: mod_base = OTHER; note = 2'-Omethyluridine
  modified_base 65: mod_base = OTHER; note = 2'-Omethylguanosine
  modified_base 67: mod_base = OTHER; note = 2'-Omethylguanosine
  modified_base 68: mod_base = OTHER; note = Guanosine phosphorothiorate
  modified_base 69: mod_base = OTHER; note = 2'-Omethyladenosine phosphorothiorate
  modified_base 70: mod_base = OTHER; note = 2'-Omethylguanosine
  modified_base 71: mod_base = OTHER; note = 2'-Omethyluridine
  modified_base 74: mod_base = OTHER; note = 2'-fluorocytosine
  modified_base 75: mod_base = OTHER; note = 2'-Omethylcytosine

SEQ ID NO: 2467 - RNA, 76 nt, synthetic construct; identical to SEQ ID NO: 625
  source 1..76: mol_type = other RNA
  modified_base 3: mod_base = OTHER; note = 2'-Omethylcytosine
  modified_base 6: mod_base = OTHER; note = Cytosine phosphorothiorate
  modified_base 12: mod_base = OTHER; note = 2'-Omethylguanosine
  modified_base 15: mod_base = OTHER; note = Adenosine phosphorothiorate
  modified_base 16: mod_base = OTHER; note = 2'-fluorouridine phosphorothiorate
  modified_base 17: mod_base = OTHER; note = 2'-Omethylguanosine
  modified_base 18: mod_base = OTHER; note = 2'-fluoroguanosine
  modified_base 19: mod_base = OTHER; note = Adenosine phosphorothiorate
  modified_base 20: mod_base = OTHER; note = 2'-Omethyluridine
  modified_base 29: mod_base = OTHER; note = Guanosine phosphorothiorate
  modified_base 30: mod_base = OTHER; note = 2'-fluoroguanosine
  modified_base 33: mod_base = OTHER; note = 2'-fluorouridine
  modified_base 37: mod_base = OTHER; note = Adenosine phosphorothiorate
  modified_base 38: mod_base = OTHER; note = 2'-fluoroadenosine
  modified_base 43: mod_base = OTHER; note = 2'-fluoroadenosine phosphorothiorate
  modified_base 46: mod_base = OTHER; note = Guanosine phosphorothiorate
  modified_base 47: mod_base = OTHER; note = 2'-Omethyluridine
  modified_base 48: mod_base = OTHER; note = 2'-Omethyluridine
  modified_base 52: mod_base = OTHER; note = 2'-fluoroguanosine phosphorothiorate
  modified_base 53: mod_base = OTHER; note = 2'-Omethylguanosine phosphorothiorate
  modified_base 54: mod_base = OTHER; note = 2'-Omethyluridine
  modified_base 56: mod_base = OTHER; note = 2'-Omethylcytosine
  modified_base 57: mod_base = OTHER; note = 2'-Omethylguanosine
  modified_base 59: mod_base = OTHER; note = Guanosine phosphorothiorate
  modified_base 60: mod_base = OTHER; note = 2'-Omethyluridine
  modified_base 62: mod_base = OTHER; note = Cytosine phosphorothiorate
  modified_base 64: mod_base = OTHER; note = 2'-Omethylguanosine
  modified_base 67: mod_base = OTHER; note = 2'-Omethylguanosine
  modified_base 69: mod_base = OTHER; note = 2'-fluoroadenosine
  modified_base 71: mod_base = OTHER; note = 2'-Omethyluridine
  modified_base 72: mod_base = OTHER; note = Cytosine phosphorothiorate
  modified_base 74: mod_base = OTHER; note = Cytosine phosphorothiorate
  modified_base 76: mod_base = OTHER; note = 2'-fluoroadenosine

SEQ ID NO: 2468 - RNA, 76 nt, synthetic construct; identical to SEQ ID NO: 625
  source 1..76: mol_type = other RNA
  modified_base 1: mod_base = OTHER; note = 2'-fluoroguanosine
  modified_base 3: mod_base = OTHER; note = 2'-Omethylcytosine
  modified_base 5: mod_base = OTHER; note = 2'-Omethylcytosine phosphorothiorate
  modified_base 9: mod_base = OTHER; note = Guanosine phosphorothiorate
  modified_base 10: mod_base = OTHER; note = 2'-Omethylguanosine
  modified_base 13: mod_base = OTHER; note = 2'-fluorocytosine
  modified_base 14: mod_base = OTHER; note = 2'-fluoroadenosine phosphorothiorate
  modified_base 15: mod_base = OTHER; note = 2'-fluoroadenosine
  modified_base 16: mod_base = OTHER; note = 2'-Omethyluridine
  modified_base 17: mod_base = OTHER; note = 2'-Omethylguanosine
  modified_base 18: mod_base = OTHER; note = 2'-fluoroguanosine
  modified_base 20: mod_base = OTHER; note = 2'-Omethyluridine phosphorothiorate
  modified_base 21: mod_base = OTHER; note = Adenosine phosphorothiorate
  modified_base 22: mod_base = OTHER; note = 2'-fluoroguanosine
  modified_base 23: mod_base = OTHER; note = 2'-fluorocytosine
  modified_base 27: mod_base = OTHER; note = Uridine phosphorothiorate
  modified_base 28: mod_base = OTHER; note = 2'-fluorouridine
  modified_base 30: mod_base = OTHER; note = Guanosine phosphorothiorate
  modified_base 31: mod_base = OTHER; note = 2'-Omethyladenosine
  modified_base 39: mod_base = OTHER; note = 2'-Omethyluridine
  modified_base 41: mod_base = OTHER; note = 2'-Omethylcytosine
  modified_base 42: mod_base = OTHER; note = Adenosine phosphorothiorate
  modified_base 43: mod_base = OTHER; note = 2'-Omethyladenosine
  modified_base 44: mod_base = OTHER; note = 2'-Omethyladenosine phosphorothiorate
  modified_base 47: mod_base = OTHER; note = 2'-fluorouridine
  modified_base 51: mod_base = OTHER; note = 2'-Omethylguanosine
  modified_base 53: mod_base = OTHER; note = Guanosine phosphorothiorate
  modified_base 58: mod_base = OTHER; note = 2'-fluoroadenosine
  modified_base 61: mod_base = OTHER; note = 2'-Omethylcytosine
  modified_base 64: mod_base = OTHER; note = Guanosine phosphorothiorate
  modified_base 65: mod_base = OTHER; note = 2'-Omethylguanosine
  modified_base 67: mod_base = OTHER; note = 2'-Omethylguanosine
  modified_base 68: mod_base = OTHER; note = 2'-fluoroguanosine
  modified_base 74: mod_base = OTHER; note = 2'-fluorocytosine phosphorothiorate
  modified_base 76: mod_base = OTHER; note = 2'-Omethyladenosine

SEQ ID NO: 2469 - RNA, 76 nt, synthetic construct; identical to SEQ ID NO: 625
  source 1..76: mol_type = other RNA
  modified_base 1: mod_base = OTHER; note = Guanosine phosphorothiorate
  modified_base 3: mod_base = OTHER; note = Cytosine phosphorothiorate
  modified_base 4: mod_base = OTHER; note = 2'-Omethyluridine
  modified_base 5: mod_base = OTHER; note = 2'-Omethylcytosine
  modified_base 6: mod_base = OTHER; note = 2'-Omethylcytosine
  modified_base 10: mod_base = OTHER; note = 2'-Omethylguanosine
  modified_base 16: mod_base = OTHER; note = Uridine phosphorothiorate
  modified_base 18: mod_base = OTHER; note = Guanosine phosphorothiorate
  modified_base 20: mod_base = OTHER; note = Uridine phosphorothiorate
  modified_base 23: mod_base = OTHER; note = 2'-Omethylcytosine
  modified_base 24: mod_base = OTHER; note = 2'-fluoroguanosine
  modified_base 25: mod_base = OTHER; note = 2'-fluorocytosine
  modified_base 26: mod_base = OTHER; note = 2'-fluoroadenosine
  modified_base 33: mod_base = OTHER; note = 2'-fluorouridine
  modified_base 39: mod_base = OTHER; note = 2'-Omethyluridine
  modified_base 41: mod_base = OTHER; note = 2'-fluorocytosine
  modified_base 44: mod_base = OTHER; note = 2'-fluoroadenosine phosphorothiorate
  modified_base 45: mod_base = OTHER; note = 2'-fluoroguanosine
  modified_base 46: mod_base = OTHER; note = 2'-Omethylguanosine
  modified_base 49: mod_base = OTHER; note = 2'-Omethylcytosine phosphorothiorate
  modified_base 50: mod_base = OTHER; note = 2'-Omethylcytosine
  modified_base 52: mod_base = OTHER; note = 2'-Omethylguanosine
  modified_base 53: mod_base = OTHER; note = 2'-fluoroguanosine phosphorothiorate
  modified_base 54: mod_base = OTHER; note = 2'-Omethyluridine
  modified_base 62: mod_base = OTHER; note = 2'-Omethylcytosine
  modified_base 67: mod_base = OTHER; note = Guanosine phosphorothiorate
  modified_base 68: mod_base = OTHER; note = Guanosine phosphorothiorate
  modified_base 70: mod_base = OTHER; note = 2'-Omethylguanosine
  modified_base 72: mod_base = OTHER; note = 2'-Omethylcytosine
  modified_base 73: mod_base = OTHER; note = 2'-fluoroguanosine

SEQ ID NO: 2470 - RNA, 76 nt, synthetic construct; identical to SEQ ID NO: 625
  source 1..76: mol_type = other RNA
  modified_base 4: mod_base = OTHER; note = 2'-fluorouridine
  modified_base 5: mod_base = OTHER; note = 2'-fluorocytosine phosphorothiorate
  modified_base 12: mod_base = OTHER; note = 2'-Omethylguanosine phosphorothiorate
  modified_base 16: mod_base = OTHER; note = 2'-Omethyluridine
  modified_base 23: mod_base = OTHER; note = 2'-fluorocytosine
  modified_base 26: mod_base = OTHER; note = 2'-Omethyladenosine phosphorothiorate
  modified_base 27: mod_base = OTHER; note = 2'-Omethyluridine
  modified_base 28: mod_base = OTHER; note = Uridine phosphorothiorate
  modified_base 31: mod_base = OTHER; note = 2'-Omethyladenosine
  modified_base 32: mod_base = OTHER; note = 2'-fluorocytosine
  modified_base 33: mod_base = OTHER; note = 2'-fluorouridine
  modified_base 39: mod_base = OTHER; note = 2'-Omethyluridine
  modified_base 43: mod_base = OTHER; note = Adenosine phosphorothiorate
  modified_base 44: mod_base = OTHER; note = 2'-Omethyladenosine
  modified_base 45: mod_base = OTHER; note = 2'-fluoroguanosine
  modified_base 46: mod_base = OTHER; note = 2'-Omethylguanosine
  modified_base 49: mod_base = OTHER; note = 2'-Omethylcytosine
  modified_base 50: mod_base = OTHER; note = 2'-fluorocytosine
  modified_base 53: mod_base = OTHER; note = 2'-Omethylguanosine
  modified_base 57: mod_base = OTHER; note = Guanosine phosphorothiorate
  modified_base 59: mod_base = OTHER; note = 2'-Omethylguanosine phosphorothiorate
  modified_base 60: mod_base = OTHER; note = 2'-Omethyluridine phosphorothiorate
  modified_base 64: mod_base = OTHER; note = 2'-fluoroguanosine phosphorothiorate
  modified_base 66: mod_base = OTHER; note = 2'-Omethylcytosine
  modified_base 69: mod_base = OTHER; note = Adenosine phosphorothiorate
  modified_base 70: mod_base = OTHER; note = 2'-Omethylguanosine
  modified_base 71: mod_base = OTHER; note = 2'-Omethyluridine
  modified_base 72: mod_base = OTHER; note = 2'-Omethylcytosine
  modified_base 73: mod_base = OTHER; note = 2'-fluoroguanosine
  modified_base 74: mod_base = OTHER; note = 2'-Omethylcytosine
  modified_base 75: mod_base = OTHER; note = 2'-Omethylcytosine
  modified_base 76: mod_base = OTHER; note = 2'-Omethyladenosine

SEQ ID NO: 2471 - RNA, 76 nt, synthetic construct; identical to SEQ ID NO: 625
  source 1..76: mol_type = other RNA
  modified_base 2: mod_base = OTHER; note = 2'-Omethylguanosine
  modified_base 4: mod_base = OTHER; note = 2'-Omethyluridine
  modified_base 5: mod_base = OTHER; note = 2'-Omethylcytosine
  modified_base 12: mod_base = OTHER; note = Guanosine phosphorothiorate
  modified_base 13: mod_base = OTHER; note = Cytosine phosphorothiorate
  modified_base 14: mod_base = OTHER; note = 2'-Omethyladenosine
  modified_base 16: mod_base = OTHER; note = 2'-Omethyluridine
  modified_base 19: mod_base = OTHER; note = Adenosine phosphorothiorate
  modified_base 20: mod_base = OTHER; note = 2'-fluorouridine phosphorothiorate
  modified_base 21: mod_base = OTHER; note = Adenosine phosphorothiorate
  modified_base 22: mod_base = OTHER; note = 2'-fluoroguanosine
  modified_base 24: mod_base = OTHER; note = 2'-Omethylguanosine
  modified_base 25: mod_base = OTHER; note = 2'-fluorocytosine
  modified_base 27: mod_base = OTHER; note = 2'-fluorouridine
  modified_base 28: mod_base = OTHER; note = 2'-fluorouridine phosphorothiorate
  modified_base 29: mod_base = OTHER; note = 2'-Omethylguanosine
  modified_base 30: mod_base = OTHER; note = 2'-fluoroguanosine
  modified_base 36: mod_base = OTHER; note = Adenosine phosphorothiorate
  modified_base 39: mod_base = OTHER; note = 2'-Omethyluridine
  modified_base 42: mod_base = OTHER; note = 2'-fluoroadenosine phosphorothiorate
  modified_base 45: mod_base = OTHER; note = 2'-Omethylguanosine
  modified_base 46: mod_base = OTHER; note = Guanosine phosphorothiorate
  modified_base 47: mod_base = OTHER; note = 2'-Omethyluridine
  modified_base 49: mod_base = OTHER; note = Cytosine phosphorothiorate
  modified_base 50: mod_base = OTHER; note = 2'-Omethylcytosine
  modified_base 52: mod_base = OTHER; note = 2'-fluoroguanosine phosphorothiorate
  modified_base 53: mod_base = OTHER; note = Guanosine phosphorothiorate
  modified_base 54: mod_base = OTHER; note = 2'-fluorouridine
  modified_base 56: mod_base = OTHER; note = Cytosine phosphorothiorate
  modified_base 57: mod_base = OTHER; note = 2'-fluoroguanosine
  modified_base 58: mod_base = OTHER; note = 2'-fluoroadenosine
  modified_base 59: mod_base = OTHER; note = 2'-Omethylguanosine
  modified_base 62: mod_base = OTHER; note = Cytosine phosphorothiorate
  modified_base 63: mod_base = OTHER; note = 2'-Omethylcytosine
  modified_base 66: mod_base = OTHER; note = 2'-Omethylcytosine
  modified_base 68: mod_base = OTHER; note = 2'-fluoroguanosine
  modified_base 70: mod_base = OTHER; note = 2'-Omethylguanosine
  modified_base 71: mod_base = OTHER; note = 2'-fluorouridine phosphorothiorate
  modified_base 73: mod_base = OTHER; note = 2'-fluoroguanosine
  modified_base 74: mod_base = OTHER; note = 2'-fluorocytosine

SEQ ID NO: 2472 - RNA, 76 nt, synthetic construct; identical to SEQ ID NO: 625
  source 1..76: mol_type = other RNA
  modified_base 5: mod_base = OTHER; note = 2'-fluorocytosine
  modified_base 14: mod_base = OTHER; note = 2'-fluoroadenosine
  modified_base 15: mod_base = OTHER; note = 2'-Omethyladenosine
  modified_base 17: mod_base = OTHER; note = Guanosine phosphorothiorate
  modified_base 18: mod_base = OTHER; note = 2'-Omethylguanosine phosphorothiorate
  modified_base 19: mod_base = OTHER; note = Adenosine phosphorothiorate
  modified_base 20: mod_base = OTHER; note = 2'-Omethyluridine
  modified_base 21: mod_base = OTHER; note = Adenosine phosphorothiorate
  modified_base 22: mod_base = OTHER; note = Guanosine phosphorothiorate
  modified_base 23: mod_base = OTHER; note = 2'-fluorocytosine
  modified_base 25: mod_base = OTHER; note = 2'-fluorocytosine
  modified_base 28: mod_base = OTHER; note = 2'-Omethyluridine
  modified_base 34: mod_base = OTHER; note = 2'-Omethyluridine
  modified_base 38: mod_base = OTHER; note = Adenosine phosphorothiorate
  modified_base 39: mod_base = OTHER; note = Uridine phosphorothiorate
  modified_base 40: mod_base = OTHER; note = 2'-fluorouridine
  modified_base 41: mod_base = OTHER; note = Cytosine phosphorothiorate
  modified_base 42: mod_base = OTHER; note = 2'-Omethyladenosine
  modified_base 44: mod_base = OTHER; note = 2'-fluoroadenosine
  modified_base 45: mod_base = OTHER; note = 2'-fluoroguanosine phosphorothiorate
  modified_base 46: mod_base = OTHER; note = Guanosine phosphorothiorate
  modified_base 48: mod_base = OTHER; note = 2'-Omethyluridine
  modified_base 49: mod_base = OTHER; note = 2'-fluorocytosine
  modified_base 50: mod_base = OTHER; note = 2'-Omethylcytosine phosphorothiorate
  modified_base 51: mod_base = OTHER; note = 2'-Omethylguanosine
  modified_base 54: mod_base = OTHER; note = 2'-fluorouridine
  modified_base 56: mod_base = OTHER; note = 2'-fluorocytosine
  modified_base 62: mod_base = OTHER; note = 2'-Omethylcytosine phosphorothiorate
  modified_base 63: mod_base = OTHER; note = 2'-fluorocytosine
  modified_base 66: mod_base = OTHER; note = 2'-Omethylcytosine
  modified_base 67: mod_base = OTHER; note = 2'-Omethylguanosine
  modified_base 68: mod_base = OTHER; note = 2'-Omethylguanosine
  modified_base 71: mod_base = OTHER; note = 2'-fluorouridine
  modified_base 73: mod_base = OTHER; note = 2'-Omethylguanosine
  modified_base 74: mod_base = OTHER; note = 2'-Omethylcytosine
  modified_base 75: mod_base = OTHER; note = Cytosine phosphorothiorate
  modified_base 76: mod_base = OTHER; note = 2'-Omethyladenosine

SEQ ID NO: 2473 - RNA, 76 nt, synthetic construct; identical to SEQ ID NO: 625
  source 1..76: mol_type = other RNA
  modified_base 1: mod_base = OTHER; note = 2'-fluoroguanosine
  modified_base 10: mod_base = OTHER; note = 2'-fluoroguanosine
  modified_base 13: mod_base = OTHER; note = 2'-fluorocytosine phosphorothiorate
  modified_base 14: mod_base = OTHER; note = 2'-fluoroadenosine
  modified_base 16: mod_base = OTHER; note = 2'-Omethyluridine
  modified_base 17: mod_base = OTHER; note = 2'-Omethylguanosine phosphorothiorate
  modified_base 18: mod_base = OTHER; note = 2'-fluoroguanosine phosphorothiorate
  modified_base 20: mod_base = OTHER; note = 2'-Omethyluridine
  modified_base 23: mod_base = OTHER; note = 2'-Omethylcytosine
  modified_base 26: mod_base = OTHER; note = 2'-Omethyladenosine
  modified_base 27: mod_base = OTHER; note = 2'-fluorouridine phosphorothiorate
  modified_base 28: mod_base = OTHER; note = 2'-fluorouridine
  modified_base 29: mod_base = OTHER; note = 2'-Omethylguanosine
  modified_base 34: mod_base = OTHER; note = 2'-fluorouridine
  modified_base 38: mod_base = OTHER; note = 2'-Omethyladenosine
  modified_base 39: mod_base = OTHER; note = Uridine phosphorothiorate
  modified_base 40: mod_base = OTHER; note = 2'-fluorouridine
  modified_base 42: mod_base = OTHER; note = 2'-Omethyladenosine
  modified_base 44: mod_base = OTHER; note = 2'-fluoroadenosine
  modified_base 45: mod_base = OTHER; note = 2'-fluoroguanosine
  modified_base 47: mod_base = OTHER; note = 2'-Omethyluridine
  modified_base 48: mod_base = OTHER; note = 2'-Omethyluridine
  modified_base 49: mod_base = OTHER; note = 2'-Omethylcytosine
  modified_base 53: mod_base = OTHER; note = 2'-fluoroguanosine
  modified_base 54: mod_base = OTHER; note = 2'-Omethyluridine
  modified_base 55: mod_base = OTHER; note = Uridine phosphorothiorate
  modified_base 56: mod_base = OTHER; note = 2'-Omethylcytosine
  modified_base 57: mod_base = OTHER; note = 2'-Omethylguanosine
  modified_base 59: mod_base = OTHER; note = 2'-fluoroguanosine
  modified_base 60: mod_base = OTHER; note = 2'-fluorouridine phosphorothiorate
  modified_base 61: mod_base = OTHER; note = 2'-Omethylcytosine
  modified_base 64: mod_base = OTHER; note = Guanosine phosphorothiorate
  modified_base 68: mod_base = OTHER; note = 2'-Omethylguanosine
  modified_base 70: mod_base = OTHER; note = 2'-fluoroguanosine
  modified_base 76: mod_base = OTHER; note = 2'-fluoroadenosine

SEQ ID NO: 2474 - RNA, 76 nt, synthetic construct; identical to SEQ ID NO: 625
  source 1..76: mol_type = other RNA
  modified_base 1: mod_base = OTHER; note = Guanosine phosphorothiorate
  modified_base 2: mod_base = OTHER; note = 2'-Omethylguanosine
  modified_base 3: mod_base = OTHER; note = Cytosine phosphorothiorate
  modified_base 4: mod_base = OTHER; note = 2'-Omethyluridine
  modified_base 12: mod_base = OTHER; note = Guanosine phosphorothiorate
  modified_base 13: mod_base = OTHER; note = 2'-Omethylcytosine
  modified_base 14: mod_base = OTHER; note = 2'-fluoroadenosine phosphorothiorate
  modified_base 16: mod_base = OTHER; note = 2'-fluorouridine
  modified_base 18: mod_base = OTHER; note = 2'-Omethylguanosine
  modified_base 24: mod_base = OTHER; note = 2'-Omethylguanosine
  modified_base 29: mod_base = OTHER; note = Guanosine phosphorothiorate
  modified_base 30: mod_base = OTHER; note = 2'-fluoroguanosine
  modified_base 32: mod_base = OTHER; note = 2'-fluorocytosine
  modified_base 34: mod_base = OTHER; note = Uridine phosphorothiorate
  modified_base 39: mod_base = OTHER; note = 2'-fluorouridine
  modified_base 41: mod_base = OTHER; note = Cytosine phosphorothiorate
  modified_base 44: mod_base = OTHER; note = 2'-fluoroadenosine
  modified_base 49: mod_base = OTHER; note = 2'-Omethylcytosine
  modified_base 50: mod_base = OTHER; note = 2'-Omethylcytosine
  modified_base 51: mod_base = OTHER; note = Guanosine phosphorothiorate
  modified_base 53: mod_base = OTHER; note = 2'-Omethylguanosine
  modified_base 54: mod_base = OTHER; note = 2'-fluorouridine
  modified_base 57: mod_base = OTHER; note = 2'-Omethylguanosine
  modified_base 58: mod_base = OTHER; note = Adenosine phosphorothiorate
  modified_base 60: mod_base = OTHER; note = Uridine phosphorothiorate
  modified_base 61: mod_base = OTHER; note = 2'-Omethylcytosine
  modified_base 66: mod_base = OTHER; note = 2'-Omethylcytosine
  modified_base 68: mod_base = OTHER; note = 2'-fluoroguanosine phosphorothiorate
  modified_base 69: mod_base = OTHER; note = 2'-fluoroadenosine
  modified_base 70: mod_base = OTHER; note = 2'-Omethylguanosine phosphorothiorate
  modified_base 71: mod_base = OTHER; note = Uridine phosphorothiorate
  modified_base 72: mod_base = OTHER; note = 2'-fluorocytosine phosphorothiorate
  modified_base 73: mod_base = OTHER; note = 2'-Omethylguanosine
  modified_base 76: mod_base = OTHER; note = 2'-Omethyladenosine

SEQ ID NO: 2475 - RNA, 76 nt, synthetic construct; identical to SEQ ID NO: 625
  source 1..76: mol_type = other RNA
  modified_base 1: mod_base = OTHER; note = 2'-Omethylguanosine
  modified_base 3: mod_base = OTHER; note = Cytosine phosphorothiorate
  modified_base 4: mod_base = OTHER; note = 2'-Omethyluridine phosphorothiorate
  modified_base 5: mod_base = OTHER; note = 2'-fluorocytosine
  modified_base 6: mod_base = OTHER; note = 2'-Omethylcytosine phosphorothiorate
  modified_base 10: mod_base = OTHER; note = 2'-Omethylguanosine
  modified_base 11: mod_base = OTHER; note = 2'-Omethylcytosine
  modified_base 12: mod_base = OTHER; note = 2'-Omethylguanosine
  modified_base 13: mod_base = OTHER; note = 2'-Omethylcytosine
  modified_base 14: mod_base = OTHER; note = 2'-Omethyladenosine phosphorothiorate
  modified_base 15: mod_base = OTHER; note = 2'-Omethyladenosine
  modified_base 16: mod_base = OTHER; note = 2'-fluorouridine
  modified_base 23: mod_base = OTHER; note = Cytosine phosphorothiorate
  modified_base 26: mod_base = OTHER; note = Adenosine phosphorothiorate
  modified_base 27: mod_base = OTHER; note = 2'-fluorouridine
  modified_base 31: mod_base = OTHER; note = 2'-Omethyladenosine
  modified_base 34: mod_base = OTHER; note = Uridine phosphorothiorate
  modified_base 39: mod_base = OTHER; note = Uridine phosphorothiorate
  modified_base 40: mod_base = OTHER; note = 2'-Omethyluridine
  modified_base 41: mod_base = OTHER; note = Cytosine phosphorothiorate
  modified_base 43: mod_base = OTHER; note = 2'-fluoroadenosine
  modified_base 44: mod_base = OTHER; note = Adenosine phosphorothiorate
  modified_base 45: mod_base = OTHER; note = 2'-fluoroguanosine
  modified_base 47: mod_base = OTHER; note = 2'-fluorouridine
  modified_base 50: mod_base = OTHER; note = Cytosine phosphorothiorate
  modified_base 51: mod_base = OTHER; note = 2'-Omethylguanosine
  modified_base 54: mod_base = OTHER; note = Uridine phosphorothiorate
  modified_base 56: mod_base = OTHER; note = 2'-fluorocytosine phosphorothiorate
  modified_base 57: mod_base = OTHER; note = 2'-Omethylguanosine
  modified_base 59: mod_base = OTHER; note = Guanosine phosphorothiorate
  modified_base 61: mod_base = OTHER; note = 2'-Omethylcytosine
  modified_base 62: mod_base = OTHER; note = Cytosine phosphorothiorate
  modified_base 63: mod_base = OTHER; note = 2'-fluorocytosine phosphorothiorate
  modified_base 66: mod_base = OTHER; note = Cytosine phosphorothiorate
  modified_base 70: mod_base = OTHER; note = 2'-Omethylguanosine phosphorothiorate
  modified_base 71: mod_base = OTHER; note = 2'-Omethyluridine phosphorothiorate
  modified_base 72: mod_base = OTHER; note = 2'-fluorocytosine

SEQ ID NO: 2476 - RNA, 76 nt, synthetic construct; identical to SEQ ID NO: 625
  source 1..76: mol_type = other RNA
  modified_base 1: mod_base = OTHER; note = 2'-Omethylguanosine
  modified_base 6: mod_base = OTHER; note = 2'-fluorocytosine phosphorothiorate
  modified_base 8: mod_base = OTHER; note = Uridine phosphorothiorate
  modified_base 9: mod_base = OTHER; note = Guanosine phosphorothiorate
  modified_base 10: mod_base = OTHER; note = 2'-fluoroguanosine
  modified_base 13: mod_base = OTHER; note = 2'-Omethylcytosine
  modified_base 14: mod_base = OTHER; note = 2'-fluoroadenosine
  modified_base 16: mod_base = OTHER; note = 2'-Omethyluridine
  modified_base 19: mod_base = OTHER; note = Adenosine phosphorothiorate
  modified_base 20: mod_base = OTHER; note = 2'-Omethyluridine
  modified_base 25: mod_base = OTHER; note = 2'-Omethylcytosine
  modified_base 27: mod_base = OTHER; note = 2'-fluorouridine
  modified_base 30: mod_base = OTHER; note = 2'-fluoroguanosine
  modified_base 32: mod_base = OTHER; note = 2'-fluorocytosine
  modified_base 38: mod_base = OTHER; note = 2'-fluoroadenosine
  modified_base 39: mod_base = OTHER; note = 2'-fluorouridine
  modified_base 42: mod_base = OTHER; note = Adenosine phosphorothiorate
  modified_base 43: mod_base = OTHER; note = 2'-Omethyladenosine
  modified_base 45: mod_base = OTHER; note = 2'-fluoroguanosine
  modified_base 47: mod_base = OTHER; note = 2'-Omethyluridine phosphorothiorate
  modified_base 48: mod_base = OTHER; note = 2'-fluorouridine
  modified_base 52: mod_base = OTHER; note = 2'-fluoroguanosine phosphorothiorate
  modified_base 53: mod_base = OTHER; note = 2'-fluoroguanosine
  modified_base 54: mod_base = OTHER; note = 2'-fluorouridine
  modified_base 56: mod_base = OTHER; note = 2'-fluorocytosine phosphorothiorate
  modified_base 57: mod_base = OTHER; note = 2'-fluoroguanosine phosphorothiorate
  modified_base 62: mod_base = OTHER; note = 2'-Omethylcytosine
  modified_base 63: mod_base = OTHER; note = 2'-fluorocytosine
  modified_base 64: mod_base = OTHER; note = Guanosine phosphorothiorate
  modified_base 66: mod_base = OTHER; note = Cytosine phosphorothiorate
  modified_base 67: mod_base = OTHER; note = 2'-Omethylguanosine
  modified_base 69: mod_base = OTHER; note = Adenosine phosphorothiorate
  modified_base 70: mod_base = OTHER; note = 2'-Omethylguanosine phosphorothiorate
  modified_base 72: mod_base = OTHER; note = 2'-Omethylcytosine
  modified_base 73: mod_base = OTHER; note = 2'-fluoroguanosine

SEQ ID NO: 2477 - RNA, 76 nt, synthetic construct; identical to SEQ ID NO: 625
  source 1..76: mol_type = other RNA
  modified_base 1: mod_base = OTHER; note = 2'-fluoroguanosine
  modified_base 2: mod_base = OTHER; note = Guanosine phosphorothiorate
  modified_base 3: mod_base = OTHER; note = 2'-fluorocytosine
  modified_base 4: mod_base = OTHER; note = 2'-fluorouridine
  modified_base 6: mod_base = OTHER; note = 2'-fluorocytosine phosphorothiorate
  modified_base 14: mod_base = OTHER; note = 2'-fluoroadenosine
  modified_base 15: mod_base = OTHER; note = 2'-Omethyladenosine
  modified_base 16: mod_base = OTHER; note = 2'-fluorouridine
  modified_base 23: mod_base = OTHER; note = Cytosine phosphorothiorate
  modified_base 24: mod_base = OTHER; note = 2'-Omethylguanosine phosphorothiorate
  modified_base 25: mod_base = OTHER; note = 2'-Omethylcytosine
  modified_base 27: mod_base = OTHER; note = Uridine phosphorothiorate
  modified_base 28: mod_base = OTHER; note = 2'-fluorouridine
  modified_base 29: mod_base = OTHER; note = Guanosine phosphorothiorate
  modified_base 30: mod_base = OTHER; note = 2'-fluoroguanosine
  modified_base 31: mod_base = OTHER; note = 2'-fluoroadenosine
  modified_base 32: mod_base = OTHER; note = 2'-fluorocytosine
  modified_base 33: mod_base = OTHER; note = 2'-fluorouridine
  modified_base 34: mod_base = OTHER; note = 2'-fluorouridine
  modified_base 40: mod_base = OTHER; note = 2'-Omethyluridine phosphorothiorate
  modified_base 41: mod_base = OTHER; note = 2'-Omethylcytosine
  modified_base 44: mod_base = OTHER; note = 2'-Omethyladenosine
  modified_base 45: mod_base = OTHER; note = 2'-Omethylguanosine
  modified_base 46: mod_base = OTHER; note = 2'-fluoroguanosine
  modified_base 47: mod_base = OTHER; note = Uridine phosphorothiorate
  modified_base 49: mod_base = OTHER; note = 2'-fluorocytosine
  modified_base 50: mod_base = OTHER; note = 2'-Omethylcytosine
  modified_base 52: mod_base = OTHER; note = Guanosine phosphorothiorate
  modified_base 53: mod_base = OTHER; note = 2'-Omethylguanosine
  modified_base 56: mod_base = OTHER; note = 2'-Omethylcytosine
  modified_base 59: mod_base = OTHER; note = 2'-fluoroguanosine phosphorothiorate
  modified_base 60: mod_base = OTHER; note = 2'-Omethyluridine
  modified_base 61: mod_base = OTHER; note = Cytosine phosphorothiorate
  modified_base 64: mod_base = OTHER; note = Guanosine phosphorothiorate
  modified_base 65: mod_base = OTHER; note = 2'-Omethylguanosine phosphorothiorate
  modified_base 68: mod_base = OTHER; note = Guanosine phosphorothiorate
  modified_base 69: mod_base = OTHER; note = 2'-fluoroadenosine

SEQ ID NO: 2478 - RNA, 76 nt, synthetic construct; identical to SEQ ID NO: 625
  source 1..76: mol_type = other RNA
  modified_base 1: mod_base = OTHER; note = 2'-Omethylguanosine
  modified_base 5: mod_base = OTHER; note = 2'-fluorocytosine
  modified_base 6: mod_base = OTHER; note = 2'-Omethylcytosine
  modified_base 7: mod_base = OTHER; note = Guanosine phosphorothiorate
  modified_base 10: mod_base = OTHER; note = 2'-fluoroguanosine
  modified_base 13: mod_base = OTHER; note = 2'-fluorocytosine
  modified_base 14: mod_base = OTHER; note = 2'-fluoroadenosine
  modified_base 16: mod_base = OTHER; note = 2'-fluorouridine
  modified_base 22: mod_base = OTHER; note = 2'-Omethylguanosine
  modified_base 23: mod_base = OTHER; note = 2'-fluorocytosine
  modified_base 25: mod_base = OTHER; note = 2'-Omethylcytosine
  modified_base 27: mod_base = OTHER; note = 2'-fluorouridine phosphorothiorate
  modified_base 28: mod_base = OTHER; note = 2'-fluorouridine
  modified_base 30: mod_base = OTHER; note = 2'-fluoroguanosine
  modified_base 33: mod_base = OTHER; note = Uridine phosphorothiorate
  modified_base 38: mod_base = OTHER; note = 2'-fluoroadenosine
  modified_base 40: mod_base = OTHER; note = Uridine phosphorothiorate
  modified_base 42: mod_base = OTHER; note = 2'-Omethyladenosine
  modified_base 43: mod_base = OTHER; note = Adenosine phosphorothiorate
  modified_base 45: mod_base = OTHER; note = 2'-Omethylguanosine
  modified_base 46: mod_base = OTHER; note = 2'-fluoroguanosine phosphorothiorate
  modified_base 47: mod_base = OTHER; note = 2'-fluorouridine
  modified_base 52: mod_base = OTHER; note = Guanosine phosphorothiorate
  modified_base 53: mod_base = OTHER; note = 2'-Omethylguanosine
  modified_base 56: mod_base = OTHER; note = 2'-Omethylcytosine
  modified_base 58: mod_base = OTHER; note = Adenosine phosphorothiorate
  modified_base 59: mod_base = OTHER; note = 2'-fluoroguanosine
  modified_base 62: mod_base = OTHER; note = 2'-Omethylcytosine
  modified_base 63: mod_base = OTHER; note = Cytosine phosphorothiorate
  modified_base 65: mod_base = OTHER; note = 2'-fluoroguanosine
  modified_base 66: mod_base = OTHER; note = Cytosine phosphorothiorate
  modified_base 67: mod_base = OTHER; note = 2'-fluoroguanosine
  modified_base 68: mod_base = OTHER; note = Guanosine phosphorothiorate
  modified_base 70: mod_base = OTHER; note = 2'-Omethylguanosine phosphorothiorate
  modified_base 71: mod_base = OTHER; note = 2'-fluorouridine
  modified_base 73: mod_base = OTHER; note = 2'-fluoroguanosine
  modified_base 74: mod_base = OTHER; note = 2'-fluorocytosine
  modified_base 75: mod_base = OTHER; note = Cytosine phosphorothiorate

SEQ ID NO: 2479 - RNA, 76 nt, synthetic construct; identical to SEQ ID NO: 625
  source 1..76: mol_type = other RNA
  modified_base 1: mod_base = OTHER; note = 2'-Omethylguanosine
  modified_base 2: mod_base = OTHER; note = 2'-fluoroguanosine
  modified_base 6: mod_base = OTHER; note = 2'-Omethylcytosine
  modified_base 8: mod_base = OTHER; note = Uridine phosphorothiorate
  modified_base 13: mod_base = OTHER; note = 2'-Omethylcytosine
  modified_base 14: mod_base = OTHER; note = 2'-fluoroadenosine
  modified_base 17: mod_base = OTHER; note = 2'-Omethylguanosine
  modified_base 18: mod_base = OTHER; note = 2'-fluoroguanosine
  modified_base 22: mod_base = OTHER; note = 2'-Omethylguanosine
  modified_base 23: mod_base = OTHER; note = Cytosine phosphorothiorate
  modified_base 24: mod_base = OTHER; note = 2'-Omethylguanosine
  modified_base 26: mod_base = OTHER; note = 2'-Omethyladenosine
  modified_base 27: mod_base = OTHER; note = 2'-fluorouridine
  modified_base 29: mod_base = OTHER; note = Guanosine phosphorothiorate
  modified_base 30: mod_base = OTHER; note = 2'-fluoroguanosine
  modified_base 31: mod_base = OTHER; note = 2'-Omethyladenosine
  modified_base 36: mod_base = OTHER; note = Adenosine phosphorothiorate
  modified_base 38: mod_base = OTHER; note = Adenosine phosphorothiorate
  modified_base 39: mod_base = OTHER; note = 2'-fluorouridine
  modified_base 40: mod_base = OTHER; note = 2'-fluorouridine
  modified_base 42: mod_base = OTHER; note = 2'-Omethyladenosine
  modified_base 44: mod_base = OTHER; note = 2'-fluoroadenosine
  modified_base 46: mod_base = OTHER; note = 2'-Omethylguanosine
  modified_base 47: mod_base = OTHER; note = 2'-Omethyluridine
  modified_base 49: mod_base = OTHER; note = 2'-Omethylcytosine
  modified_base 52: mod_base = OTHER; note = Guanosine phosphorothiorate
  modified_base 53: mod_base = OTHER; note = 2'-fluoroguanosine
  modified_base 59: mod_base = OTHER; note = 2'-fluoroguanosine
  modified_base 60: mod_base = OTHER; note = 2'-fluorouridine
  modified_base 61: mod_base = OTHER; note = Cytosine phosphorothiorate
  modified_base 62: mod_base = OTHER; note = 2'-fluorocytosine
  modified_base 63: mod_base = OTHER; note = 2'-fluorocytosine
  modified_base 64: mod_base = OTHER; note = 2'-fluoroguanosine
  modified_base 66: mod_base = OTHER; note = Cytosine phosphorothiorate
  modified_base 67: mod_base = OTHER; note = 2'-Omethylguanosine
  modified_base 69: mod_base = OTHER; note = Adenosine phosphorothiorate
  modified_base 70: mod_base = OTHER; note = 2'-Omethylguanosine
  modified_base 72: mod_base = OTHER; note = 2'-fluorocytosine phosphorothiorate
  modified_base 73: mod_base = OTHER; note = 2'-Omethylguanosine
  modified_base 74: mod_base = OTHER; note = Cytosine phosphorothiorate

SEQ ID NO: 2480 - RNA, 76 nt, synthetic construct; identical to SEQ ID NO: 625
  source 1..76: mol_type = other RNA
  modified_base 2: mod_base = OTHER; note = 2'-Omethylguanosine
  modified_base 4: mod_base = OTHER; note = Uridine phosphorothiorate
  modified_base 5: mod_base = OTHER; note = 2'-Omethylcytosine
  modified_base 7: mod_base = OTHER; note = Guanosine phosphorothiorate
  modified_base 10: mod_base = OTHER; note = 2'-fluoroguanosine
  modified_base 13: mod_base = OTHER; note = 2'-fluorocytosine
  modified_base 16: mod_base = OTHER; note = 2'-Omethyluridine
  modified_base 18: mod_base = OTHER; note = 2'-fluoroguanosine
  modified_base 22: mod_base = OTHER; note = Guanosine phosphorothiorate
  modified_base 23: mod_base = OTHER; note = 2'-fluorocytosine
  modified_base 25: mod_base = OTHER; note = 2'-fluorocytosine
  modified_base 29: mod_base = OTHER; note = 2'-fluoroguanosine
  modified_base 30: mod_base = OTHER; note = 2'-fluoroguanosine
  modified_base 32: mod_base = OTHER; note = 2'-fluorocytosine
  modified_base 36: mod_base = OTHER; note = Adenosine phosphorothiorate
  modified_base 40: mod_base = OTHER; note = 2'-Omethyluridine
  modified_base 42: mod_base = OTHER; note = Adenosine phosphorothiorate
  modified_base 43: mod_base = OTHER; note = 2'-Omethyladenosine phosphorothiorate
  modified_base 44: mod_base = OTHER; note = Adenosine phosphorothiorate
  modified_base 49: mod_base = OTHER; note = 2'-fluorocytosine
  modified_base 50: mod_base = OTHER; note = 2'-Omethylcytosine
  modified_base 54: mod_base = OTHER; note = 2'-Omethyluridine
  modified_base 57: mod_base = OTHER; note = 2'-Omethylguanosine phosphorothiorate
  modified_base 59: mod_base = OTHER; note = 2'-fluoroguanosine
  modified_base 60: mod_base = OTHER; note = 2'-Omethyluridine
  modified_base 61: mod_base = OTHER; note = Cytosine phosphorothiorate
  modified_base 63: mod_base = OTHER; note = 2'-fluorocytosine
  modified_base 64: mod_base = OTHER; note = 2'-fluoroguanosine phosphorothiorate
  modified_base 65: mod_base = OTHER; note = 2'-Omethylguanosine
  modified_base 69: mod_base = OTHER; note = 2'-Omethyladenosine
  modified_base 71: mod_base = OTHER; note = 2'-Omethyluridine
  modified_base 72: mod_base = OTHER; note = 2'-Omethylcytosine
  modified_base 75: mod_base = OTHER; note = Cytosine phosphorothiorate

SEQ ID NO: 2481 - RNA, 76 nt, synthetic construct; identical to SEQ ID NO: 625
  source 1..76: mol_type = other RNA
  modified_base 2: mod_base = OTHER; note = Guanosine phosphorothiorate
  modified_base 3: mod_base = OTHER; note = 2'-fluorocytosine phosphorothiorate
  modified_base 5: mod_base = OTHER; note = Cytosine phosphorothiorate
  modified_base 6: mod_base = OTHER; note = 2'-Omethylcytosine
  modified_base 11: mod_base = OTHER; note = 2'-Omethylcytosine
  modified_base 12: mod_base = OTHER; note = 2'-Omethylguanosine
  modified_base 13: mod_base = OTHER; note = Cytosine phosphorothiorate
  modified_base 14: mod_base = OTHER; note = 2'-Omethyladenosine
  modified_base 15: mod_base = OTHER; note = Adenosine phosphorothiorate
  modified_base 16: mod_base = OTHER; note = 2'-Omethyluridine
  modified_base 17: mod_base = OTHER; note = Guanosine phosphorothiorate
  modified_base 20: mod_base = OTHER; note = 2'-fluorouridine
  modified_base 22: mod_base = OTHER; note = 2'-Omethylguanosine phosphorothiorate
  modified_base 23: mod_base = OTHER; note = 2'-Omethylcytosine
  modified_base 27: mod_base = OTHER; note = Uridine phosphorothiorate
  modified_base 31: mod_base = OTHER; note = 2'-fluoroadenosine
  modified_base 38: mod_base = OTHER; note = 2'-fluoroadenosine
  modified_base 40: mod_base = OTHER; note = Uridine phosphorothiorate
  modified_base 45: mod_base = OTHER; note = Guanosine phosphorothiorate
  modified_base 46: mod_base = OTHER; note = 2'-fluoroguanosine
  modified_base 47: mod_base = OTHER; note = 2'-Omethyluridine
  modified_base 48: mod_base = OTHER; note = 2'-Omethyluridine phosphorothiorate
  modified_base 50: mod_base = OTHER; note = 2'-Omethylcytosine
  modified_base 51: mod_base = OTHER; note = 2'-Omethylguanosine
  modified_base 53: mod_base = OTHER; note = 2'-fluoroguanosine
  modified_base 59: mod_base = OTHER; note = Guanosine phosphorothiorate
  modified_base 61: mod_base = OTHER; note = 2'-Omethylcytosine phosphorothiorate
  modified_base 64: mod_base = OTHER; note = Guanosine phosphorothiorate
  modified_base 65: mod_base = OTHER; note = 2'-Omethylguanosine phosphorothiorate
  modified_base 67: mod_base = OTHER; note = 2'-fluoroguanosine
  modified_base 68: mod_base = OTHER; note = Guanosine phosphorothiorate
  modified_base 69: mod_base = OTHER; note = Adenosine phosphorothiorate
  modified_base 70: mod_base = OTHER; note = 2'-fluoroguanosine
  modified_base 71: mod_base = OTHER; note = 2'-fluorouridine
  modified_base 72: mod_base = OTHER; note = 2'-fluorocytosine
  modified_base 74: mod_base = OTHER; note = 2'-fluorocytosine
  modified_base 75: mod_base = OTHER; note = 2'-Omethylcytosine

SEQ ID NO: 2482 - RNA, 76 nt, synthetic construct; identical to SEQ ID NO: 625
  source 1..76: mol_type = other RNA
  modified_base 3: mod_base = OTHER; note = 2'-fluorocytosine
  modified_base 5: mod_base = OTHER; note = 2'-Omethylcytosine phosphorothiorate
  modified_base 7: mod_base = OTHER; note = Guanosine phosphorothiorate
  modified_base 8: mod_base = OTHER; note = Uridine phosphorothiorate
  modified_base 11: mod_base = OTHER; note = Cytosine phosphorothiorate
  modified_base 12: mod_base = OTHER; note = 2'-Omethylguanosine
  modified_base 15: mod_base = OTHER; note = Adenosine phosphorothiorate
  modified_base 16: mod_base = OTHER; note = 2'-Omethyluridine
  modified_base 17: mod_base = OTHER; note = Guanosine phosphorothiorate
  modified_base 18: mod_base = OTHER; note = 2'-fluoroguanosine
  modified_base 24: mod_base = OTHER; note = 2'-Omethylguanosine
  modified_base 25: mod_base = OTHER; note = Cytosine phosphorothiorate
  modified_base 26: mod_base = OTHER; note = 2'-Omethyladenosine
  modified_base 28: mod_base = OTHER; note = 2'-fluorouridine
  modified_base 30: mod_base = OTHER; note = 2'-fluoroguanosine
  modified_base 31: mod_base = OTHER; note = 2'-Omethyladenosine
  modified_base 33: mod_base = OTHER; note = Uridine phosphorothiorate
  modified_base 34: mod_base = OTHER; note = 2'-Omethyluridine
  modified_base 38: mod_base = OTHER; note = 2'-fluoroadenosine
  modified_base 39: mod_base = OTHER; note = 2'-fluorouridine
  modified_base 43: mod_base = OTHER; note = Adenosine phosphorothiorate
  modified_base 44: mod_base = OTHER; note = 2'-fluoroadenosine
  modified_base 46: mod_base = OTHER; note = Guanosine phosphorothiorate
  modified_base 47: mod_base = OTHER; note = 2'-Omethyluridine
  modified_base 52: mod_base = OTHER; note = 2'-fluoroguanosine
  modified_base 53: mod_base = OTHER; note = 2'-Omethylguanosine
  modified_base 54: mod_base = OTHER; note = 2'-fluorouridine
  modified_base 58: mod_base = OTHER; note = 2'-fluoroadenosine phosphorothiorate
  modified_base 59: mod_base = OTHER; note = 2'-fluoroguanosine
  modified_base 61: mod_base = OTHER; note = Cytosine phosphorothiorate
  modified_base 62: mod_base = OTHER; note = 2'-Omethylcytosine
  modified_base 63: mod_base = OTHER; note = Cytosine phosphorothiorate
  modified_base 65: mod_base = OTHER; note = 2'-Omethylguanosine
  modified_base 66: mod_base = OTHER; note = Cytosine phosphorothiorate
  modified_base 67: mod_base = OTHER; note = Guanosine phosphorothiorate
  modified_base 68: mod_base = OTHER; note = 2'-fluoroguanosine
  modified_base 69: mod_base = OTHER; note = 2'-fluoroadenosine
  modified_base 70: mod_base = OTHER; note = 2'-Omethylguanosine phosphorothiorate
  modified_base 71: mod_base = OTHER; note = 2'-fluorouridine
  modified_base 73: mod_base = OTHER; note = 2'-Omethylguanosine
  modified_base 74: mod_base = OTHER; note = 2'-Omethylcytosine
  modified_base 75: mod_base = OTHER; note = 2'-fluorocytosine

SEQ ID NO: 2483 - RNA, 76 nt, synthetic construct; identical to SEQ ID NO: 625
  source 1..76: mol_type = other RNA
  modified_base 3: mod_base = OTHER; note = Cytosine phosphorothiorate
  modified_base 5: mod_base = OTHER; note = 2'-Omethylcytosine
  modified_base 6: mod_base = OTHER; note = Cytosine phosphorothiorate
  modified_base 7: mod_base = OTHER; note = Guanosine phosphorothiorate
  modified_base 12: mod_base = OTHER; note = 2'-Omethylguanosine
  modified_base 16: mod_base = OTHER; note = 2'-fluorouridine phosphorothiorate
  modified_base 17: mod_base = OTHER; note = 2'-Omethylguanosine
  modified_base 18: mod_base = OTHER; note = 2'-Omethylguanosine
  modified_base 20: mod_base = OTHER; note = 2'-fluorouridine
  modified_base 27: mod_base = OTHER; note = Uridine phosphorothiorate
  modified_base 29: mod_base = OTHER; note = Guanosine phosphorothiorate
  modified_base 30: mod_base = OTHER; note = 2'-Omethylguanosine
  modified_base 34: mod_base = OTHER; note = 2'-Omethyluridine
  modified_base 38: mod_base = OTHER; note = 2'-fluoroadenosine
  modified_base 39: mod_base = OTHER; note = 2'-fluorouridine
  modified_base 41: mod_base = OTHER; note = Cytosine phosphorothiorate
  modified_base 42: mod_base = OTHER; note = 2'-Omethyladenosine
  modified_base 44: mod_base = OTHER; note = Adenosine phosphorothiorate
  modified_base 45: mod_base = OTHER; note = Guanosine phosphorothiorate
  modified_base 49: mod_base = OTHER; note = 2'-Omethylcytosine
  modified_base 50: mod_base = OTHER; note = 2'-fluorocytosine
  modified_base 51: mod_base = OTHER; note = 2'-Omethylguanosine phosphorothiorate
  modified_base 52: mod_base = OTHER; note = 2'-fluoroguanosine
  modified_base 53: mod_base = OTHER; note = 2'-Omethylguanosine phosphorothiorate
  modified_base 54: mod_base = OTHER; note = 2'-Omethyluridine
  modified_base 56: mod_base = OTHER; note = 2'-Omethylcytosine
  modified_base 57: mod_base = OTHER; note = 2'-fluoroguanosine
  modified_base 58: mod_base = OTHER; note = Adenosine phosphorothiorate
  modified_base 59: mod_base = OTHER; note = 2'-Omethylguanosine
  modified_base 61: mod_base = OTHER; note = Cytosine phosphorothiorate
  modified_base 62: mod_base = OTHER; note = 2'-fluorocytosine
  modified_base 64: mod_base = OTHER; note = 2'-fluoroguanosine
  modified_base 65: mod_base = OTHER; note = 2'-fluoroguanosine
  modified_base 68: mod_base = OTHER; note = 2'-Omethylguanosine
  modified_base 71: mod_base = OTHER; note = Uridine phosphorothiorate
  modified_base 72: mod_base = OTHER; note = Cytosine phosphorothiorate
  modified_base 73: mod_base = OTHER; note = 2'-Omethylguanosine
  modified_base 74: mod_base = OTHER; note = 2'-fluorocytosine phosphorothiorate
  modified_base 75: mod_base = OTHER; note = 2'-fluorocytosine

SEQ ID NO: 2484 - RNA, 76 nt, synthetic construct; identical to SEQ ID NO: 625
  source 1..76: mol_type = other RNA
  modified_base 3: mod_base = OTHER; note = 2'-Omethylcytosine
  modified_base 4: mod_base = OTHER; note = 2'-Omethyluridine
  modified_base 5: mod_base = OTHER; note = 2'-Omethylcytosine
  modified_base 6: mod_base = OTHER; note = 2'-fluorocytosine
  modified_base 11: mod_base = OTHER; note = 2'-fluorocytosine
  modified_base 12: mod_base = OTHER; note = 2'-Omethylguanosine
  modified_base 14: mod_base = OTHER; note = 2'-Omethyladenosine phosphorothiorate
  modified_base 15: mod_base = OTHER; note = Adenosine phosphorothiorate
  modified_base 16: mod_base = OTHER; note = 2'-fluorouridine
  modified_base 23: mod_base = OTHER; note = 2'-fluorocytosine
  modified_base 24: mod_base = OTHER; note = 2'-Omethylguanosine
  modified_base 25: mod_base = OTHER; note = 2'-fluorocytosine
  modified_base 28: mod_base = OTHER; note = 2'-Omethyluridine
  modified_base 32: mod_base = OTHER; note = 2'-fluorocytosine
  modified_base 33: mod_base = OTHER; note = 2'-fluorouridine
  modified_base 41: mod_base = OTHER; note = 2'-fluorocytosine
  modified_base 42: mod_base = OTHER; note = 2'-Omethyladenosine
  modified_base 45: mod_base = OTHER; note = 2'-Omethylguanosine
  modified_base 46: mod_base = OTHER; note = Guanosine phosphorothiorate
  modified_base 49: mod_base = OTHER; note = Cytosine phosphorothiorate
  modified_base 50: mod_base = OTHER; note = 2'-Omethylcytosine
  modified_base 52: mod_base = OTHER; note = Guanosine phosphorothiorate
  modified_base 53: mod_base = OTHER; note = 2'-Omethylguanosine
  modified_base 54: mod_base = OTHER; note = Uridine phosphorothiorate
  modified_base 58: mod_base = OTHER; note = Adenosine phosphorothiorate
  modified_base 59: mod_base = OTHER; note = 2'-Omethylguanosine
  modified_base 60: mod_base = OTHER; note = Uridine phosphorothiorate
  modified_base 61: mod_base = OTHER; note = 2'-fluorocytosine
  modified_base 64: mod_base = OTHER; note = 2'-fluoroguanosine
  modified_base 67: mod_base = OTHER; note = 2'-Omethylguanosine
  modified_base 68: mod_base = OTHER; note = 2'-fluoroguanosine
  modified_base 69: mod_base = OTHER; note = 2'-fluoroadenosine
  modified_base 71: mod_base = OTHER; note = Uridine phosphorothiorate
  modified_base 72: mod_base = OTHER; note = 2'-fluorocytosine
  modified_base 74: mod_base = OTHER; note = Cytosine phosphorothiorate
  modified_base 75: mod_base = OTHER; note = 2'-Omethylcytosine phosphorothiorate
  modified_base 76: mod_base = OTHER; note = 2'-fluoroadenosine

SEQ ID NO: 2485 - RNA, 76 nt, synthetic construct; identical to SEQ ID NO: 625
  source 1..76: mol_type = other RNA
  modified_base 1: mod_base = OTHER; note = Guanosine phosphorothiorate
  modified_base 3: mod_base = OTHER; note = 2'-fluorocytosine
  modified_base 5: mod_base = OTHER; note = 2'-Omethylcytosine
  modified_base 9: mod_base = OTHER; note = Guanosine phosphorothiorate
  modified_base 10: mod_base = OTHER; note = 2'-fluoroguanosine
  modified_base 11: mod_base = OTHER; note = 2'-fluorocytosine
  modified_base 12: mod_base = OTHER; note = 2'-fluoroguanosine phosphorothiorate
  modified_base 15: mod_base = OTHER; note = 2'-fluoroadenosine
  modified_base 16: mod_base = OTHER; note = 2'-Omethyluridine
  modified_base 17: mod_base = OTHER; note = 2'-Omethylguanosine
  modified_base 19: mod_base = OTHER; note = Adenosine phosphorothiorate
  modified_base 24: mod_base = OTHER; note = Guanosine phosphorothiorate
  modified_base 26: mod_base = OTHER; note = Adenosine phosphorothiorate
  modified_base 27: mod_base = OTHER; note = 2'-Omethyluridine phosphorothiorate
  modified_base 28: mod_base = OTHER; note = 2'-fluorouridine
  modified_base 29: mod_base = OTHER; note = Guanosine phosphorothiorate
  modified_base 31: mod_base = OTHER; note = 2'-fluoroadenosine
  modified_base 33: mod_base = OTHER; note = 2'-fluorouridine
  modified_base 40: mod_base = OTHER; note = 2'-fluorouridine
  modified_base 41: mod_base = OTHER; note = Cytosine phosphorothiorate
  modified_base 42: mod_base = OTHER; note = Adenosine phosphorothiorate
  modified_base 44: mod_base = OTHER; note = Adenosine phosphorothiorate
  modified_base 45: mod_base = OTHER; note = 2'-Omethylguanosine
  modified_base 47: mod_base = OTHER; note = 2'-Omethyluridine
  modified_base 48: mod_base = OTHER; note = 2'-Omethyluridine
  modified_base 50: mod_base = OTHER; note = 2'-fluorocytosine phosphorothiorate
  modified_base 51: mod_base = OTHER; note = Guanosine phosphorothiorate
  modified_base 52: mod_base = OTHER; note = 2'-Omethylguanosine
  modified_base 55: mod_base = OTHER; note = Uridine phosphorothiorate
  modified_base 56: mod_base = OTHER; note = 2'-fluorocytosine
  modified_base 57: mod_base = OTHER; note = 2'-fluoroguanosine
  modified_base 66: mod_base = OTHER; note = 2'-fluorocytosine
  modified_base 67: mod_base = OTHER; note = 2'-Omethylguanosine
  modified_base 68: mod_base = OTHER; note = 2'-Omethylguanosine
  modified_base 70: mod_base = OTHER; note = 2'-fluoroguanosine
  modified_base 72: mod_base = OTHER; note = 2'-fluorocytosine
  modified_base 76: mod_base = OTHER; note = 2'-Omethyladenosine

SEQ ID NO: 2486 - RNA, 76 nt, synthetic construct; identical to SEQ ID NO: 625
  source 1..76: mol_type = other RNA
  modified_base 2: mod_base = OTHER; note = 2'-Omethylguanosine
  modified_base 3: mod_base = OTHER; note = 2'-Omethylcytosine
  modified_base 4: mod_base = OTHER; note = 2'-fluorouridine
  modified_base 6: mod_base = OTHER; note = Cytosine phosphorothiorate
  modified_base 13: mod_base = OTHER; note = 2'-Omethylcytosine phosphorothiorate
  modified_base 14: mod_base = OTHER; note = 2'-fluoroadenosine
  modified_base 22: mod_base = OTHER; note = 2'-fluoroguanosine
  modified_base 23: mod_base = OTHER; note = 2'-fluorocytosine phosphorothiorate
  modified_base 24: mod_base = OTHER; note = 2'-Omethylguanosine
  modified_base 27: mod_base = OTHER; note = 2'-fluorouridine phosphorothiorate
  modified_base 28: mod_base = OTHER; note = 2'-Omethyluridine
  modified_base 29: mod_base = OTHER; note = 2'-Omethylguanosine
  modified_base 34: mod_base = OTHER; note = 2'-Omethyluridine phosphorothiorate
  modified_base 37: mod_base = OTHER; note = Adenosine phosphorothiorate
  modified_base 38: mod_base = OTHER; note = 2'-fluoroadenosine
  modified_base 39: mod_base = OTHER; note = Uridine phosphorothiorate
  modified_base 40: mod_base = OTHER; note = 2'-Omethyluridine
  modified_base 41: mod_base = OTHER; note = 2'-fluorocytosine
  modified_base 43: mod_base = OTHER; note = 2'-fluoroadenosine
  modified_base 44: mod_base = OTHER; note = Adenosine phosphorothiorate
  modified_base 45: mod_base = OTHER; note = 2'-fluoroguanosine
  modified_base 48: mod_base = OTHER; note = 2'-Omethyluridine
  modified_base 51: mod_base = OTHER; note = 2'-Omethylguanosine
  modified_base 54: mod_base = OTHER; note = Uridine phosphorothiorate
  modified_base 58: mod_base = OTHER; note = 2'-fluoroadenosine
  modified_base 59: mod_base = OTHER; note = 2'-Omethylguanosine
  modified_base 61: mod_base = OTHER; note = 2'-fluorocytosine
  modified_base 62: mod_base = OTHER; note = 2'-fluorocytosine phosphorothiorate
  modified_base 64: mod_base = OTHER; note = 2'-Omethylguanosine
  modified_base 67: mod_base = OTHER; note = 2'-Omethylguanosine
  modified_base 68: mod_base = OTHER; note = 2'-fluoroguanosine
  modified_base 70: mod_base = OTHER; note = 2'-fluoroguanosine
  modified_base 71: mod_base = OTHER; note = 2'-Omethyluridine
  modified_base 72: mod_base = OTHER; note = 2'-Omethylcytosine phosphorothiorate
  modified_base 74: mod_base = OTHER; note = 2'-Omethylcytosine

SEQ ID NO: 2487 - RNA, 76 nt, synthetic construct; identical to SEQ ID NO: 625
  source 1..76: mol_type = other RNA
  modified_base 1: mod_base = OTHER; note = 2'-fluoroguanosine
  modified_base 2: mod_base = OTHER; note = Guanosine phosphorothiorate
  modified_base 3: mod_base = OTHER; note = 2'-Omethylcytosine
  modified_base 8: mod_base = OTHER; note = Uridine phosphorothiorate
  modified_base 12: mod_base = OTHER; note = 2'-fluoroguanosine
  modified_base 16: mod_base = OTHER; note = 2'-fluorouridine
  modified_base 17: mod_base = OTHER; note = Guanosine phosphorothiorate
  modified_base 18: mod_base = OTHER; note = 2'-Omethylguanosine phosphorothiorate
  modified_base 25: mod_base = OTHER; note = 2'-Omethylcytosine
  modified_base 26: mod_base = OTHER; note = 2'-fluoroadenosine phosphorothiorate
  modified_base 28: mod_base = OTHER; note = Uridine phosphorothiorate
  modified_base 29: mod_base = OTHER; note = 2'-fluoroguanosine
  modified_base 31: mod_base = OTHER; note = 2'-fluoroadenosine
  modified_base 33: mod_base = OTHER; note = 2'-fluorouridine
  modified_base 34: mod_base = OTHER; note = 2'-Omethyluridine
  modified_base 39: mod_base = OTHER; note = 2'-Omethyluridine phosphorothiorate
  modified_base 40: mod_base = OTHER; note = 2'-fluorouridine
  modified_base 41: mod_base = OTHER; note = 2'-Omethylcytosine
  modified_base 45: mod_base = OTHER; note = Guanosine phosphorothiorate
  modified_base 48: mod_base = OTHER; note = Uridine phosphorothiorate
  modified_base 50: mod_base = OTHER; note = 2'-Omethylcytosine
  modified_base 51: mod_base = OTHER; note = 2'-Omethylguanosine phosphorothiorate
  modified_base 52: mod_base = OTHER; note = 2'-fluoroguanosine
  modified_base 53: mod_base = OTHER; note = 2'-fluoroguanosine
  modified_base 58: mod_base = OTHER; note = Adenosine phosphorothiorate
  modified_base 59: mod_base = OTHER; note = 2'-fluoroguanosine
  modified_base 60: mod_base = OTHER; note = 2'-Omethyluridine
  modified_base 61: mod_base = OTHER; note = 2'-Omethylcytosine
  modified_base 62: mod_base = OTHER; note = 2'-fluorocytosine
  modified_base 63: mod_base = OTHER; note = 2'-fluorocytosine
  modified_base 66: mod_base = OTHER; note = 2'-fluorocytosine phosphorothiorate
  modified_base 67: mod_base = OTHER; note = 2'-Omethylguanosine phosphorothiorate
  modified_base 68: mod_base = OTHER; note = 2'-fluoroguanosine phosphorothiorate
  modified_base 69: mod_base = OTHER; note = 2'-fluoroadenosine
  modified_base 70: mod_base = OTHER; note = 2'-fluoroguanosine
  modified_base 71: mod_base = OTHER; note = 2'-Omethyluridine

SEQ ID NO: 2488 - RNA, 76 nt, synthetic construct; identical to SEQ ID NO: 625
  source 1..76: mol_type = other RNA
  modified_base 2: mod_base = OTHER; note = 2'-fluoroguanosine
  modified_base 3: mod_base = OTHER; note = 2'-fluorocytosine
  modified_base 10: mod_base = OTHER; note = 2'-Omethylguanosine
  modified_base 11: mod_base = OTHER; note = 2'-fluorocytosine
  modified_base 15: mod_base = OTHER; note = 2'-fluoroadenosine
  modified_base 16: mod_base = OTHER; note = 2'-fluorouridine
  modified_base 20: mod_base = OTHER; note = 2'-Omethyluridine phosphorothiorate
  modified_base 22: mod_base = OTHER; note = 2'-Omethylguanosine
  modified_base 24: mod_base = OTHER; note = 2'-fluoroguanosine
  modified_base 26: mod_base = OTHER; note = 2'-Omethyladenosine phosphorothiorate
  modified_base 27: mod_base = OTHER; note = 2'-fluorouridine
  modified_base 28: mod_base = OTHER; note = 2'-Omethyluridine
  modified_base 31: mod_base = OTHER; note = 2'-Omethyladenosine
  modified_base 32: mod_base = OTHER; note = 2'-fluorocytosine
  modified_base 33: mod_base = OTHER; note = 2'-fluorouridine
  modified_base 39: mod_base = OTHER; note = 2'-Omethyluridine
  modified_base 41: mod_base = OTHER; note = Cytosine phosphorothiorate
  modified_base 42: mod_base = OTHER; note = 2'-Omethyladenosine phosphorothiorate
  modified_base 43: mod_base = OTHER; note = 2'-Omethyladenosine phosphorothiorate
  modified_base 44: mod_base = OTHER; note = 2'-Omethyladenosine phosphorothiorate
  modified_base 45: mod_base = OTHER; note = 2'-Omethylguanosine
  modified_base 51: mod_base = OTHER; note = Guanosine phosphorothiorate
  modified_base 52: mod_base = OTHER; note = 2'-fluoroguanosine
  modified_base 56: mod_base = OTHER; note = 2'-Omethylcytosine
  modified_base 57: mod_base = OTHER; note = 2'-Omethylguanosine phosphorothiorate
  modified_base 61: mod_base = OTHER; note = 2'-Omethylcytosine phosphorothiorate
  modified_base 62: mod_base = OTHER; note = 2'-fluorocytosine
  modified_base 65: mod_base = OTHER; note = 2'-Omethylguanosine
  modified_base 67: mod_base = OTHER; note = Guanosine phosphorothiorate
  modified_base 68: mod_base = OTHER; note = 2'-Omethylguanosine
  modified_base 69: mod_base = OTHER; note = Adenosine phosphorothiorate
  modified_base 73: mod_base = OTHER; note = 2'-fluoroguanosine
  modified_base 74: mod_base = OTHER; note = 2'-Omethylcytosine
  modified_base 75: mod_base = OTHER; note = 2'-fluorocytosine

SEQ ID NO: 2489 - RNA, 76 nt, synthetic construct; identical to SEQ ID NO: 625
  source 1..76: mol_type = other RNA
  modified_base 1: mod_base = OTHER; note = 2'-fluoroguanosine
  modified_base 3: mod_base = OTHER; note = 2'-Omethylcytosine
  modified_base 5: mod_base = OTHER; note = 2'-Omethylcytosine
  modified_base 6: mod_base = OTHER; note = Cytosine phosphorothiorate
  modified_base 7: mod_base = OTHER; note = Guanosine phosphorothiorate
  modified_base 12: mod_base = OTHER; note = 2'-Omethylguanosine
  modified_base 13: mod_base = OTHER; note = 2'-Omethylcytosine
  modified_base 17: mod_base = OTHER; note = Guanosine phosphorothiorate
  modified_base 18: mod_base = OTHER; note = 2'-Omethylguanosine
  modified_base 20: mod_base = OTHER; note = Uridine phosphorothiorate
  modified_base 25: mod_base = OTHER; note = 2'-fluorocytosine
  modified_base 26: mod_base = OTHER; note = 2'-fluoroadenosine
  modified_base 28: mod_base = OTHER; note = 2'-fluorouridine
  modified_base 29: mod_base = OTHER; note = 2'-Omethylguanosine
  modified_base 30: mod_base = OTHER; note = Guanosine phosphorothiorate
  modified_base 34: mod_base = OTHER; note = 2'-fluorouridine
  modified_base 37: mod_base = OTHER; note = Adenosine phosphorothiorate
  modified_base 38: mod_base = OTHER; note = 2'-Omethyladenosine phosphorothiorate
  modified_base 39: mod_base = OTHER; note = 2'-fluorouridine
  modified_base 40: mod_base = OTHER; note = 2'-Omethyluridine
  modified_base 41: mod_base = OTHER; note = 2'-fluorocytosine phosphorothiorate
  modified_base 42: mod_base = OTHER; note = 2'-fluoroadenosine
  modified_base 43: mod_base = OTHER; note = 2'-fluoroadenosine
  modified_base 44: mod_base = OTHER; note = 2'-fluoroadenosine
  modified_base 45: mod_base = OTHER; note = Guanosine phosphorothiorate
  modified_base 46: mod_base = OTHER; note = 2'-Omethylguanosine
  modified_base 51: mod_base = OTHER; note = Guanosine phosphorothiorate
  modified_base 52: mod_base = OTHER; note = Guanosine phosphorothiorate
  modified_base 57: mod_base = OTHER; note = 2'-fluoroguanosine
  modified_base 60: mod_base = OTHER; note = Uridine phosphorothiorate
  modified_base 61: mod_base = OTHER; note = 2'-Omethylcytosine
  modified_base 63: mod_base = OTHER; note = 2'-fluorocytosine
  modified_base 64: mod_base = OTHER; note = 2'-Omethylguanosine
  modified_base 66: mod_base = OTHER; note = 2'-fluorocytosine
  modified_base 69: mod_base = OTHER; note = 2'-Omethyladenosine
  modified_base 70: mod_base = OTHER; note = 2'-Omethylguanosine
  modified_base 73: mod_base = OTHER; note = 2'-fluoroguanosine
  modified_base 75: mod_base = OTHER; note = 2'-fluorocytosine
  modified_base 76: mod_base = OTHER; note = 2'-Omethyladenosine

SEQ ID NO: 2490 - RNA, 76 nt, synthetic construct; identical to SEQ ID NO: 625
  source 1..76: mol_type = other RNA
  modified_base 1: mod_base = OTHER; note = Guanosine phosphorothiorate
  modified_base 3: mod_base = OTHER; note = Cytosine phosphorothiorate
  modified_base 4: mod_base = OTHER; note = 2'-Omethyluridine
  modified_base 11: mod_base = OTHER; note = 2'-fluorocytosine phosphorothiorate
  modified_base 12: mod_base = OTHER; note = 2'-Omethylguanosine
  modified_base 14: mod_base = OTHER; note = 2'-Omethyladenosine phosphorothiorate
  modified_base 15: mod_base = OTHER; note = Adenosine phosphorothiorate
  modified_base 16: mod_base = OTHER; note = Uridine phosphorothiorate
  modified_base 21: mod_base = OTHER; note = Adenosine phosphorothiorate
  modified_base 22: mod_base = OTHER; note = 2'-fluoroguanosine phosphorothiorate
  modified_base 23: mod_base = OTHER; note = 2'-fluorocytosine
  modified_base 25: mod_base = OTHER; note = 2'-Omethylcytosine phosphorothiorate
  modified_base 31: mod_base = OTHER; note = 2'-Omethyladenosine
  modified_base 33: mod_base = OTHER; note = 2'-fluorouridine
  modified_base 34: mod_base = OTHER; note = 2'-fluorouridine
  modified_base 36: mod_base = OTHER; note = Adenosine phosphorothiorate
  modified_base 43: mod_base = OTHER; note = Adenosine phosphorothiorate
  modified_base 44: mod_base = OTHER; note = 2'-fluoroadenosine
  modified_base 46: mod_base = OTHER; note = Guanosine phosphorothiorate
  modified_base 47: mod_base = OTHER; note = 2'-fluorouridine
  modified_base 48: mod_base = OTHER; note = 2'-fluorouridine
  modified_base 49: mod_base = OTHER; note = 2'-fluorocytosine
  modified_base 52: mod_base = OTHER; note = Guanosine phosphorothiorate
  modified_base 53: mod_base = OTHER; note = 2'-Omethylguanosine phosphorothiorate
  modified_base 54: mod_base = OTHER; note = 2'-fluorouridine
  modified_base 59: mod_base = OTHER; note = 2'-Omethylguanosine phosphorothiorate
  modified_base 60: mod_base = OTHER; note = 2'-fluorouridine phosphorothiorate
  modified_base 61: mod_base = OTHER; note = Cytosine phosphorothiorate
  modified_base 63: mod_base = OTHER; note = 2'-Omethylcytosine
  modified_base 64: mod_base = OTHER; note = Guanosine phosphorothiorate
  modified_base 65: mod_base = OTHER; note = 2'-Omethylguanosine
  modified_base 67: mod_base = OTHER; note = 2'-Omethylguanosine
  modified_base 69: mod_base = OTHER; note = 2'-fluoroadenosine
  modified_base 74: mod_base = OTHER; note = 2'-fluorocytosine
  modified_base 75: mod_base = OTHER; note = 2'-fluorocytosine

SEQ ID NO: 2491 - RNA, 76 nt, synthetic construct; identical to SEQ ID NO: 625
  source 1..76: mol_type = other RNA
  modified_base 3: mod_base = OTHER; note = 2'-fluorocytosine
  modified_base 4: mod_base = OTHER; note = Uridine phosphorothiorate
  modified_base 6: mod_base = OTHER; note = 2'-Omethylcytosine
  modified_base 10: mod_base = OTHER; note = 2'-Omethylguanosine
  modified_base 11: mod_base = OTHER; note = 2'-fluorocytosine
  modified_base 12: mod_base = OTHER; note = Guanosine phosphorothiorate
  modified_base 13: mod_base = OTHER; note = 2'-fluorocytosine
  modified_base 14: mod_base = OTHER; note = 2'-Omethyladenosine phosphorothiorate
  modified_base 15: mod_base = OTHER; note = 2'-Omethyladenosine
  modified_base 22: mod_base = OTHER; note = 2'-Omethylguanosine phosphorothiorate
  modified_base 23: mod_base = OTHER; note = 2'-fluorocytosine
  modified_base 26: mod_base = OTHER; note = Adenosine phosphorothiorate
  modified_base 27: mod_base = OTHER; note = 2'-fluorouridine
  modified_base 29: mod_base = OTHER; note = 2'-fluoroguanosine
  modified_base 30: mod_base = OTHER; note = 2'-Omethylguanosine
  modified_base 33: mod_base = OTHER; note = 2'-fluorouridine
  modified_base 34: mod_base = OTHER; note = 2'-fluorouridine
  modified_base 39: mod_base = OTHER; note = Uridine phosphorothiorate
  modified_base 40: mod_base = OTHER; note = Uridine phosphorothiorate
  modified_base 41: mod_base = OTHER; note = 2'-Omethylcytosine
  modified_base 42: mod_base = OTHER; note = 2'-fluoroadenosine
  modified_base 43: mod_base = OTHER; note = 2'-Omethyladenosine
  modified_base 45: mod_base = OTHER; note = 2'-Omethylguanosine
  modified_base 46: mod_base = OTHER; note = 2'-fluoroguanosine
  modified_base 50: mod_base = OTHER; note = 2'-Omethylcytosine
  modified_base 52: mod_base = OTHER; note = Guanosine phosphorothiorate
  modified_base 53: mod_base = OTHER; note = 2'-fluoroguanosine
  modified_base 59: mod_base = OTHER; note = 2'-Omethylguanosine
  modified_base 62: mod_base = OTHER; note = 2'-Omethylcytosine
  modified_base 63: mod_base = OTHER; note = Cytosine phosphorothiorate
  modified_base 64: mod_base = OTHER; note = 2'-Omethylguanosine
  modified_base 66: mod_base = OTHER; note = 2'-fluorocytosine
  modified_base 67: mod_base = OTHER; note = 2'-Omethylguanosine
  modified_base 72: mod_base = OTHER; note = 2'-fluorocytosine
  modified_base 73: mod_base = OTHER; note = 2'-Omethylguanosine
  modified_base 74: mod_base = OTHER; note = 2'-Omethylcytosine

SEQ ID NO: 2492 - RNA, 76 nt, synthetic construct; identical to SEQ ID NO: 625
  source 1..76: mol_type = other RNA
  modified_base 10: mod_base = OTHER; note = 2'-Omethylguanosine
  modified_base 14: mod_base = OTHER; note = 2'-Omethyladenosine
  modified_base 15: mod_base = OTHER; note = Adenosine phosphorothiorate
  modified_base 18: mod_base = OTHER; note = 2'-Omethylguanosine
  modified_base 21: mod_base = OTHER; note = Adenosine phosphorothiorate
  modified_base 24: mod_base = OTHER; note = 2'-Omethylguanosine phosphorothiorate
  modified_base 25: mod_base = OTHER; note = 2'-Omethylcytosine phosphorothiorate
  modified_base 26: mod_base = OTHER; note = Adenosine phosphorothiorate
  modified_base 27: mod_base = OTHER; note = 2'-Omethyluridine
  modified_base 28: mod_base = OTHER; note = 2'-Omethyluridine
  modified_base 31: mod_base = OTHER; note = 2'-Omethyladenosine
  modified_base 32: mod_base = OTHER; note = 2'-fluorocytosine
  modified_base 34: mod_base = OTHER; note = 2'-fluorouridine
  modified_base 36: mod_base = OTHER; note = Adenosine phosphorothiorate
  modified_base 38: mod_base = OTHER; note = 2'-fluoroadenosine
  modified_base 39: mod_base = OTHER; note = Uridine phosphorothiorate
  modified_base 40: mod_base = OTHER; note = 2'-Omethyluridine
  modified_base 41: mod_base = OTHER; note = Cytosine phosphorothiorate
  modified_base 42: mod_base = OTHER; note = 2'-Omethyladenosine phosphorothiorate
  modified_base 45: mod_base = OTHER; note = 2'-fluoroguanosine phosphorothiorate
  modified_base 46: mod_base = OTHER; note = 2'-Omethylguanosine
  modified_base 47: mod_base = OTHER; note = 2'-Omethyluridine
  modified_base 49: mod_base = OTHER; note = 2'-Omethylcytosine
  modified_base 51: mod_base = OTHER; note = Guanosine phosphorothiorate
  modified_base 52: mod_base = OTHER; note = 2'-Omethylguanosine
  modified_base 54: mod_base = OTHER; note = 2'-fluorouridine
  modified_base 58: mod_base = OTHER; note = 2'-fluoroadenosine phosphorothiorate
  modified_base 59: mod_base = OTHER; note = Guanosine phosphorothiorate
  modified_base 60: mod_base = OTHER; note = 2'-Omethyluridine
  modified_base 63: mod_base = OTHER; note = 2'-Omethylcytosine
  modified_base 73: mod_base = OTHER; note = 2'-fluoroguanosine

SEQ ID NO: 2493 - RNA, 76 nt, synthetic construct; identical to SEQ ID NO: 625
  source 1..76: mol_type = other RNA
  modified_base 1: mod_base = OTHER; note = 2'-Omethylguanosine
  modified_base 2: mod_base = OTHER; note = 2'-Omethylguanosine
  modified_base 11: mod_base = OTHER; note = 2'-Omethylcytosine
  modified_base 12: mod_base = OTHER; note = 2'-Omethylguanosine
  modified_base 14: mod_base = OTHER; note = 2'-fluoroadenosine phosphorothiorate
  modified_base 17: mod_base = OTHER; note = 2'-Omethylguanosine
  modified_base 18: mod_base = OTHER; note = 2'-Omethylguanosine
  modified_base 19: mod_base = OTHER; note = Adenosine phosphorothiorate
  modified_base 20: mod_base = OTHER; note = 2'-Omethyluridine phosphorothiorate
  modified_base 21: mod_base = OTHER; note = Adenosine phosphorothiorate
  modified_base 22: mod_base = OTHER; note = 2'-fluoroguanosine
  modified_base 29: mod_base = OTHER; note = Guanosine phosphorothiorate
  modified_base 30: mod_base = OTHER; note = 2'-Omethylguanosine
  modified_base 33: mod_base = OTHER; note = Uridine phosphorothiorate
  modified_base 34: mod_base = OTHER; note = 2'-fluorouridine
  modified_base 37: mod_base = OTHER; note = Adenosine phosphorothiorate
  modified_base 38: mod_base = OTHER; note = 2'-fluoroadenosine phosphorothiorate
  modified_base 39: mod_base = OTHER; note = 2'-fluorouridine
  modified_base 44: mod_base = OTHER; note = 2'-Omethyladenosine
  modified_base 46: mod_base = OTHER; note = 2'-fluoroguanosine
  modified_base 47: mod_base = OTHER; note = 2'-fluorouridine
  modified_base 50: mod_base = OTHER; note = 2'-fluorocytosine
  modified_base 52: mod_base = OTHER; note = 2'-Omethylguanosine phosphorothiorate
  modified_base 53: mod_base = OTHER; note = 2'-fluoroguanosine
  modified_base 56: mod_base = OTHER; note = Cytosine phosphorothiorate
  modified_base 57: mod_base = OTHER; note = 2'-fluoroguanosine
  modified_base 62: mod_base = OTHER; note = 2'-fluorocytosine
  modified_base 63: mod_base = OTHER; note = 2'-Omethylcytosine
  modified_base 68: mod_base = OTHER; note = 2'-Omethylguanosine
  modified_base 69: mod_base = OTHER; note = 2'-Omethyladenosine phosphorothiorate
  modified_base 70: mod_base = OTHER; note = 2'-Omethylguanosine
  modified_base 73: mod_base = OTHER; note = 2'-fluoroguanosine
  modified_base 75: mod_base = OTHER; note = 2'-Omethylcytosine phosphorothiorate

SEQ ID NO: 2494 - RNA, 76 nt, synthetic construct; identical to SEQ ID NO: 625
  source 1..76: mol_type = other RNA
  modified_base 1: mod_base = OTHER; note = 2'-fluoroguanosine phosphorothiorate
  modified_base 4: mod_base = OTHER; note = 2'-Omethyluridine
  modified_base 5: mod_base = OTHER; note = 2'-Omethylcytosine
  modified_base 6: mod_base = OTHER; note = Cytosine phosphorothiorate
  modified_base 8: mod_base = OTHER; note = Uridine phosphorothiorate
  modified_base 11: mod_base = OTHER; note = Cytosine phosphorothiorate
  modified_base 16: mod_base = OTHER; note = 2'-Omethyluridine
  modified_base 17: mod_base = OTHER; note = 2'-Omethylguanosine
  modified_base 20: mod_base = OTHER; note = 2'-Omethyluridine
  modified_base 21: mod_base = OTHER; note = Adenosine phosphorothiorate
  modified_base 22: mod_base = OTHER; note = 2'-Omethylguanosine
  modified_base 26: mod_base = OTHER; note = 2'-fluoroadenosine
  modified_base 28: mod_base = OTHER; note = 2'-Omethyluridine
  modified_base 34: mod_base = OTHER; note = 2'-Omethyluridine
  modified_base 36: mod_base = OTHER; note = Adenosine phosphorothiorate
  modified_base 39: mod_base = OTHER; note = 2'-Omethyluridine
  modified_base 42: mod_base = OTHER; note = 2'-Omethyladenosine phosphorothiorate
  modified_base 43: mod_base = OTHER; note = 2'-fluoroadenosine
  modified_base 45: mod_base = OTHER; note = 2'-Omethylguanosine
  modified_base 46: mod_base = OTHER; note = 2'-fluoroguanosine
  modified_base 48: mod_base = OTHER; note = 2'-fluorouridine
  modified_base 50: mod_base = OTHER; note = 2'-Omethylcytosine
  modified_base 53: mod_base = OTHER; note = 2'-fluoroguanosine phosphorothiorate
  modified_base 57: mod_base = OTHER; note = Guanosine phosphorothiorate
  modified_base 61: mod_base = OTHER; note = Cytosine phosphorothiorate
  modified_base 64: mod_base = OTHER; note = 2'-fluoroguanosine
  modified_base 67: mod_base = OTHER; note = 2'-fluoroguanosine phosphorothiorate
  modified_base 68: mod_base = OTHER; note = 2'-fluoroguanosine
  modified_base 73: mod_base = OTHER; note = 2'-Omethylguanosine
  modified_base 74: mod_base = OTHER; note = 2'-fluorocytosine

SEQ ID NO: 2495 - RNA, 76 nt, synthetic construct; identical to SEQ ID NO: 625
  source 1..76: mol_type = other RNA
  modified_base 1: mod_base = OTHER; note = 2'-Omethylguanosine
  modified_base 2: mod_base = OTHER; note = 2'-Omethylguanosine
  modified_base 3: mod_base = OTHER; note = 2'-Omethylcytosine
  modified_base 4: mod_base = OTHER; note = 2'-fluorouridine
  modified_base 5: mod_base = OTHER; note = 2'-fluorocytosine
  modified_base 6: mod_base = OTHER; note = 2'-Omethylcytosine
  modified_base 10: mod_base = OTHER; note = 2'-Omethylguanosine
  modified_base 11: mod_base = OTHER; note = 2'-fluorocytosine
  modified_base 13: mod_base = OTHER; note = 2'-fluorocytosine
  modified_base 14: mod_base = OTHER; note = 2'-fluoroadenosine
  modified_base 15: mod_base = OTHER; note = 2'-fluoroadenosine
  modified_base 16: mod_base = OTHER; note = 2'-fluorouridine
  modified_base 18: mod_base = OTHER; note = 2'-Omethylguanosine
  modified_base 19: mod_base = OTHER; note = Adenosine phosphorothiorate
  modified_base 20: mod_base = OTHER; note = 2'-Omethyluridine
  modified_base 21: mod_base = OTHER; note = Adenosine phosphorothiorate
  modified_base 22: mod_base = OTHER; note = 2'-fluoroguanosine
  modified_base 23: mod_base = OTHER; note = Cytosine phosphorothiorate
  modified_base 24: mod_base = OTHER; note = 2'-fluoroguanosine
  modified_base 29: mod_base = OTHER; note = Guanosine phosphorothiorate
  modified_base 30: mod_base = OTHER; note = 2'-fluoroguanosine
  modified_base 31: mod_base = OTHER; note = 2'-fluoroadenosine
  modified_base 32: mod_base = OTHER; note = 2'-fluorocytosine
  modified_base 33: mod_base = OTHER; note = Uridine phosphorothiorate
  modified_base 37: mod_base = OTHER; note = Adenosine phosphorothiorate
  modified_base 38: mod_base = OTHER; note = 2'-Omethyladenosine
  modified_base 39: mod_base = OTHER; note = 2'-fluorouridine
  modified_base 42: mod_base = OTHER; note = 2'-Omethyladenosine
  modified_base 43: mod_base = OTHER; note = Adenosine phosphorothiorate
  modified_base 48: mod_base = OTHER; note = Uridine phosphorothiorate
  modified_base 56: mod_base = OTHER; note = 2'-fluorocytosine
  modified_base 57: mod_base = OTHER; note = 2'-Omethylguanosine
  modified_base 60: mod_base = OTHER; note = 2'-Omethyluridine
  modified_base 61: mod_base = OTHER; note = 2'-fluorocytosine
  modified_base 64: mod_base = OTHER; note = 2'-fluoroguanosine phosphorothiorate
  modified_base 65: mod_base = OTHER; note = 2'-fluoroguanosine
  modified_base 67: mod_base = OTHER; note = 2'-Omethylguanosine
  modified_base 69: mod_base = OTHER; note = Adenosine phosphorothiorate
  modified_base 70: mod_base = OTHER; note = 2'-Omethylguanosine
  modified_base 75: mod_base = OTHER; note = Cytosine phosphorothiorate
  modified_base 76: mod_base = OTHER; note = 2'-Omethyladenosine

SEQ ID NO: 2496 - RNA, 76 nt, synthetic construct; identical to SEQ ID NO: 625
  source 1..76: mol_type = other RNA
  modified_base 1: mod_base = OTHER; note = 2'-fluoroguanosine
  modified_base 2: mod_base = OTHER; note = Guanosine phosphorothiorate
  modified_base 6: mod_base = OTHER; note = Cytosine phosphorothiorate
  modified_base 7: mod_base = OTHER; note = Guanosine phosphorothiorate
  modified_base 10: mod_base = OTHER; note = 2'-Omethylguanosine
  modified_base 12: mod_base = OTHER; note = 2'-fluoroguanosine
  modified_base 13: mod_base = OTHER; note = 2'-fluorocytosine
  modified_base 14: mod_base = OTHER; note = Adenosine phosphorothiorate
  modified_base 15: mod_base = OTHER; note = 2'-fluoroadenosine
  modified_base 16: mod_base = OTHER; note = 2'-Omethyluridine
  modified_base 19: mod_base = OTHER; note = Adenosine phosphorothiorate
  modified_base 20: mod_base = OTHER; note = 2'-Omethyluridine
  modified_base 21: mod_base = OTHER; note = Adenosine phosphorothiorate
  modified_base 23: mod_base = OTHER; note = 2'-Omethylcytosine
  modified_base 24: mod_base = OTHER; note = 2'-Omethylguanosine phosphorothiorate
  modified_base 29: mod_base = OTHER; note = Guanosine phosphorothiorate
  modified_base 30: mod_base = OTHER; note = 2'-Omethylguanosine
  modified_base 34: mod_base = OTHER; note = Uridine phosphorothiorate
  modified_base 36: mod_base = OTHER; note = Adenosine phosphorothiorate
  modified_base 38: mod_base = OTHER; note = 2'-fluoroadenosine
  modified_base 41: mod_base = OTHER; note = Cytosine phosphorothiorate
  modified_base 42: mod_base = OTHER; note = 2'-fluoroadenosine
  modified_base 43: mod_base = OTHER; note = 2'-Omethyladenosine
  modified_base 45: mod_base = OTHER; note = 2'-Omethylguanosine
  modified_base 46: mod_base = OTHER; note = 2'-fluoroguanosine phosphorothiorate
  modified_base 47: mod_base = OTHER; note = 2'-fluorouridine
  modified_base 53: mod_base = OTHER; note = 2'-fluoroguanosine
  modified_base 54: mod_base = OTHER; note = 2'-fluorouridine
  modified_base 56: mod_base = OTHER; note = 2'-Omethylcytosine
  modified_base 60: mod_base = OTHER; note = Uridine phosphorothiorate
  modified_base 61: mod_base = OTHER; note = 2'-fluorocytosine
  modified_base 63: mod_base = OTHER; note = 2'-Omethylcytosine
  modified_base 64: mod_base = OTHER; note = 2'-fluoroguanosine
  modified_base 65: mod_base = OTHER; note = 2'-Omethylguanosine
  modified_base 67: mod_base = OTHER; note = 2'-fluoroguanosine
  modified_base 75: mod_base = OTHER; note = 2'-fluorocytosine phosphorothiorate
  modified_base 76: mod_base = OTHER; note = 2'-fluoroadenosine

SEQ ID NO: 2497 - RNA, 76 nt, synthetic construct; identical to SEQ ID NO: 625
  source 1..76: mol_type = other RNA
  modified_base 1: mod_base = OTHER; note = 2'-fluoroguanosine
  modified_base 2: mod_base = OTHER; note = Guanosine phosphorothiorate
  modified_base 3: mod_base = OTHER; note = 2'-fluorocytosine
  modified_base 4: mod_base = OTHER; note = 2'-Omethyluridine
  modified_base 11: mod_base = OTHER; note = Cytosine phosphorothiorate
  modified_base 14: mod_base = OTHER; note = Adenosine phosphorothiorate
  modified_base 15: mod_base = OTHER; note = 2'-Omethyladenosine
  modified_base 16: mod_base = OTHER; note = 2'-Omethyluridine
  modified_base 18: mod_base = OTHER; note = 2'-fluoroguanosine
  modified_base 24: mod_base = OTHER; note = 2'-fluoroguanosine phosphorothiorate
  modified_base 25: mod_base = OTHER; note = 2'-Omethylcytosine
  modified_base 26: mod_base = OTHER; note = 2'-fluoroadenosine
  modified_base 27: mod_base = OTHER; note = 2'-fluorouridine
  modified_base 39: mod_base = OTHER; note = Uridine phosphorothiorate
  modified_base 40: mod_base = OTHER; note = 2'-Omethyluridine
  modified_base 41: mod_base = OTHER; note = 2'-fluorocytosine
  modified_base 42: mod_base = OTHER; note = Adenosine phosphorothiorate
  modified_base 43: mod_base = OTHER; note = 2'-Omethyladenosine
  modified_base 44: mod_base = OTHER; note = 2'-Omethyladenosine phosphorothiorate
  modified_base 45: mod_base = OTHER; note = 2'-fluoroguanosine
  modified_base 48: mod_base = OTHER; note = 2'-Omethyluridine
  modified_base 49: mod_base = OTHER; note = 2'-Omethylcytosine phosphorothiorate
  modified_base 50: mod_base = OTHER; note = 2'-fluorocytosine
  modified_base 53: mod_base = OTHER; note = 2'-Omethylguanosine
  modified_base 57: mod_base = OTHER; note = Guanosine phosphorothiorate
  modified_base 58: mod_base = OTHER; note = 2'-fluoroadenosine
  modified_base 59: mod_base = OTHER; note = 2'-Omethylguanosine
  modified_base 60: mod_base = OTHER; note = Uridine phosphorothiorate
  modified_base 61: mod_base = OTHER; note = 2'-fluorocytosine
  modified_base 66: mod_base = OTHER; note = 2'-Omethylcytosine
  modified_base 68: mod_base = OTHER; note = 2'-fluoroguanosine
  modified_base 69: mod_base = OTHER; note = 2'-Omethyladenosine
  modified_base 70: mod_base = OTHER; note = 2'-fluoroguanosine phosphorothiorate
  modified_base 71: mod_base = OTHER; note = 2'-fluorouridine
  modified_base 73: mod_base = OTHER; note = Guanosine phosphorothiorate
  modified_base 74: mod_base = OTHER; note = 2'-fluorocytosine phosphorothiorate
  modified_base 75: mod_base = OTHER; note = 2'-Omethylcytosine

SEQ ID NO: 2498 - RNA, 76 nt, synthetic construct; identical to SEQ ID NO: 625
  source 1..76: mol_type = other RNA
  modified_base 1: mod_base = OTHER; note = 2'-fluoroguanosine phosphorothiorate
  modified_base 3: mod_base = OTHER; note = 2'-Omethylcytosine
  modified_base 5: mod_base = OTHER; note = 2'-fluorocytosine
  modified_base 6: mod_base = OTHER; note = 2'-Omethylcytosine
  modified_base 15: mod_base = OTHER; note = 2'-Omethyladenosine
  modified_base 18: mod_base = OTHER; note = 2'-Omethylguanosine phosphorothiorate
  modified_base 20: mod_base = OTHER; note = 2'-fluorouridine
  modified_base 23: mod_base = OTHER; note = Cytosine phosphorothiorate
  modified_base 24: mod_base = OTHER; note = 2'-fluoroguanosine phosphorothiorate
  modified_base 25: mod_base = OTHER; note = 2'-fluorocytosine
  modified_base 26: mod_base = OTHER; note = 2'-fluoroadenosine
  modified_base 27: mod_base = OTHER; note = 2'-Omethyluridine
  modified_base 28: mod_base = OTHER; note = 2'-fluorouridine
  modified_base 29: mod_base = OTHER; note = 2'-fluoroguanosine
  modified_base 30: mod_base = OTHER; note = 2'-Omethylguanosine
  modified_base 34: mod_base = OTHER; note = 2'-Omethyluridine
  modified_base 40: mod_base = OTHER; note = 2'-Omethyluridine
  modified_base 41: mod_base = OTHER; note = 2'-fluorocytosine
  modified_base 43: mod_base = OTHER; note = 2'-Omethyladenosine phosphorothiorate
  modified_base 44: mod_base = OTHER; note = 2'-fluoroadenosine
  modified_base 45: mod_base = OTHER; note = 2'-fluoroguanosine
  modified_base 54: mod_base = OTHER; note = 2'-fluorouridine phosphorothiorate
  modified_base 56: mod_base = OTHER; note = Cytosine phosphorothiorate
  modified_base 57: mod_base = OTHER; note = 2'-fluoroguanosine
  modified_base 61: mod_base = OTHER; note = 2'-Omethylcytosine
  modified_base 62: mod_base = OTHER; note = 2'-fluorocytosine
  modified_base 66: mod_base = OTHER; note = Cytosine phosphorothiorate
  modified_base 67: mod_base = OTHER; note = 2'-Omethylguanosine
  modified_base 68: mod_base = OTHER; note = 2'-fluoroguanosine
  modified_base 73: mod_base = OTHER; note = 2'-Omethylguanosine
  modified_base 74: mod_base = OTHER; note = Cytosine phosphorothiorate
  modified_base 75: mod_base = OTHER; note = 2'-Omethylcytosine phosphorothiorate
  modified_base 76: mod_base = OTHER; note = 2'-fluoroadenosine

SEQ ID NO: 2499 - RNA, 76 nt, synthetic construct; identical to SEQ ID NO: 625
  source 1..76: mol_type = other RNA
  modified_base 1: mod_base = OTHER; note = 2'-Omethylguanosine
  modified_base 5: mod_base = OTHER; note = 2'-Omethylcytosine
  modified_base 6: mod_base = OTHER; note = 2'-Omethylcytosine
  modified_base 10: mod_base = OTHER; note = 2'-Omethylguanosine
  modified_base 12: mod_base = OTHER; note = 2'-Omethylguanosine
  modified_base 13: mod_base = OTHER; note = 2'-Omethylcytosine
  modified_base 15: mod_base = OTHER; note = 2'-fluoroadenosine
  modified_base 18: mod_base = OTHER; note = Guanosine phosphorothiorate
  modified_base 20: mod_base = OTHER; note = 2'-fluorouridine phosphorothiorate
  modified_base 23: mod_base = OTHER; note = Cytosine phosphorothiorate
  modified_base 24: mod_base = OTHER; note = 2'-fluoroguanosine
  modified_base 26: mod_base = OTHER; note = Adenosine phosphorothiorate
  modified_base 27: mod_base = OTHER; note = 2'-Omethyluridine
  modified_base 28: mod_base = OTHER; note = 2'-Omethyluridine
  modified_base 29: mod_base = OTHER; note = Guanosine phosphorothiorate
  modified_base 30: mod_base = OTHER; note = 2'-fluoroguanosine
  modified_base 37: mod_base = OTHER; note = Adenosine phosphorothiorate
  modified_base 40: mod_base = OTHER; note = Uridine phosphorothiorate
  modified_base 48: mod_base = OTHER; note = 2'-fluorouridine
  modified_base 51: mod_base = OTHER; note = Guanosine phosphorothiorate
  modified_base 53: mod_base = OTHER; note = 2'-fluoroguanosine
  modified_base 56: mod_base = OTHER; note = 2'-Omethylcytosine
  modified_base 57: mod_base = OTHER; note = Guanosine phosphorothiorate
  modified_base 58: mod_base = OTHER; note = 2'-fluoroadenosine
  modified_base 59: mod_base = OTHER; note = 2'-fluoroguanosine
  modified_base 62: mod_base = OTHER; note = 2'-fluorocytosine
  modified_base 64: mod_base = OTHER; note = 2'-fluoroguanosine
  modified_base 65: mod_base = OTHER; note = 2'-fluoroguanosine
  modified_base 68: mod_base = OTHER; note = 2'-Omethylguanosine
  modified_base 69: mod_base = OTHER; note = 2'-fluoroadenosine
  modified_base 72: mod_base = OTHER; note = 2'-fluorocytosine
  modified_base 73: mod_base = OTHER; note = 2'-fluoroguanosine
  modified_base 74: mod_base = OTHER; note = 2'-Omethylcytosine
  modified_base 75: mod_base = OTHER; note = 2'-fluorocytosine

SEQ ID NO: 2500 - RNA, 76 nt, synthetic construct; identical to SEQ ID NO: 625
  source 1..76: mol_type = other RNA
  modified_base 2: mod_base = OTHER; note = 2'-Omethylguanosine
  modified_base 3: mod_base = OTHER; note = 2'-Omethylcytosine
  modified_base 5: mod_base = OTHER; note = 2'-fluorocytosine
  modified_base 6: mod_base = OTHER; note = Cytosine phosphorothiorate
  modified_base 9: mod_base = OTHER; note = Guanosine phosphorothiorate
  modified_base 11: mod_base = OTHER; note = 2'-fluorocytosine
  modified_base 14: mod_base = OTHER; note = 2'-Omethyladenosine phosphorothiorate
  modified_base 18: mod_base = OTHER; note = 2'-Omethylguanosine
  modified_base 21: mod_base = OTHER; note = Adenosine phosphorothiorate
  modified_base 22: mod_base = OTHER; note = 2'-fluoroguanosine phosphorothiorate
  modified_base 27: mod_base = OTHER; note = 2'-fluorouridine
  modified_base 33: mod_base = OTHER; note = Uridine phosphorothiorate
  modified_base 34: mod_base = OTHER; note = 2'-Omethyluridine
  modified_base 36: mod_base = OTHER; note = Adenosine phosphorothiorate
  modified_base 38: mod_base = OTHER; note = 2'-Omethyladenosine
  modified_base 39: mod_base = OTHER; note = 2'-fluorouridine
  modified_base 41: mod_base = OTHER; note = 2'-Omethylcytosine
  modified_base 42: mod_base = OTHER; note = 2'-Omethyladenosine
  modified_base 43: mod_base = OTHER; note = 2'-Omethyladenosine
  modified_base 45: mod_base = OTHER; note = 2'-Omethylguanosine
  modified_base 48: mod_base = OTHER; note = 2'-fluorouridine
  modified_base 52: mod_base = OTHER; note = 2'-Omethylguanosine
  modified_base 53: mod_base = OTHER; note = 2'-fluoroguanosine
  modified_base 54: mod_base = OTHER; note = Uridine phosphorothiorate
  modified_base 59: mod_base = OTHER; note = Guanosine phosphorothiorate
  modified_base 60: mod_base = OTHER; note = 2'-fluorouridine
  modified_base 63: mod_base = OTHER; note = 2'-fluorocytosine
  modified_base 68: mod_base = OTHER; note = 2'-Omethylguanosine
  modified_base 69: mod_base = OTHER; note = Adenosine phosphorothiorate
  modified_base 70: mod_base = OTHER; note = 2'-fluoroguanosine
  modified_base 72: mod_base = OTHER; note = 2'-Omethylcytosine phosphorothiorate
  modified_base 73: mod_base = OTHER; note = Guanosine phosphorothiorate
  modified_base 76: mod_base = OTHER; note = 2'-fluoroadenosine

SEQ ID NO: 2501-2505 - skipped (5 entries)

SEQ ID NO: 2506 - RNA, 75 nt, synthetic construct; identical to SEQ ID NO: 1045
  source 1..75: mol_type = other RNA
  modified_base 1: mod_base = OTHER; note = 2'-Omethylguanosine
  modified_base 14: mod_base = OTHER; note = 2'-Omethyladenosine
  modified_base 15: mod_base = OTHER; note = 2'-Omethyladenosine
  modified_base 16: mod_base = OTHER; note = 2'-Omethyluridine
  modified_base 17: mod_base = OTHER; note = 2'-Omethylguanosine
  modified_base 18: mod_base = OTHER; note = 2'-Omethylguanosine
  modified_base 20: mod_base = OTHER; note = 2'-Omethyladenosine
  modified_base 49: mod_base = OTHER; note = 2'-Omethylcytosine
  modified_base 51: mod_base = OTHER; note = 2'-Omethyladenosine
  modified_base 72: mod_base = OTHER; note = 2'-Omethyluridine

SEQ ID NO: 2507 - skipped

SEQ ID NO: 2508 - RNA, 75 nt, synthetic construct; identical to SEQ ID NO: 1045
  source 1..75: mol_type = other RNA
  modified_base 1: mod_base = OTHER; note = 2'-Omethylguanosine
  modified_base 16: mod_base = OTHER; note = 2'-Omethyluridine
  modified_base 17: mod_base = OTHER; note = 2'-Omethylguanosine
  modified_base 18: mod_base = OTHER; note = 2'-Omethylguanosine
  modified_base 53: mod_base = OTHER; note = 2'-Omethyluridine phosphorothiorate
  modified_base 54: mod_base = OTHER; note = Uridine phosphorothiorate
  modified_base 55: mod_base = OTHER; note = 2'-Omethylcytosine
  modified_base 58: mod_base = OTHER; note = 2'-Omethylguanosine
  modified_base 72: mod_base = OTHER; note = 2'-Omethyluridine

SEQ ID NO: 2509-2554 - skipped (46 entries)

SEQ ID NO: 2555 - RNA, 75 nt, synthetic construct; identical to SEQ ID NO: 1045
  source 1..75: mol_type = other RNA
  modified_base 1: mod_base = OTHER; note = 2'-Omethylguanosine
  modified_base 17: mod_base = OTHER; note = 2'-Omethylguanosine
  modified_base 18: mod_base = OTHER; note = 2'-Omethylguanosine
  modified_base 33: mod_base = OTHER; note = 2'-fluorouridine
  modified_base 34: mod_base = OTHER; note = 2'-Omethyluridine
  modified_base 35: mod_base = OTHER; note = Uridine phosphorothiorate
  modified_base 37: mod_base = OTHER; note = Adenosine phosphorothiorate
  modified_base 38: mod_base = OTHER; note = Adenosine phosphorothiorate
  modified_base 41: mod_base = OTHER; note = 2'-fluorocytosine
  modified_base 42: mod_base = OTHER; note = 2'-Omethyladenosine
  modified_base 43: mod_base = OTHER; note = 2'-Omethylguanosine
  modified_base 44: mod_base = OTHER; note = 2'-fluorocytosine
  modified_base 49: mod_base = OTHER; note = 2'-Omethylcytosine
  modified_base 51: mod_base = OTHER; note = 2'-Omethyladenosine
  modified_base 72: mod_base = OTHER; note = 2'-Omethyluridine

SEQ ID NO: 2556-2582 - skipped (27 entries)

SEQ ID NO: 2583 - RNA, 75 nt, synthetic construct; identical to SEQ ID NO: 1045
  source 1..75: mol_type = other RNA
  modified_base 1: mod_base = OTHER; note = 2'-Omethylguanosine
  modified_base 4: mod_base = OTHER; note = 2'-Omethyluridine
  modified_base 13: mod_base = OTHER; note = 2'-Omethyluridine
  modified_base 17: mod_base = OTHER; note = 2'-Omethylguanosine
  modified_base 18: mod_base = OTHER; note = 2'-Omethylguanosine
  modified_base 20: mod_base = OTHER; note = 2'-Omethyladenosine
  modified_base 25: mod_base = OTHER; note = 2'-Omethylcytosine
  modified_base 29: mod_base = OTHER; note = 2'-Omethylguanosine
  modified_base 30: mod_base = OTHER; note = 2'-Omethylguanosine
  modified_base 48: mod_base = OTHER; note = 2'-Omethylcytosine
  modified_base 49: mod_base = OTHER; note = 2'-Omethylcytosine
  modified_base 51: mod_base = OTHER; note = 2'-Omethyladenosine
  modified_base 55: mod_base = OTHER; note = 2'-Omethylcytosine
  modified_base 58: mod_base = OTHER; note = 2'-Omethylguanosine
  modified_base 64: mod_base = OTHER; note = 2'-Omethylguanosine
  modified_base 68: mod_base = OTHER; note = 2'-Omethyladenosine
  modified_base 70: mod_base = OTHER; note = 2'-Omethylcytosine
  modified_base 71: mod_base = OTHER; note = 2'-Omethylcytosine
  modified_base 72: mod_base = OTHER; note = 2'-Omethyluridine

SEQ ID NO: 2584-2585 - skipped (2 entries)

SEQ ID NO: 2586 - RNA, 76 nt, synthetic construct; identical to SEQ ID NO: 625
  source 1..76: mol_type = other RNA
  modified_base 1: mod_base = OTHER; note = 2'-Omethylguanosine phosphorothiorate
  modified_base 2: mod_base = OTHER; note = 2'-Omethylguanosine
  modified_base 3: mod_base = OTHER; note = 2'-Omethylcytosine
  modified_base 4: mod_base = OTHER; note = 2'-Omethyluridine
  modified_base 5: mod_base = OTHER; note = 2'-Omethylcytosine
  modified_base 6: mod_base = OTHER; note = 2'-Omethylcytosine
  modified_base 49: mod_base = OTHER; note = 2'-Omethylcytosine
  modified_base 50: mod_base = OTHER; note = 2'-Omethylcytosine
  modified_base 51: mod_base = OTHER; note = 2'-Omethylguanosine
  modified_base 52: mod_base = OTHER; note = 2'-Omethylguanosine
  modified_base 53: mod_base = OTHER; note = 2'-Omethylguanosine
  modified_base 61: mod_base = OTHER; note = 2'-Omethylcytosine
  modified_base 62: mod_base = OTHER; note = 2'-Omethylcytosine
  modified_base 63: mod_base = OTHER; note = 2'-fluorocytosine
  modified_base 64: mod_base = OTHER; note = 2'-Omethylguanosine
  modified_base 65: mod_base = OTHER; note = 2'-Omethylguanosine
  modified_base 73: mod_base = OTHER; note = 2'-Omethylguanosine

SEQ ID NO: 2587 - RNA, 76 nt, synthetic construct; identical to SEQ ID NO: 625
  source 1..76: mol_type = other RNA
  modified_base 1: mod_base = OTHER; note = 2'-Omethylguanosine phosphorothiorate
  modified_base 2: mod_base = OTHER; note = 2'-Omethylguanosine
  modified_base 3: mod_base = OTHER; note = 2'-Omethylcytosine
  modified_base 4: mod_base = OTHER; note = 2'-Omethyluridine
  modified_base 5: mod_base = OTHER; note = 2'-Omethylcytosine
  modified_base 6: mod_base = OTHER; note = 2'-Omethylcytosine
  modified_base 49: mod_base = OTHER; note = 2'-Omethylcytosine
  modified_base 50: mod_base = OTHER; note = 2'-Omethylcytosine
  modified_base 51: mod_base = OTHER; note = 2'-Omethylguanosine
  modified_base 52: mod_base = OTHER; note = 2'-Omethylguanosine
  modified_base 53: mod_base = OTHER; note = 2'-Omethylguanosine
  modified_base 61: mod_base = OTHER; note = 2'-Omethylcytosine
  modified_base 62: mod_base = OTHER; note = 2'-Omethylcytosine
  modified_base 63: mod_base = OTHER; note = 2'-fluorocytosine
  modified_base 64: mod_base = OTHER; note = 2'-Omethylguanosine
  modified_base 65: mod_base = OTHER; note = 2'-Omethylguanosine
  modified_base 66: mod_base = OTHER; note = 2'-Omethylcytosine
  modified_base 67: mod_base = OTHER; note = 2'-Omethylguanosine
  modified_base 68: mod_base = OTHER; note = 2'-Omethylguanosine
  modified_base 69: mod_base = OTHER; note = 2'-Omethyladenosine
  modified_base 73: mod_base = OTHER; note = 2'-Omethylguanosine

SEQ ID NO: 2588 - RNA, 76 nt, synthetic construct; identical to SEQ ID NO: 625
  source 1..76: mol_type = other RNA
  modified_base 1: mod_base = OTHER; note = 2'-Omethylguanosine phosphorothiorate
  modified_base 2: mod_base = OTHER; note = 2'-Omethylguanosine
  modified_base 3: mod_base = OTHER; note = 2'-Omethylcytosine
  modified_base 4: mod_base = OTHER; note = 2'-Omethyluridine
  modified_base 5: mod_base = OTHER; note = 2'-Omethylcytosine
  modified_base 6: mod_base = OTHER; note = 2'-Omethylcytosine
  modified_base 49: mod_base = OTHER; note = 2'-Omethylcytosine
  modified_base 50: mod_base = OTHER; note = 2'-Omethylcytosine
  modified_base 51: mod_base = OTHER; note = 2'-Omethylguanosine
  modified_base 52: mod_base = OTHER; note = 2'-Omethylguanosine
  modified_base 53: mod_base = OTHER; note = 2'-Omethylguanosine
  modified_base 61: mod_base = OTHER; note = 2'-Omethylcytosine
  modified_base 62: mod_base = OTHER; note = 2'-Omethylcytosine
  modified_base 63: mod_base = OTHER; note = 2'-fluorocytosine
  modified_base 64: mod_base = OTHER; note = 2'-Omethylguanosine
  modified_base 65: mod_base = OTHER; note = 2'-Omethylguanosine
  modified_base 66: mod_base = OTHER; note = 2'-Omethylcytosine
  modified_base 67: mod_base = OTHER; note = 2'-Omethylguanosine
  modified_base 68: mod_base = OTHER; note = 2'-Omethylguanosine
  modified_base 69: mod_base = OTHER; note = 2'-Omethyladenosine

SEQ ID NO: 2589 - RNA, 76 nt, synthetic construct; identical to SEQ ID NO: 625
  source 1..76: mol_type = other RNA
  modified_base 1: mod_base = OTHER; note = 2'-Omethylguanosine phosphorothiorate
  modified_base 2: mod_base = OTHER; note = 2'-Omethylguanosine
  modified_base 3: mod_base = OTHER; note = 2'-Omethylcytosine
  modified_base 4: mod_base = OTHER; note = 2'-Omethyluridine
  modified_base 5: mod_base = OTHER; note = 2'-Omethylcytosine
  modified_base 6: mod_base = OTHER; note = 2'-Omethylcytosine
  modified_base 49: mod_base = OTHER; note = 2'-Omethylcytosine
  modified_base 50: mod_base = OTHER; note = 2'-Omethylcytosine
  modified_base 51: mod_base = OTHER; note = 2'-Omethylguanosine
  modified_base 52: mod_base = OTHER; note = 2'-Omethylguanosine
  modified_base 53: mod_base = OTHER; note = 2'-Omethylguanosine
  modified_base 61: mod_base = OTHER; note = 2'-Omethylcytosine
  modified_base 62: mod_base = OTHER; note = 2'-Omethylcytosine
  modified_base 63: mod_base = OTHER; note = 2'-fluorocytosine
  modified_base 64: mod_base = OTHER; note = 2'-Omethylguanosine
  modified_base 65: mod_base = OTHER; note = 2'-Omethylguanosine
  modified_base 66: mod_base = OTHER; note = 2'-Omethylcytosine
  modified_base 67: mod_base = OTHER; note = 2'-Omethylguanosine
  modified_base 68: mod_base = OTHER; note = 2'-Omethylguanosine
  modified_base 69: mod_base = OTHER; note = 2'-Omethyladenosine
  modified_base 70: mod_base = OTHER; note = 2'-fluoroguanosine

SEQ ID NO: 2590 - RNA, 76 nt, synthetic construct; identical to SEQ ID NO: 625
  source 1..76: mol_type = other RNA
  modified_base 1: mod_base = OTHER; note = 2'-Omethylguanosine phosphorothiorate
  modified_base 2: mod_base = OTHER; note = 2'-Omethylguanosine
  modified_base 3: mod_base = OTHER; note = 2'-Omethylcytosine
  modified_base 4: mod_base = OTHER; note = 2'-Omethyluridine
  modified_base 5: mod_base = OTHER; note = 2'-Omethylcytosine
  modified_base 6: mod_base = OTHER; note = 2'-Omethylcytosine
  modified_base 49: mod_base = OTHER; note = 2'-Omethylcytosine
  modified_base 50: mod_base = OTHER; note = 2'-Omethylcytosine
  modified_base 51: mod_base = OTHER; note = 2'-Omethylguanosine
  modified_base 52: mod_base = OTHER; note = 2'-Omethylguanosine
  modified_base 53: mod_base = OTHER; note = 2'-Omethylguanosine
  modified_base 61: mod_base = OTHER; note = 2'-Omethylcytosine
  modified_base 62: mod_base = OTHER; note = 2'-Omethylcytosine
  modified_base 63: mod_base = OTHER; note = 2'-fluorocytosine
  modified_base 64: mod_base = OTHER; note = 2'-Omethylguanosine
  modified_base 65: mod_base = OTHER; note = 2'-Omethylguanosine
  modified_base 66: mod_base = OTHER; note = 2'-Omethylcytosine
  modified_base 67: mod_base = OTHER; note = 2'-Omethylguanosine
  modified_base 68: mod_base = OTHER; note = 2'-Omethylguanosine
  modified_base 69: mod_base = OTHER; note = 2'-Omethyladenosine
  modified_base 71: mod_base = OTHER; note = 2'-Omethyluridine

SEQ ID NO: 2591 - RNA, 76 nt, synthetic construct; identical to SEQ ID NO: 625
  source 1..76: mol_type = other RNA
  modified_base 1: mod_base = OTHER; note = 2'-Omethylguanosine phosphorothiorate
  modified_base 2: mod_base = OTHER; note = 2'-Omethylguanosine
  modified_base 3: mod_base = OTHER; note = 2'-Omethylcytosine
  modified_base 4: mod_base = OTHER; note = 2'-Omethyluridine
  modified_base 5: mod_base = OTHER; note = 2'-Omethylcytosine
  modified_base 6: mod_base = OTHER; note = 2'-Omethylcytosine
  modified_base 49: mod_base = OTHER; note = 2'-Omethylcytosine
  modified_base 50: mod_base = OTHER; note = 2'-Omethylcytosine
  modified_base 51: mod_base = OTHER; note = 2'-Omethylguanosine
  modified_base 52: mod_base = OTHER; note = 2'-Omethylguanosine
  modified_base 53: mod_base = OTHER; note = 2'-Omethylguanosine
  modified_base 61: mod_base = OTHER; note = 2'-Omethylcytosine
  modified_base 62: mod_base = OTHER; note = 2'-Omethylcytosine
  modified_base 63: mod_base = OTHER; note = 2'-fluorocytosine
  modified_base 64: mod_base = OTHER; note = 2'-Omethylguanosine
  modified_base 65: mod_base = OTHER; note = 2'-Omethylguanosine
  modified_base 66: mod_base = OTHER; note = 2'-Omethylcytosine
  modified_base 67: mod_base = OTHER; note = 2'-Omethylguanosine
  modified_base 68: mod_base = OTHER; note = 2'-Omethylguanosine
  modified_base 69: mod_base = OTHER; note = 2'-Omethyladenosine
  modified_base 72: mod_base = OTHER; note = 2'-Omethylcytosine

SEQ ID NO: 2592 - RNA, 76 nt, synthetic construct; identical to SEQ ID NO: 625
  source 1..76: mol_type = other RNA
  modified_base 1: mod_base = OTHER; note = 2'-Omethylguanosine phosphorothiorate
  modified_base 2: mod_base = OTHER; note = 2'-Omethylguanosine
  modified_base 3: mod_base = OTHER; note = 2'-Omethylcytosine
  modified_base 4: mod_base = OTHER; note = 2'-Omethyluridine
  modified_base 5: mod_base = OTHER; note = 2'-Omethylcytosine
  modified_base 6: mod_base = OTHER; note = 2'-Omethylcytosine
  modified_base 49: mod_base = OTHER; note = 2'-Omethylcytosine
  modified_base 50: mod_base = OTHER; note = 2'-Omethylcytosine
  modified_base 51: mod_base = OTHER; note = 2'-Omethylguanosine
  modified_base 52: mod_base = OTHER; note = 2'-Omethylguanosine
  modified_base 53: mod_base = OTHER; note = 2'-Omethylguanosine
  modified_base 61: mod_base = OTHER; note = 2'-Omethylcytosine
  modified_base 62: mod_base = OTHER; note = 2'-Omethylcytosine
  modified_base 63: mod_base = OTHER; note = 2'-fluorocytosine
  modified_base 64: mod_base = OTHER; note = 2'-Omethylguanosine
  modified_base 65: mod_base = OTHER; note = 2'-Omethylguanosine
  modified_base 66: mod_base = OTHER; note = 2'-Omethylcytosine
  modified_base 67: mod_base = OTHER; note = 2'-Omethylguanosine
  modified_base 68: mod_base = OTHER; note = 2'-Omethylguanosine
  modified_base 69: mod_base = OTHER; note = 2'-Omethyladenosine
  modified_base 71: mod_base = OTHER; note = 2'-Omethyluridine
  modified_base 72: mod_base = OTHER; note = 2'-Omethylcytosine

SEQ ID NO: 2593 - RNA, 76 nt, synthetic construct; identical to SEQ ID NO: 625
  source 1..76: mol_type = other RNA
  modified_base 1: mod_base = OTHER; note = 2'-Omethylguanosine phosphorothiorate
  modified_base 2: mod_base = OTHER; note = 2'-Omethylguanosine
  modified_base 3: mod_base = OTHER; note = 2'-Omethylcytosine
  modified_base 4: mod_base = OTHER; note = 2'-Omethyluridine
  modified_base 5: mod_base = OTHER; note = 2'-Omethylcytosine
  modified_base 6: mod_base = OTHER; note = 2'-Omethylcytosine
  modified_base 49: mod_base = OTHER; note = 2'-Omethylcytosine
  modified_base 50: mod_base = OTHER; note = 2'-Omethylcytosine
  modified_base 51: mod_base = OTHER; note = 2'-Omethylguanosine
  modified_base 52: mod_base = OTHER; note = 2'-Omethylguanosine
  modified_base 53: mod_base = OTHER; note = 2'-Omethylguanosine
  modified_base 61: mod_base = OTHER; note = 2'-Omethylcytosine
  modified_base 62: mod_base = OTHER; note = 2'-Omethylcytosine
  modified_base 63: mod_base = OTHER; note = 2'-fluorocytosine
  modified_base 64: mod_base = OTHER; note = 2'-Omethylguanosine
  modified_base 65: mod_base = OTHER; note = 2'-Omethylguanosine
  modified_base 66: mod_base = OTHER; note = 2'-Omethylcytosine
  modified_base 67: mod_base = OTHER; note = 2'-Omethylguanosine
  modified_base 68: mod_base = OTHER; note = 2'-Omethylguanosine
  modified_base 69: mod_base = OTHER; note = 2'-fluoroadenosine
  modified_base 73: mod_base = OTHER; note = 2'-Omethylguanosine

SEQ ID NO: 2594 - RNA, 76 nt, synthetic construct; identical to SEQ ID NO: 625
  source 1..76: mol_type = other RNA
  modified_base 1: mod_base = OTHER; note = 2'-Omethylguanosine phosphorothiorate
  modified_base 2: mod_base = OTHER; note = 2'-Omethylguanosine
  modified_base 3: mod_base = OTHER; note = 2'-Omethylcytosine
  modified_base 4: mod_base = OTHER; note = 2'-Omethyluridine
  modified_base 5: mod_base = OTHER; note = 2'-Omethylcytosine
  modified_base 6: mod_base = OTHER; note = 2'-Omethylcytosine
  modified_base 49: mod_base = OTHER; note = 2'-Omethylcytosine
  modified_base 50: mod_base = OTHER; note = 2'-Omethylcytosine
  modified_base 51: mod_base = OTHER; note = 2'-Omethylguanosine
  modified_base 52: mod_base = OTHER; note = 2'-Omethylguanosine
  modified_base 53: mod_base = OTHER; note = 2'-Omethylguanosine
  modified_base 61: mod_base = OTHER; note = 2'-Omethylcytosine
  modified_base 62: mod_base = OTHER; note = 2'-Omethylcytosine
  modified_base 63: mod_base = OTHER; note = 2'-fluorocytosine
  modified_base 64: mod_base = OTHER; note = 2'-Omethylguanosine
  modified_base 65: mod_base = OTHER; note = 2'-Omethylguanosine
  modified_base 66: mod_base = OTHER; note = 2'-Omethylcytosine
  modified_base 67: mod_base = OTHER; note = 2'-Omethylguanosine
  modified_base 68: mod_base = OTHER; note = 2'-Omethylguanosine
  modified_base 69: mod_base = OTHER; note = 2'-fluoroadenosine

SEQ ID NO: 2595 - RNA, 76 nt, synthetic construct; identical to SEQ ID NO: 625
  source 1..76: mol_type = other RNA
  modified_base 1: mod_base = OTHER; note = 2'-Omethylguanosine phosphorothiorate
  modified_base 2: mod_base = OTHER; note = 2'-Omethylguanosine
  modified_base 3: mod_base = OTHER; note = 2'-Omethylcytosine
  modified_base 4: mod_base = OTHER; note = 2'-Omethyluridine
  modified_base 5: mod_base = OTHER; note = 2'-Omethylcytosine
  modified_base 6: mod_base = OTHER; note = 2'-Omethylcytosine
  modified_base 49: mod_base = OTHER; note = 2'-Omethylcytosine
  modified_base 50: mod_base = OTHER; note = 2'-Omethylcytosine
  modified_base 51: mod_base = OTHER; note = 2'-Omethylguanosine
  modified_base 52: mod_base = OTHER; note = 2'-Omethylguanosine
  modified_base 53: mod_base = OTHER; note = 2'-Omethylguanosine
  modified_base 61: mod_base = OTHER; note = 2'-Omethylcytosine
  modified_base 62: mod_base = OTHER; note = 2'-Omethylcytosine
  modified_base 63: mod_base = OTHER; note = 2'-fluorocytosine
  modified_base 64: mod_base = OTHER; note = 2'-Omethylguanosine
  modified_base 65: mod_base = OTHER; note = 2'-Omethylguanosine
  modified_base 66: mod_base = OTHER; note = 2'-Omethylcytosine
  modified_base 67: mod_base = OTHER; note = 2'-Omethylguanosine
  modified_base 68: mod_base = OTHER; note = 2'-Omethylguanosine
  modified_base 69: mod_base = OTHER; note = 2'-fluoroadenosine
  modified_base 70: mod_base = OTHER; note = 2'-fluoroguanosine

SEQ ID NO: 2596 - RNA, 76 nt, synthetic construct; identical to SEQ ID NO: 625
  source 1..76: mol_type = other RNA
  modified_base 1: mod_base = OTHER; note = 2'-Omethylguanosine phosphorothiorate
  modified_base 2: mod_base = OTHER; note = 2'-Omethylguanosine
  modified_base 3: mod_base = OTHER; note = 2'-Omethylcytosine
  modified_base 4: mod_base = OTHER; note = 2'-Omethyluridine
  modified_base 5: mod_base = OTHER; note = 2'-Omethylcytosine
  modified_base 6: mod_base = OTHER; note = 2'-Omethylcytosine
  modified_base 49: mod_base = OTHER; note = 2'-Omethylcytosine
  modified_base 50: mod_base = OTHER; note = 2'-Omethylcytosine
  modified_base 51: mod_base = OTHER; note = 2'-Omethylguanosine
  modified_base 52: mod_base = OTHER; note = 2'-Omethylguanosine
  modified_base 53: mod_base = OTHER; note = 2'-Omethylguanosine
  modified_base 61: mod_base = OTHER; note = 2'-Omethylcytosine
  modified_base 62: mod_base = OTHER; note = 2'-Omethylcytosine
  modified_base 63: mod_base = OTHER; note = 2'-fluorocytosine
  modified_base 64: mod_base = OTHER; note = 2'-Omethylguanosine
  modified_base 65: mod_base = OTHER; note = 2'-Omethylguanosine
  modified_base 66: mod_base = OTHER; note = 2'-Omethylcytosine
  modified_base 67: mod_base = OTHER; note = 2'-Omethylguanosine
  modified_base 68: mod_base = OTHER; note = 2'-Omethylguanosine
  modified_base 69: mod_base = OTHER; note = 2'-fluoroadenosine
  modified_base 71: mod_base = OTHER; note = 2'-Omethyluridine

SEQ ID NO: 2597 - RNA, 76 nt, synthetic construct; identical to SEQ ID NO: 625
  source 1..76: mol_type = other RNA
  modified_base 1: mod_base = OTHER; note = 2'-Omethylguanosine phosphorothiorate
  modified_base 2: mod_base = OTHER; note = 2'-Omethylguanosine
  modified_base 3: mod_base = OTHER; note = 2'-Omethylcytosine
  modified_base 4: mod_base = OTHER; note = 2'-Omethyluridine
  modified_base 5: mod_base = OTHER; note = 2'-Omethylcytosine
  modified_base 6: mod_base = OTHER; note = 2'-Omethylcytosine
  modified_base 49: mod_base = OTHER; note = 2'-Omethylcytosine
  modified_base 50: mod_base = OTHER; note = 2'-Omethylcytosine
  modified_base 51: mod_base = OTHER; note = 2'-Omethylguanosine
  modified_base 52: mod_base = OTHER; note = 2'-Omethylguanosine
  modified_base 53: mod_base = OTHER; note = 2'-Omethylguanosine
  modified_base 61: mod_base = OTHER; note = 2'-Omethylcytosine
  modified_base 62: mod_base = OTHER; note = 2'-Omethylcytosine
  modified_base 63: mod_base = OTHER; note = 2'-fluorocytosine
  modified_base 64: mod_base = OTHER; note = 2'-Omethylguanosine
  modified_base 65: mod_base = OTHER; note = 2'-Omethylguanosine
  modified_base 66: mod_base = OTHER; note = 2'-Omethylcytosine
  modified_base 67: mod_base = OTHER; note = 2'-Omethylguanosine
  modified_base 68: mod_base = OTHER; note = 2'-Omethylguanosine
  modified_base 69: mod_base = OTHER; note = 2'-fluoroadenosine
  modified_base 72: mod_base = OTHER; note = 2'-Omethylcytosine

SEQ ID NO: 2598 - RNA, 76 nt, synthetic construct; identical to SEQ ID NO: 625
  source 1..76: mol_type = other RNA
  modified_base 1: mod_base = OTHER; note = 2'-Omethylguanosine phosphorothiorate
  modified_base 2: mod_base = OTHER; note = 2'-Omethylguanosine
  modified_base 3: mod_base = OTHER; note = 2'-Omethylcytosine
  modified_base 4: mod_base = OTHER; note = 2'-Omethyluridine
  modified_base 5: mod_base = OTHER; note = 2'-Omethylcytosine
  modified_base 6: mod_base = OTHER; note = 2'-Omethylcytosine
  modified_base 49: mod_base = OTHER; note = 2'-Omethylcytosine
  modified_base 50: mod_base = OTHER; note = 2'-Omethylcytosine
  modified_base 51: mod_base = OTHER; note = 2'-Omethylguanosine
  modified_base 52: mod_base = OTHER; note = 2'-Omethylguanosine
  modified_base 53: mod_base = OTHER; note = 2'-Omethylguanosine
  modified_base 61: mod_base = OTHER; note = 2'-Omethylcytosine
  modified_base 62: mod_base = OTHER; note = 2'-Omethylcytosine
  modified_base 63: mod_base = OTHER; note = 2'-fluorocytosine
  modified_base 64: mod_base = OTHER; note = 2'-Omethylguanosine
  modified_base 65: mod_base = OTHER; note = 2'-Omethylguanosine
  modified_base 66: mod_base = OTHER; note = 2'-Omethylcytosine
  modified_base 67: mod_base = OTHER; note = 2'-Omethylguanosine
  modified_base 68: mod_base = OTHER; note = 2'-Omethylguanosine
  modified_base 69: mod_base = OTHER; note = 2'-fluoroadenosine
  modified_base 71: mod_base = OTHER; note = 2'-Omethyluridine
  modified_base 72: mod_base = OTHER; note = 2'-Omethylcytosine

SEQ ID NO: 2599 - RNA, 76 nt, synthetic construct; identical to SEQ ID NO: 625
  source 1..76: mol_type = other RNA
  modified_base 1: mod_base = OTHER; note = 2'-Omethylguanosine phosphorothiorate
  modified_base 2: mod_base = OTHER; note = 2'-Omethylguanosine
  modified_base 3: mod_base = OTHER; note = 2'-Omethylcytosine
  modified_base 4: mod_base = OTHER; note = 2'-Omethyluridine
  modified_base 5: mod_base = OTHER; note = 2'-Omethylcytosine
  modified_base 6: mod_base = OTHER; note = 2'-Omethylcytosine
  modified_base 54: mod_base = OTHER; note = 2'-Omethyluridine
  modified_base 56: mod_base = OTHER; note = 2'-Omethylcytosine
  modified_base 57: mod_base = OTHER; note = 2'-fluoroguanosine
  modified_base 59: mod_base = OTHER; note = 2'-Omethylguanosine
  modified_base 73: mod_base = OTHER; note = 2'-Omethylguanosine

SEQ ID NO: 2600 - RNA, 76 nt, synthetic construct; identical to SEQ ID NO: 625
  source 1..76: mol_type = other RNA
  modified_base 1: mod_base = OTHER; note = 2'-Omethylguanosine phosphorothiorate
  modified_base 2: mod_base = OTHER; note = 2'-Omethylguanosine
  modified_base 3: mod_base = OTHER; note = 2'-Omethylcytosine
  modified_base 4: mod_base = OTHER; note = 2'-Omethyluridine
  modified_base 5: mod_base = OTHER; note = 2'-Omethylcytosine
  modified_base 6: mod_base = OTHER; note = 2'-Omethylcytosine
  modified_base 54: mod_base = OTHER; note = 2'-Omethyluridine phosphorothiorate
  modified_base 56: mod_base = OTHER; note = 2'-Omethylcytosine
  modified_base 57: mod_base = OTHER; note = 2'-fluoroguanosine
  modified_base 59: mod_base = OTHER; note = 2'-Omethylguanosine
  modified_base 73: mod_base = OTHER; note = 2'-Omethylguanosine

SEQ ID NO: 2601 - RNA, 76 nt, synthetic construct; identical to SEQ ID NO: 625
  source 1..76: mol_type = other RNA
  modified_base 1: mod_base = OTHER; note = 2'-Omethylguanosine phosphorothiorate
  modified_base 2: mod_base = OTHER; note = 2'-Omethylguanosine
  modified_base 3: mod_base = OTHER; note = 2'-Omethylcytosine
  modified_base 4: mod_base = OTHER; note = 2'-Omethyluridine
  modified_base 5: mod_base = OTHER; note = 2'-Omethylcytosine
  modified_base 6: mod_base = OTHER; note = 2'-Omethylcytosine
  modified_base 54: mod_base = OTHER; note = 2'-Omethyluridine
  modified_base 55: mod_base = OTHER; note = Uridine phosphorothiorate
  modified_base 56: mod_base = OTHER; note = 2'-Omethylcytosine
  modified_base 57: mod_base = OTHER; note = 2'-fluoroguanosine
  modified_base 59: mod_base = OTHER; note = 2'-Omethylguanosine
  modified_base 73: mod_base = OTHER; note = 2'-Omethylguanosine

SEQ ID NO: 2602 - RNA, 76 nt, synthetic construct; identical to SEQ ID NO: 625
  source 1..76: mol_type = other RNA
  modified_base 1: mod_base = OTHER; note = 2'-Omethylguanosine phosphorothiorate
  modified_base 2: mod_base = OTHER; note = 2'-Omethylguanosine
  modified_base 3: mod_base = OTHER; note = 2'-Omethylcytosine
  modified_base 4: mod_base = OTHER; note = 2'-Omethyluridine
  modified_base 5: mod_base = OTHER; note = 2'-Omethylcytosine
  modified_base 6: mod_base = OTHER; note = 2'-Omethylcytosine
  modified_base 54: mod_base = OTHER; note = 2'-Omethyluridine phosphorothiorate
  modified_base 55: mod_base = OTHER; note = Uridine phosphorothiorate
  modified_base 56: mod_base = OTHER; note = 2'-Omethylcytosine
  modified_base 57: mod_base = OTHER; note = 2'-fluoroguanosine
  modified_base 59: mod_base = OTHER; note = 2'-Omethylguanosine
  modified_base 73: mod_base = OTHER; note = 2'-Omethylguanosine

SEQ ID NO: 2603 - RNA, 76 nt, synthetic construct; identical to SEQ ID NO: 625
  source 1..76: mol_type = other RNA
  modified_base 1: mod_base = OTHER; note = 2'-Omethylguanosine phosphorothiorate
  modified_base 2: mod_base = OTHER; note = 2'-Omethylguanosine
  modified_base 3: mod_base = OTHER; note = 2'-Omethylcytosine
  modified_base 4: mod_base = OTHER; note = 2'-Omethyluridine
  modified_base 5: mod_base = OTHER; note = 2'-Omethylcytosine
  modified_base 6: mod_base = OTHER; note = 2'-Omethylcytosine
  modified_base 54: mod_base = OTHER; note = 2'-Omethyluridine
  modified_base 55: mod_base = OTHER; note = Uridine phosphorothiorate
  modified_base 56: mod_base = OTHER; note = 2'-Omethylcytosine
  modified_base 57: mod_base = OTHER; note = 2'-fluoroguanosine
  modified_base 58: mod_base = OTHER; note = Adenosine phosphorothiorate
  modified_base 59: mod_base = OTHER; note = 2'-Omethylguanosine
  modified_base 73: mod_base = OTHER; note = 2'-Omethylguanosine

SEQ ID NO: 2604 - RNA, 76 nt, synthetic construct; identical to SEQ ID NO: 625
  source 1..76: mol_type = other RNA
  modified_base 1: mod_base = OTHER; note = 2'-Omethylguanosine phosphorothiorate
  modified_base 2: mod_base = OTHER; note = 2'-Omethylguanosine
  modified_base 3: mod_base = OTHER; note = 2'-Omethylcytosine
  modified_base 4: mod_base = OTHER; note = 2'-Omethyluridine
  modified_base 5: mod_base = OTHER; note = 2'-Omethylcytosine
  modified_base 6: mod_base = OTHER; note = 2'-Omethylcytosine
  modified_base 54: mod_base = OTHER; note = 2'-Omethyluridine phosphorothiorate
  modified_base 55: mod_base = OTHER; note = Uridine phosphorothiorate
  modified_base 56: mod_base = OTHER; note = 2'-Omethylcytosine
  modified_base 57: mod_base = OTHER; note = 2'-fluoroguanosine
  modified_base 58: mod_base = OTHER; note = Adenosine phosphorothiorate
  modified_base 59: mod_base = OTHER; note = 2'-Omethylguanosine
  modified_base 73: mod_base = OTHER; note = 2'-Omethylguanosine

SEQ ID NO: 2605 - RNA, 76 nt, synthetic construct; identical to SEQ ID NO: 625
  source 1..76: mol_type = other RNA
  modified_base 1: mod_base = OTHER; note = 2'-Omethylguanosine phosphorothiorate
  modified_base 2: mod_base = OTHER; note = 2'-Omethylguanosine
  modified_base 3: mod_base = OTHER; note = 2'-Omethylcytosine
  modified_base 4: mod_base = OTHER; note = 2'-Omethyluridine
  modified_base 5: mod_base = OTHER; note = 2'-Omethylcytosine
  modified_base 6: mod_base = OTHER; note = 2'-Omethylcytosine
  modified_base 54: mod_base = OTHER; note = 2'-Omethyluridine
  modified_base 55: mod_base = OTHER; note = Uridine phosphorothiorate
  modified_base 56: mod_base = OTHER; note = 2'-Omethylcytosine
  modified_base 57: mod_base = OTHER; note = 2'-fluoroguanosine
  modified_base 58: mod_base = OTHER; note = Adenosine phosphorothiorate
  modified_base 59: mod_base = OTHER; note = 2'-Omethylguanosine
  modified_base 60: mod_base = OTHER; note = 2'-fluorouridine
  modified_base 73: mod_base = OTHER; note = 2'-Omethylguanosine

SEQ ID NO: 2606 - RNA, 76 nt, synthetic construct; identical to SEQ ID NO: 625
  source 1..76: mol_type = other RNA
  modified_base 1: mod_base = OTHER; note = 2'-Omethylguanosine phosphorothiorate
  modified_base 2: mod_base = OTHER; note = 2'-Omethylguanosine
  modified_base 3: mod_base = OTHER; note = 2'-Omethylcytosine
  modified_base 4: mod_base = OTHER; note = 2'-Omethyluridine
  modified_base 5: mod_base = OTHER; note = 2'-Omethylcytosine
  modified_base 6: mod_base = OTHER; note = 2'-Omethylcytosine
  modified_base 54: mod_base = OTHER; note = 2'-Omethyluridine phosphorothiorate
  modified_base 55: mod_base = OTHER; note = Uridine phosphorothiorate
  modified_base 56: mod_base = OTHER; note = 2'-Omethylcytosine
  modified_base 57: mod_base = OTHER; note = 2'-fluoroguanosine
  modified_base 58: mod_base = OTHER; note = Adenosine phosphorothiorate
  modified_base 59: mod_base = OTHER; note = 2'-Omethylguanosine
  modified_base 60: mod_base = OTHER; note = 2'-fluorouridine
  modified_base 73: mod_base = OTHER; note = 2'-Omethylguanosine

SEQ ID NO: 2607 - RNA, 76 nt, synthetic construct; identical to SEQ ID NO: 625
  source 1..76: mol_type = other RNA
  modified_base 1: mod_base = OTHER; note = 2'-Omethylguanosine phosphorothiorate
  modified_base 2: mod_base = OTHER; note = 2'-Omethylguanosine
  modified_base 3: mod_base = OTHER; note = 2'-Omethylcytosine
  modified_base 4: mod_base = OTHER; note = 2'-Omethyluridine
  modified_base 5: mod_base = OTHER; note = 2'-Omethylcytosine
  modified_base 6: mod_base = OTHER; note = 2'-Omethylcytosine
  modified_base 16: mod_base = OTHER; note = 2'-Omethyluridine
  modified_base 17: mod_base = OTHER; note = 2'-Omethylguanosine
  modified_base 18: mod_base = OTHER; note = 2'-Omethylguanosine
  modified_base 54: mod_base = OTHER; note = 2'-Omethyluridine
  modified_base 56: mod_base = OTHER; note = 2'-Omethylcytosine
  modified_base 57: mod_base = OTHER; note = 2'-fluoroguanosine
  modified_base 59: mod_base = OTHER; note = 2'-Omethylguanosine
  modified_base 73: mod_base = OTHER; note = 2'-Omethylguanosine

SEQ ID NO: 2608 - RNA, 76 nt, synthetic construct; identical to SEQ ID NO: 625
  source 1..76: mol_type = other RNA
  modified_base 1: mod_base = OTHER; note = 2'-Omethylguanosine phosphorothiorate
  modified_base 2: mod_base = OTHER; note = 2'-Omethylguanosine
  modified_base 3: mod_base = OTHER; note = 2'-Omethylcytosine
  modified_base 4: mod_base = OTHER; note = 2'-Omethyluridine
  modified_base 5: mod_base = OTHER; note = 2'-Omethylcytosine
  modified_base 6: mod_base = OTHER; note = 2'-Omethylcytosine
  modified_base 16: mod_base = OTHER; note = 2'-Omethyluridine
  modified_base 17: mod_base = OTHER; note = 2'-Omethylguanosine
  modified_base 18: mod_base = OTHER; note = 2'-Omethylguanosine
  modified_base 54: mod_base = OTHER; note = 2'-Omethyluridine phosphorothiorate
  modified_base 56: mod_base = OTHER; note = 2'-Omethylcytosine
  modified_base 57: mod_base = OTHER; note = 2'-fluoroguanosine
  modified_base 59: mod_base = OTHER; note = 2'-Omethylguanosine
  modified_base 73: mod_base = OTHER; note = 2'-Omethylguanosine

SEQ ID NO: 2609 - RNA, 76 nt, synthetic construct; identical to SEQ ID NO: 625
  source 1..76: mol_type = other RNA
  modified_base 1: mod_base = OTHER; note = 2'-Omethylguanosine phosphorothiorate
  modified_base 2: mod_base = OTHER; note = 2'-Omethylguanosine
  modified_base 3: mod_base = OTHER; note = 2'-Omethylcytosine
  modified_base 4: mod_base = OTHER; note = 2'-Omethyluridine
  modified_base 5: mod_base = OTHER; note = 2'-Omethylcytosine
  modified_base 6: mod_base = OTHER; note = 2'-Omethylcytosine
  modified_base 16: mod_base = OTHER; note = 2'-Omethyluridine
  modified_base 17: mod_base = OTHER; note = 2'-Omethylguanosine
  modified_base 18: mod_base = OTHER; note = 2'-Omethylguanosine
  modified_base 54: mod_base = OTHER; note = 2'-Omethyluridine phosphorothiorate
  modified_base 55: mod_base = OTHER; note = Uridine phosphorothiorate
  modified_base 56: mod_base = OTHER; note = 2'-Omethylcytosine
  modified_base 57: mod_base = OTHER; note = 2'-fluoroguanosine
  modified_base 59: mod_base = OTHER; note = 2'-Omethylguanosine
  modified_base 73: mod_base = OTHER; note = 2'-Omethylguanosine

SEQ ID NO: 2610 - RNA, 76 nt, synthetic construct; identical to SEQ ID NO: 625
  source 1..76: mol_type = other RNA
  modified_base 1: mod_base = OTHER; note = 2'-Omethylguanosine phosphorothiorate
  modified_base 2: mod_base = OTHER; note = 2'-Omethylguanosine
  modified_base 3: mod_base = OTHER; note = 2'-Omethylcytosine
  modified_base 4: mod_base = OTHER; note = 2'-Omethyluridine
  modified_base 5: mod_base = OTHER; note = 2'-Omethylcytosine
  modified_base 6: mod_base = OTHER; note = 2'-Omethylcytosine
  modified_base 16: mod_base = OTHER; note = 2'-Omethyluridine
  modified_base 17: mod_base = OTHER; note = 2'-Omethylguanosine
  modified_base 18: mod_base = OTHER; note = 2'-Omethylguanosine
  modified_base 54: mod_base = OTHER; note = 2'-Omethyluridine phosphorothiorate
  modified_base 55: mod_base = OTHER; note = Uridine phosphorothiorate
  modified_base 56: mod_base = OTHER; note = 2'-Omethylcytosine
  modified_base 57: mod_base = OTHER; note = 2'-fluoroguanosine
  modified_base 58: mod_base = OTHER; note = Adenosine phosphorothiorate
  modified_base 59: mod_base = OTHER; note = 2'-Omethylguanosine
  modified_base 73: mod_base = OTHER; note = 2'-Omethylguanosine

SEQ ID NO: 2611 - RNA, 76 nt, synthetic construct; identical to SEQ ID NO: 625
  source 1..76: mol_type = other RNA
  modified_base 1: mod_base = OTHER; note = 2'-Omethylguanosine phosphorothiorate
  modified_base 2: mod_base = OTHER; note = 2'-Omethylguanosine
  modified_base 3: mod_base = OTHER; note = 2'-Omethylcytosine
  modified_base 4: mod_base = OTHER; note = 2'-Omethyluridine
  modified_base 5: mod_base = OTHER; note = 2'-Omethylcytosine
  modified_base 6: mod_base = OTHER; note = 2'-Omethylcytosine
  modified_base 16: mod_base = OTHER; note = 2'-Omethyluridine
  modified_base 17: mod_base = OTHER; note = 2'-Omethylguanosine
  modified_base 18: mod_base = OTHER; note = 2'-Omethylguanosine
  modified_base 54: mod_base = OTHER; note = 2'-Omethyluridine phosphorothiorate
  modified_base 55: mod_base = OTHER; note = Uridine phosphorothiorate
  modified_base 56: mod_base = OTHER; note = 2'-Omethylcytosine
  modified_base 57: mod_base = OTHER; note = 2'-fluoroguanosine
  modified_base 58: mod_base = OTHER; note = Adenosine phosphorothiorate
  modified_base 59: mod_base = OTHER; note = 2'-Omethylguanosine
  modified_base 60: mod_base = OTHER; note = 2'-fluorouridine
  modified_base 73: mod_base = OTHER; note = 2'-Omethylguanosine

SEQ ID NO: 2612 - RNA, 76 nt, synthetic construct; identical to SEQ ID NO: 625
  source 1..76: mol_type = other RNA
  modified_base 1: mod_base = OTHER; note = 2'-Omethylguanosine phosphorothiorate
  modified_base 2: mod_base = OTHER; note = 2'-Omethylguanosine
  modified_base 3: mod_base = OTHER; note = 2'-Omethylcytosine
  modified_base 4: mod_base = OTHER; note = 2'-Omethyluridine
  modified_base 5: mod_base = OTHER; note = 2'-Omethylcytosine
  modified_base 6: mod_base = OTHER; note = 2'-Omethylcytosine
  modified_base 14: mod_base = OTHER; note = 2'-Omethyladenosine
  modified_base 15: mod_base = OTHER; note = 2'-fluoroadenosine
  modified_base 16: mod_base = OTHER; note = 2'-Omethyluridine
  modified_base 17: mod_base = OTHER; note = 2'-Omethylguanosine
  modified_base 18: mod_base = OTHER; note = 2'-Omethylguanosine
  modified_base 19: mod_base = OTHER; note = 2'-fluoroadenosine
  modified_base 20: mod_base = OTHER; note = 2'-Omethyluridine
  modified_base 54: mod_base = OTHER; note = 2'-Omethyluridine
  modified_base 56: mod_base = OTHER; note = 2'-Omethylcytosine
  modified_base 57: mod_base = OTHER; note = 2'-fluoroguanosine
  modified_base 59: mod_base = OTHER; note = 2'-Omethylguanosine
  modified_base 73: mod_base = OTHER; note = 2'-Omethylguanosine

SEQ ID NO: 2613 - RNA, 76 nt, synthetic construct; identical to SEQ ID NO: 625
  source 1..76: mol_type = other RNA
  modified_base 1: mod_base = OTHER; note = 2'-Omethylguanosine phosphorothiorate
  modified_base 2: mod_base = OTHER; note = 2'-Omethylguanosine
  modified_base 3: mod_base = OTHER; note = 2'-Omethylcytosine
  modified_base 4: mod_base = OTHER; note = 2'-Omethyluridine
  modified_base 5: mod_base = OTHER; note = 2'-Omethylcytosine
  modified_base 6: mod_base = OTHER; note = 2'-Omethylcytosine
  modified_base 14: mod_base = OTHER; note = 2'-Omethyladenosine
  modified_base 15: mod_base = OTHER; note = 2'-fluoroadenosine
  modified_base 16: mod_base = OTHER; note = 2'-Omethyluridine
  modified_base 17: mod_base = OTHER; note = 2'-Omethylguanosine
  modified_base 18: mod_base = OTHER; note = 2'-Omethylguanosine
  modified_base 19: mod_base = OTHER; note = 2'-fluoroadenosine
  modified_base 20: mod_base = OTHER; note = 2'-Omethyluridine
  modified_base 54: mod_base = OTHER; note = 2'-Omethyluridine phosphorothiorate
  modified_base 56: mod_base = OTHER; note = 2'-Omethylcytosine
  modified_base 57: mod_base = OTHER; note = 2'-fluoroguanosine
  modified_base 59: mod_base = OTHER; note = 2'-Omethylguanosine
  modified_base 73: mod_base = OTHER; note = 2'-Omethylguanosine

SEQ ID NO: 2614 - RNA, 76 nt, synthetic construct; identical to SEQ ID NO: 625
  source 1..76: mol_type = other RNA
  modified_base 1: mod_base = OTHER; note = 2'-Omethylguanosine phosphorothiorate
  modified_base 2: mod_base = OTHER; note = 2'-Omethylguanosine
  modified_base 3: mod_base = OTHER; note = 2'-Omethylcytosine
  modified_base 4: mod_base = OTHER; note = 2'-Omethyluridine
  modified_base 5: mod_base = OTHER; note = 2'-Omethylcytosine
  modified_base 6: mod_base = OTHER; note = 2'-Omethylcytosine
  modified_base 14: mod_base = OTHER; note = 2'-Omethyladenosine
  modified_base 15: mod_base = OTHER; note = 2'-fluoroadenosine
  modified_base 16: mod_base = OTHER; note = 2'-Omethyluridine
  modified_base 17: mod_base = OTHER; note = 2'-Omethylguanosine
  modified_base 18: mod_base = OTHER; note = 2'-Omethylguanosine
  modified_base 19: mod_base = OTHER; note = 2'-fluoroadenosine
  modified_base 20: mod_base = OTHER; note = 2'-Omethyluridine
  modified_base 54: mod_base = OTHER; note = 2'-Omethyluridine phosphorothiorate
  modified_base 55: mod_base = OTHER; note = Uridine phosphorothiorate
  modified_base 56: mod_base = OTHER; note = 2'-Omethylcytosine
  modified_base 57: mod_base = OTHER; note = 2'-fluoroguanosine
  modified_base 59: mod_base = OTHER; note = 2'-Omethylguanosine
  modified_base 73: mod_base = OTHER; note = 2'-Omethylguanosine

SEQ ID NO: 2615 - RNA, 76 nt, synthetic construct; identical to SEQ ID NO: 625
  source 1..76: mol_type = other RNA
  modified_base 1: mod_base = OTHER; note = 2'-Omethylguanosine phosphorothiorate
  modified_base 2: mod_base = OTHER; note = 2'-Omethylguanosine
  modified_base 3: mod_base = OTHER; note = 2'-Omethylcytosine
  modified_base 4: mod_base = OTHER; note = 2'-Omethyluridine
  modified_base 5: mod_base = OTHER; note = 2'-Omethylcytosine
  modified_base 6: mod_base = OTHER; note = 2'-Omethylcytosine
  modified_base 14: mod_base = OTHER; note = 2'-Omethyladenosine
  modified_base 15: mod_base = OTHER; note = 2'-fluoroadenosine
  modified_base 16: mod_base = OTHER; note = 2'-Omethyluridine
  modified_base 17: mod_base = OTHER; note = 2'-Omethylguanosine
  modified_base 18: mod_base = OTHER; note = 2'-Omethylguanosine
  modified_base 19: mod_base = OTHER; note = 2'-fluoroadenosine
  modified_base 20: mod_base = OTHER; note = 2'-Omethyluridine
  modified_base 54: mod_base = OTHER; note = 2'-Omethyluridine phosphorothiorate
  modified_base 55: mod_base = OTHER; note = Uridine phosphorothiorate
  modified_base 56: mod_base = OTHER; note = 2'-Omethylcytosine
  modified_base 57: mod_base = OTHER; note = 2'-fluoroguanosine
  modified_base 58: mod_base = OTHER; note = Adenosine phosphorothiorate
  modified_base 59: mod_base = OTHER; note = 2'-Omethylguanosine
  modified_base 73: mod_base = OTHER; note = 2'-Omethylguanosine

SEQ ID NO: 2616 - RNA, 76 nt, synthetic construct; identical to SEQ ID NO: 625
  source 1..76: mol_type = other RNA
  modified_base 1: mod_base = OTHER; note = 2'-Omethylguanosine phosphorothiorate
  modified_base 2: mod_base = OTHER; note = 2'-Omethylguanosine
  modified_base 3: mod_base = OTHER; note = 2'-Omethylcytosine
  modified_base 4: mod_base = OTHER; note = 2'-Omethyluridine
  modified_base 5: mod_base = OTHER; note = 2'-Omethylcytosine
  modified_base 6: mod_base = OTHER; note = 2'-Omethylcytosine
  modified_base 14: mod_base = OTHER; note = 2'-Omethyladenosine
  modified_base 15: mod_base = OTHER; note = 2'-fluoroadenosine
  modified_base 16: mod_base = OTHER; note = 2'-Omethyluridine
  modified_base 17: mod_base = OTHER; note = 2'-Omethylguanosine
  modified_base 18: mod_base = OTHER; note = 2'-Omethylguanosine
  modified_base 19: mod_base = OTHER; note = 2'-fluoroadenosine
  modified_base 20: mod_base = OTHER; note = 2'-Omethyluridine
  modified_base 54: mod_base = OTHER; note = 2'-Omethyluridine phosphorothiorate
  modified_base 55: mod_base = OTHER; note = Uridine phosphorothiorate
  modified_base 56: mod_base = OTHER; note = 2'-Omethylcytosine
  modified_base 57: mod_base = OTHER; note = 2'-fluoroguanosine
  modified_base 58: mod_base = OTHER; note = Adenosine phosphorothiorate
  modified_base 59: mod_base = OTHER; note = 2'-Omethylguanosine
  modified_base 60: mod_base = OTHER; note = 2'-fluorouridine
  modified_base 73: mod_base = OTHER; note = 2'-Omethylguanosine

SEQ ID NO: 2617 - RNA, 76 nt, synthetic construct; identical to SEQ ID NO: 625
  source 1..76: mol_type = other RNA
  modified_base 1: mod_base = OTHER; note = 2'-Omethylguanosine phosphorothiorate
  modified_base 2: mod_base = OTHER; note = 2'-Omethylguanosine
  modified_base 3: mod_base = OTHER; note = 2'-Omethylcytosine
  modified_base 4: mod_base = OTHER; note = 2'-Omethyluridine
  modified_base 5: mod_base = OTHER; note = 2'-Omethylcytosine
  modified_base 6: mod_base = OTHER; note = 2'-Omethylcytosine
  modified_base 14: mod_base = OTHER; note = 2'-Omethyladenosine
  modified_base 15: mod_base = OTHER; note = 2'-fluoroadenosine
  modified_base 16: mod_base = OTHER; note = 2'-Omethyluridine
  modified_base 17: mod_base = OTHER; note = 2'-Omethylguanosine
  modified_base 18: mod_base = OTHER; note = 2'-Omethylguanosine
  modified_base 19: mod_base = OTHER; note = 2'-fluoroadenosine
  modified_base 20: mod_base = OTHER; note = 2'-Omethyluridine phosphorothiorate
  modified_base 54: mod_base = OTHER; note = 2'-Omethyluridine
  modified_base 56: mod_base = OTHER; note = 2'-Omethylcytosine
  modified_base 57: mod_base = OTHER; note = 2'-fluoroguanosine
  modified_base 59: mod_base = OTHER; note = 2'-Omethylguanosine
  modified_base 73: mod_base = OTHER; note = 2'-Omethylguanosine

SEQ ID NO: 2618 - RNA, 76 nt, synthetic construct; identical to SEQ ID NO: 625
  source 1..76: mol_type = other RNA
  modified_base 1: mod_base = OTHER; note = 2'-Omethylguanosine phosphorothiorate
  modified_base 2: mod_base = OTHER; note = 2'-Omethylguanosine
  modified_base 3: mod_base = OTHER; note = 2'-Omethylcytosine
  modified_base 4: mod_base = OTHER; note = 2'-Omethyluridine
  modified_base 5: mod_base = OTHER; note = 2'-Omethylcytosine
  modified_base 6: mod_base = OTHER; note = 2'-Omethylcytosine
  modified_base 14: mod_base = OTHER; note = 2'-Omethyladenosine
  modified_base 15: mod_base = OTHER; note = 2'-fluoroadenosine
  modified_base 16: mod_base = OTHER; note = 2'-Omethyluridine
  modified_base 17: mod_base = OTHER; note = 2'-Omethylguanosine
  modified_base 18: mod_base = OTHER; note = 2'-Omethylguanosine
  modified_base 19: mod_base = OTHER; note = 2'-fluoroadenosine
  modified_base 20: mod_base = OTHER; note = 2'-Omethyluridine phosphorothiorate
  modified_base 54: mod_base = OTHER; note = 2'-Omethyluridine phosphorothiorate
  modified_base 56: mod_base = OTHER; note = 2'-Omethylcytosine
  modified_base 57: mod_base = OTHER; note = 2'-fluoroguanosine
  modified_base 59: mod_base = OTHER; note = 2'-Omethylguanosine
  modified_base 73: mod_base = OTHER; note = 2'-Omethylguanosine

SEQ ID NO: 2619 - RNA, 76 nt, synthetic construct; identical to SEQ ID NO: 625
  source 1..76: mol_type = other RNA
  modified_base 1: mod_base = OTHER; note = 2'-Omethylguanosine phosphorothiorate
  modified_base 2: mod_base = OTHER; note = 2'-Omethylguanosine
  modified_base 3: mod_base = OTHER; note = 2'-Omethylcytosine
  modified_base 4: mod_base = OTHER; note = 2'-Omethyluridine
  modified_base 5: mod_base = OTHER; note = 2'-Omethylcytosine
  modified_base 6: mod_base = OTHER; note = 2'-Omethylcytosine
  modified_base 14: mod_base = OTHER; note = 2'-Omethyladenosine
  modified_base 15: mod_base = OTHER; note = 2'-fluoroadenosine
  modified_base 16: mod_base = OTHER; note = 2'-Omethyluridine
  modified_base 17: mod_base = OTHER; note = 2'-Omethylguanosine
  modified_base 18: mod_base = OTHER; note = 2'-Omethylguanosine
  modified_base 19: mod_base = OTHER; note = 2'-fluoroadenosine
  modified_base 20: mod_base = OTHER; note = 2'-Omethyluridine phosphorothiorate
  modified_base 54: mod_base = OTHER; note = 2'-Omethyluridine phosphorothiorate
  modified_base 55: mod_base = OTHER; note = Uridine phosphorothiorate
  modified_base 56: mod_base = OTHER; note = 2'-Omethylcytosine
  modified_base 57: mod_base = OTHER; note = 2'-fluoroguanosine
  modified_base 59: mod_base = OTHER; note = 2'-Omethylguanosine
  modified_base 73: mod_base = OTHER; note = 2'-Omethylguanosine

SEQ ID NO: 2620 - RNA, 76 nt, synthetic construct; identical to SEQ ID NO: 625
  source 1..76: mol_type = other RNA
  modified_base 1: mod_base = OTHER; note = 2'-Omethylguanosine phosphorothiorate
  modified_base 2: mod_base = OTHER; note = 2'-Omethylguanosine
  modified_base 3: mod_base = OTHER; note = 2'-Omethylcytosine
  modified_base 4: mod_base = OTHER; note = 2'-Omethyluridine
  modified_base 5: mod_base = OTHER; note = 2'-Omethylcytosine
  modified_base 6: mod_base = OTHER; note = 2'-Omethylcytosine
  modified_base 14: mod_base = OTHER; note = 2'-Omethyladenosine
  modified_base 15: mod_base = OTHER; note = 2'-fluoroadenosine
  modified_base 16: mod_base = OTHER; note = 2'-Omethyluridine
  modified_base 17: mod_base = OTHER; note = 2'-Omethylguanosine
  modified_base 18: mod_base = OTHER; note = 2'-Omethylguanosine
  modified_base 19: mod_base = OTHER; note = 2'-fluoroadenosine
  modified_base 20: mod_base = OTHER; note = 2'-Omethyluridine phosphorothiorate
  modified_base 54: mod_base = OTHER; note = 2'-Omethyluridine phosphorothiorate
  modified_base 55: mod_base = OTHER; note = Uridine phosphorothiorate
  modified_base 56: mod_base = OTHER; note = 2'-Omethylcytosine
  modified_base 57: mod_base = OTHER; note = 2'-fluoroguanosine
  modified_base 58: mod_base = OTHER; note = Adenosine phosphorothiorate
  modified_base 59: mod_base = OTHER; note = 2'-Omethylguanosine
  modified_base 73: mod_base = OTHER; note = 2'-Omethylguanosine

SEQ ID NO: 2621 - RNA, 76 nt, synthetic construct; identical to SEQ ID NO: 625
  source 1..76: mol_type = other RNA
  modified_base 1: mod_base = OTHER; note = 2'-Omethylguanosine phosphorothiorate
  modified_base 2: mod_base = OTHER; note = 2'-Omethylguanosine
  modified_base 3: mod_base = OTHER; note = 2'-Omethylcytosine
  modified_base 4: mod_base = OTHER; note = 2'-Omethyluridine
  modified_base 5: mod_base = OTHER; note = 2'-Omethylcytosine
  modified_base 6: mod_base = OTHER; note = 2'-Omethylcytosine
  modified_base 14: mod_base = OTHER; note = 2'-Omethyladenosine
  modified_base 15: mod_base = OTHER; note = 2'-fluoroadenosine
  modified_base 16: mod_base = OTHER; note = 2'-Omethyluridine
  modified_base 17: mod_base = OTHER; note = 2'-Omethylguanosine
  modified_base 18: mod_base = OTHER; note = 2'-Omethylguanosine
  modified_base 19: mod_base = OTHER; note = 2'-fluoroadenosine
  modified_base 20: mod_base = OTHER; note = 2'-Omethyluridine phosphorothiorate
  modified_base 54: mod_base = OTHER; note = 2'-Omethyluridine phosphorothiorate
  modified_base 55: mod_base = OTHER; note = Uridine phosphorothiorate
  modified_base 56: mod_base = OTHER; note = 2'-Omethylcytosine
  modified_base 57: mod_base = OTHER; note = 2'-fluoroguanosine
  modified_base 58: mod_base = OTHER; note = Adenosine phosphorothiorate
  modified_base 59: mod_base = OTHER; note = 2'-Omethylguanosine
  modified_base 60: mod_base = OTHER; note = 2'-fluorouridine
  modified_base 73: mod_base = OTHER; note = 2'-Omethylguanosine

SEQ ID NO: 2622 - RNA, 76 nt, synthetic construct; identical to SEQ ID NO: 625
  source 1..76: mol_type = other RNA
  modified_base 1: mod_base = OTHER; note = 2'-Omethylguanosine phosphorothiorate
  modified_base 2: mod_base = OTHER; note = 2'-Omethylguanosine
  modified_base 3: mod_base = OTHER; note = 2'-Omethylcytosine
  modified_base 4: mod_base = OTHER; note = 2'-Omethyluridine
  modified_base 5: mod_base = OTHER; note = 2'-Omethylcytosine
  modified_base 6: mod_base = OTHER; note = 2'-Omethylcytosine
  modified_base 40: mod_base = OTHER; note = 2'-fluorouridine
  modified_base 41: mod_base = OTHER; note = 2'-Omethylcytosine
  modified_base 42: mod_base = OTHER; note = 2'-Omethyladenosine
  modified_base 43: mod_base = OTHER; note = 2'-Omethyladenosine
  modified_base 73: mod_base = OTHER; note = 2'-Omethylguanosine

SEQ ID NO: 2623 - RNA, 76 nt, synthetic construct; identical to SEQ ID NO: 625
  source 1..76: mol_type = other RNA
  modified_base 1: mod_base = OTHER; note = 2'-Omethylguanosine phosphorothiorate
  modified_base 2: mod_base = OTHER; note = 2'-Omethylguanosine
  modified_base 3: mod_base = OTHER; note = 2'-Omethylcytosine
  modified_base 4: mod_base = OTHER; note = 2'-Omethyluridine
  modified_base 5: mod_base = OTHER; note = 2'-Omethylcytosine
  modified_base 6: mod_base = OTHER; note = 2'-Omethylcytosine
  modified_base 40: mod_base = OTHER; note = 2'-fluorouridine
  modified_base 41: mod_base = OTHER; note = 2'-Omethylcytosine phosphorothiorate
  modified_base 42: mod_base = OTHER; note = 2'-Omethyladenosine
  modified_base 43: mod_base = OTHER; note = 2'-Omethyladenosine
  modified_base 73: mod_base = OTHER; note = 2'-Omethylguanosine

SEQ ID NO: 2624 - RNA, 76 nt, synthetic construct; identical to SEQ ID NO: 625
  source 1..76: mol_type = other RNA
  modified_base 1: mod_base = OTHER; note = 2'-Omethylguanosine phosphorothiorate
  modified_base 2: mod_base = OTHER; note = 2'-Omethylguanosine
  modified_base 3: mod_base = OTHER; note = 2'-Omethylcytosine
  modified_base 4: mod_base = OTHER; note = 2'-Omethyluridine
  modified_base 5: mod_base = OTHER; note = 2'-Omethylcytosine
  modified_base 6: mod_base = OTHER; note = 2'-Omethylcytosine
  modified_base 27: mod_base = OTHER; note = 2'-Omethyluridine
  modified_base 28: mod_base = OTHER; note = 2'-fluorouridine
  modified_base 29: mod_base = OTHER; note = 2'-Omethylguanosine
  modified_base 30: mod_base = OTHER; note = 2'-Omethylguanosine
  modified_base 40: mod_base = OTHER; note = 2'-fluorouridine
  modified_base 41: mod_base = OTHER; note = 2'-Omethylcytosine
  modified_base 42: mod_base = OTHER; note = 2'-Omethyladenosine
  modified_base 43: mod_base = OTHER; note = 2'-Omethyladenosine
  modified_base 73: mod_base = OTHER; note = 2'-Omethylguanosine

SEQ ID NO: 2625 - RNA, 76 nt, synthetic construct; identical to SEQ ID NO: 625
  source 1..76: mol_type = other RNA
  modified_base 1: mod_base = OTHER; note = 2'-Omethylguanosine phosphorothiorate
  modified_base 2: mod_base = OTHER; note = 2'-Omethylguanosine
  modified_base 3: mod_base = OTHER; note = 2'-Omethylcytosine
  modified_base 4: mod_base = OTHER; note = 2'-Omethyluridine
  modified_base 5: mod_base = OTHER; note = 2'-Omethylcytosine
  modified_base 6: mod_base = OTHER; note = 2'-Omethylcytosine
  modified_base 27: mod_base = OTHER; note = 2'-Omethyluridine
  modified_base 28: mod_base = OTHER; note = 2'-Omethyluridine
  modified_base 29: mod_base = OTHER; note = 2'-fluoroguanosine
  modified_base 30: mod_base = OTHER; note = 2'-Omethylguanosine
  modified_base 40: mod_base = OTHER; note = 2'-fluorouridine
  modified_base 41: mod_base = OTHER; note = 2'-Omethylcytosine
  modified_base 42: mod_base = OTHER; note = 2'-Omethyladenosine
  modified_base 43: mod_base = OTHER; note = 2'-Omethyladenosine
  modified_base 73: mod_base = OTHER; note = 2'-Omethylguanosine

SEQ ID NO: 2626 - RNA, 76 nt, synthetic construct; identical to SEQ ID NO: 625
  source 1..76: mol_type = other RNA
  modified_base 1: mod_base = OTHER; note = 2'-Omethylguanosine phosphorothiorate
  modified_base 2: mod_base = OTHER; note = 2'-Omethylguanosine
  modified_base 3: mod_base = OTHER; note = 2'-Omethylcytosine
  modified_base 4: mod_base = OTHER; note = 2'-Omethyluridine
  modified_base 5: mod_base = OTHER; note = 2'-Omethylcytosine
  modified_base 6: mod_base = OTHER; note = 2'-Omethylcytosine
  modified_base 27: mod_base = OTHER; note = 2'-Omethyluridine
  modified_base 28: mod_base = OTHER; note = 2'-Omethyluridine
  modified_base 29: mod_base = OTHER; note = 2'-Omethylguanosine
  modified_base 30: mod_base = OTHER; note = 2'-fluoroguanosine
  modified_base 40: mod_base = OTHER; note = 2'-fluorouridine
  modified_base 41: mod_base = OTHER; note = 2'-Omethylcytosine
  modified_base 42: mod_base = OTHER; note = 2'-Omethyladenosine
  modified_base 43: mod_base = OTHER; note = 2'-Omethyladenosine
  modified_base 73: mod_base = OTHER; note = 2'-Omethylguanosine

SEQ ID NO: 2627 - RNA, 76 nt, synthetic construct; identical to SEQ ID NO: 625
  source 1..76: mol_type = other RNA
  modified_base 1: mod_base = OTHER; note = 2'-Omethylguanosine phosphorothiorate
  modified_base 2: mod_base = OTHER; note = 2'-Omethylguanosine
  modified_base 3: mod_base = OTHER; note = 2'-Omethylcytosine
  modified_base 4: mod_base = OTHER; note = 2'-Omethyluridine
  modified_base 5: mod_base = OTHER; note = 2'-Omethylcytosine
  modified_base 6: mod_base = OTHER; note = 2'-Omethylcytosine
  modified_base 27: mod_base = OTHER; note = 2'-Omethyluridine
  modified_base 28: mod_base = OTHER; note = 2'-fluorouridine
  modified_base 29: mod_base = OTHER; note = 2'-fluoroguanosine
  modified_base 30: mod_base = OTHER; note = 2'-Omethylguanosine
  modified_base 40: mod_base = OTHER; note = 2'-fluorouridine
  modified_base 41: mod_base = OTHER; note = 2'-Omethylcytosine
  modified_base 42: mod_base = OTHER; note = 2'-Omethyladenosine
  modified_base 43: mod_base = OTHER; note = 2'-Omethyladenosine
  modified_base 73: mod_base = OTHER; note = 2'-Omethylguanosine

SEQ ID NO: 2628 - RNA, 76 nt, synthetic construct; identical to SEQ ID NO: 625
  source 1..76: mol_type = other RNA
  modified_base 1: mod_base = OTHER; note = 2'-Omethylguanosine phosphorothiorate
  modified_base 2: mod_base = OTHER; note = 2'-Omethylguanosine
  modified_base 3: mod_base = OTHER; note = 2'-Omethylcytosine
  modified_base 4: mod_base = OTHER; note = 2'-Omethyluridine
  modified_base 5: mod_base = OTHER; note = 2'-Omethylcytosine
  modified_base 6: mod_base = OTHER; note = 2'-Omethylcytosine
  modified_base 27: mod_base = OTHER; note = 2'-Omethyluridine
  modified_base 28: mod_base = OTHER; note = 2'-Omethyluridine
  modified_base 29: mod_base = OTHER; note = 2'-fluoroguanosine
  modified_base 30: mod_base = OTHER; note = 2'-fluoroguanosine
  modified_base 40: mod_base = OTHER; note = 2'-fluorouridine
  modified_base 41: mod_base = OTHER; note = 2'-Omethylcytosine
  modified_base 42: mod_base = OTHER; note = 2'-Omethyladenosine
  modified_base 43: mod_base = OTHER; note = 2'-Omethyladenosine
  modified_base 73: mod_base = OTHER; note = 2'-Omethylguanosine

SEQ ID NO: 2629 - RNA, 76 nt, synthetic construct; identical to SEQ ID NO: 625
  source 1..76: mol_type = other RNA
  modified_base 1: mod_base = OTHER; note = 2'-Omethylguanosine phosphorothiorate
  modified_base 2: mod_base = OTHER; note = 2'-Omethylguanosine
  modified_base 3: mod_base = OTHER; note = 2'-Omethylcytosine
  modified_base 4: mod_base = OTHER; note = 2'-Omethyluridine
  modified_base 5: mod_base = OTHER; note = 2'-Omethylcytosine
  modified_base 6: mod_base = OTHER; note = 2'-Omethylcytosine
  modified_base 27: mod_base = OTHER; note = 2'-Omethyluridine
  modified_base 28: mod_base = OTHER; note = 2'-fluorouridine
  modified_base 29: mod_base = OTHER; note = 2'-Omethylguanosine
  modified_base 30: mod_base = OTHER; note = 2'-fluoroguanosine
  modified_base 40: mod_base = OTHER; note = 2'-fluorouridine
  modified_base 41: mod_base = OTHER; note = 2'-Omethylcytosine
  modified_base 42: mod_base = OTHER; note = 2'-Omethyladenosine
  modified_base 43: mod_base = OTHER; note = 2'-Omethyladenosine
  modified_base 73: mod_base = OTHER; note = 2'-Omethylguanosine

SEQ ID NO: 2630 - RNA, 76 nt, synthetic construct; identical to SEQ ID NO: 625
  source 1..76: mol_type = other RNA
  modified_base 1: mod_base = OTHER; note = 2'-Omethylguanosine phosphorothiorate
  modified_base 2: mod_base = OTHER; note = 2'-Omethylguanosine
  modified_base 3: mod_base = OTHER; note = 2'-Omethylcytosine
  modified_base 4: mod_base = OTHER; note = 2'-Omethyluridine
  modified_base 5: mod_base = OTHER; note = 2'-Omethylcytosine
  modified_base 6: mod_base = OTHER; note = 2'-Omethylcytosine
  modified_base 27: mod_base = OTHER; note = 2'-Omethyluridine
  modified_base 28: mod_base = OTHER; note = 2'-fluorouridine
  modified_base 29: mod_base = OTHER; note = 2'-fluoroguanosine
  modified_base 30: mod_base = OTHER; note = 2'-fluoroguanosine
  modified_base 40: mod_base = OTHER; note = 2'-fluorouridine
  modified_base 41: mod_base = OTHER; note = 2'-Omethylcytosine
  modified_base 42: mod_base = OTHER; note = 2'-Omethyladenosine
  modified_base 43: mod_base = OTHER; note = 2'-Omethyladenosine
  modified_base 73: mod_base = OTHER; note = 2'-Omethylguanosine

SEQ ID NO: 2631 - RNA, 76 nt, synthetic construct; identical to SEQ ID NO: 625
  source 1..76: mol_type = other RNA
  modified_base 1: mod_base = OTHER; note = 2'-Omethylguanosine phosphorothiorate
  modified_base 2: mod_base = OTHER; note = 2'-Omethylguanosine
  modified_base 3: mod_base = OTHER; note = 2'-Omethylcytosine
  modified_base 4: mod_base = OTHER; note = 2'-Omethyluridine
  modified_base 5: mod_base = OTHER; note = 2'-Omethylcytosine
  modified_base 6: mod_base = OTHER; note = 2'-Omethylcytosine
  modified_base 44: mod_base = OTHER; note = 2'-Omethyladenosine
  modified_base 45: mod_base = OTHER; note = 2'-Omethylguanosine
  modified_base 46: mod_base = OTHER; note = 2'-fluoroguanosine
  modified_base 48: mod_base = OTHER; note = 2'-fluorouridine
  modified_base 73: mod_base = OTHER; note = 2'-Omethylguanosine

SEQ ID NO: 2632 - RNA, 76 nt, synthetic construct; identical to SEQ ID NO: 625
  source 1..76: mol_type = other RNA
  modified_base 1: mod_base = OTHER; note = 2'-Omethylguanosine phosphorothiorate
  modified_base 2: mod_base = OTHER; note = 2'-Omethylguanosine
  modified_base 3: mod_base = OTHER; note = 2'-Omethylcytosine
  modified_base 4: mod_base = OTHER; note = 2'-Omethyluridine
  modified_base 5: mod_base = OTHER; note = 2'-Omethylcytosine
  modified_base 6: mod_base = OTHER; note = 2'-Omethylcytosine
  modified_base 44: mod_base = OTHER; note = 2'-Omethyladenosine
  modified_base 45: mod_base = OTHER; note = 2'-Omethylguanosine
  modified_base 46: mod_base = OTHER; note = 2'-fluoroguanosine
  modified_base 48: mod_base = OTHER; note = 2'-fluorouridine
  modified_base 49: mod_base = OTHER; note = 2'-Omethylcytosine
  modified_base 73: mod_base = OTHER; note = 2'-Omethylguanosine

SEQ ID NO: 2633 - RNA, 76 nt, synthetic construct; identical to SEQ ID NO: 625
  source 1..76: mol_type = other RNA
  modified_base 1: mod_base = OTHER; note = 2'-Omethylguanosine phosphorothiorate
  modified_base 2: mod_base = OTHER; note = 2'-Omethylguanosine
  modified_base 3: mod_base = OTHER; note = 2'-Omethylcytosine
  modified_base 4: mod_base = OTHER; note = 2'-Omethyluridine
  modified_base 5: mod_base = OTHER; note = 2'-Omethylcytosine
  modified_base 6: mod_base = OTHER; note = 2'-Omethylcytosine
  modified_base 44: mod_base = OTHER; note = 2'-Omethyladenosine
  modified_base 45: mod_base = OTHER; note = 2'-Omethylguanosine
  modified_base 46: mod_base = OTHER; note = 2'-fluoroguanosine
  modified_base 47: mod_base = OTHER; note = Uridine phosphorothiorate
  modified_base 48: mod_base = OTHER; note = 2'-fluorouridine
  modified_base 49: mod_base = OTHER; note = 2'-Omethylcytosine
  modified_base 73: mod_base = OTHER; note = 2'-Omethylguanosine

SEQ ID NO: 2634 - RNA, 76 nt, synthetic construct; identical to SEQ ID NO: 625
  source 1..76: mol_type = other RNA
  modified_base 1: mod_base = OTHER; note = 2'-Omethylguanosine phosphorothiorate
  modified_base 2: mod_base = OTHER; note = 2'-Omethylguanosine
  modified_base 3: mod_base = OTHER; note = 2'-Omethylcytosine
  modified_base 4: mod_base = OTHER; note = 2'-Omethyluridine
  modified_base 5: mod_base = OTHER; note = 2'-Omethylcytosine
  modified_base 6: mod_base = OTHER; note = 2'-Omethylcytosine
  modified_base 44: mod_base = OTHER; note = 2'-Omethyladenosine
  modified_base 45: mod_base = OTHER; note = 2'-Omethylguanosine
  modified_base 46: mod_base = OTHER; note = 2'-fluoroguanosine
  modified_base 48: mod_base = OTHER; note = 2'-Omethyluridine
  modified_base 49: mod_base = OTHER; note = 2'-Omethylcytosine
  modified_base 73: mod_base = OTHER; note = 2'-Omethylguanosine

SEQ ID NO: 2635 - RNA, 76 nt, synthetic construct; identical to SEQ ID NO: 625
  source 1..76: mol_type = other RNA
  modified_base 1: mod_base = OTHER; note = 2'-Omethylguanosine phosphorothiorate
  modified_base 2: mod_base = OTHER; note = 2'-Omethylguanosine
  modified_base 3: mod_base = OTHER; note = 2'-Omethylcytosine
  modified_base 4: mod_base = OTHER; note = 2'-Omethyluridine
  modified_base 5: mod_base = OTHER; note = 2'-Omethylcytosine
  modified_base 6: mod_base = OTHER; note = 2'-Omethylcytosine
  modified_base 44: mod_base = OTHER; note = 2'-Omethyladenosine
  modified_base 45: mod_base = OTHER; note = 2'-Omethylguanosine
  modified_base 46: mod_base = OTHER; note = 2'-fluoroguanosine
  modified_base 47: mod_base = OTHER; note = Uridine phosphorothiorate
  modified_base 48: mod_base = OTHER; note = 2'-Omethyluridine
  modified_base 49: mod_base = OTHER; note = 2'-Omethylcytosine
  modified_base 73: mod_base = OTHER; note = 2'-Omethylguanosine

SEQ ID NO: 2636 - skipped

SEQ ID NO: 2637 - RNA, 76 nt, synthetic construct; identical to SEQ ID NO: 625
  source 1..76: mol_type = other RNA
  modified_base 1: mod_base = OTHER; note = 2'-Omethylguanosine phosphorothiorate
  modified_base 2: mod_base = OTHER; note = 2'-Omethylguanosine
  modified_base 3: mod_base = OTHER; note = 2'-Omethylcytosine
  modified_base 4: mod_base = OTHER; note = 2'-Omethyluridine
  modified_base 5: mod_base = OTHER; note = 2'-Omethylcytosine
  modified_base 6: mod_base = OTHER; note = 2'-Omethylcytosine
  modified_base 44: mod_base = OTHER; note = 2'-Omethyladenosine
  modified_base 45: mod_base = OTHER; note = 2'-Omethylguanosine
  modified_base 46: mod_base = OTHER; note = 2'-fluoroguanosine
  modified_base 47: mod_base = OTHER; note = 2'-O-(2-Methoxyethyl) thymine
  modified_base 48: mod_base = OTHER; note = 2'-fluorouridine
  modified_base 49: mod_base = OTHER; note = 2'-Omethylcytosine
  modified_base 73: mod_base = OTHER; note = 2'-Omethylguanosine

SEQ ID NO: 2638 - skipped

SEQ ID NO: 2639 - RNA, 76 nt, synthetic construct; identical to SEQ ID NO: 625
  source 1..76: mol_type = other RNA
  modified_base 1: mod_base = OTHER; note = 2'-Omethylguanosine phosphorothiorate
  modified_base 2: mod_base = OTHER; note = 2'-Omethylguanosine
  modified_base 3: mod_base = OTHER; note = 2'-Omethylcytosine
  modified_base 4: mod_base = OTHER; note = 2'-Omethyluridine
  modified_base 5: mod_base = OTHER; note = 2'-Omethylcytosine
  modified_base 6: mod_base = OTHER; note = 2'-Omethylcytosine
  modified_base 44: mod_base = OTHER; note = 2'-Omethyladenosine
  modified_base 45: mod_base = OTHER; note = 2'-Omethylguanosine
  modified_base 46: mod_base = OTHER; note = 2'-fluoroguanosine
  modified_base 47: mod_base = OTHER; note = 2'-O-(2-Methoxyethyl) thymine
  modified_base 48: mod_base = OTHER; note = 2'-Omethyluridine
  modified_base 49: mod_base = OTHER; note = 2'-Omethylcytosine
  modified_base 73: mod_base = OTHER; note = 2'-Omethylguanosine

SEQ ID NO: 2640 - RNA, 76 nt, synthetic construct; identical to SEQ ID NO: 625
  source 1..76: mol_type = other RNA
  modified_base 1: mod_base = OTHER; note = 2'-Omethylguanosine phosphorothiorate
  modified_base 2: mod_base = OTHER; note = 2'-Omethylguanosine
  modified_base 3: mod_base = OTHER; note = 2'-Omethylcytosine
  modified_base 4: mod_base = OTHER; note = 2'-Omethyluridine
  modified_base 5: mod_base = OTHER; note = 2'-Omethylcytosine
  modified_base 6: mod_base = OTHER; note = 2'-Omethylcytosine
  modified_base 44: mod_base = OTHER; note = 2'-Omethyladenosine
  modified_base 45: mod_base = OTHER; note = 2'-Omethylguanosine
  modified_base 46: mod_base = OTHER; note = 2'-fluoroguanosine
  modified_base 47: mod_base = OTHER; note = 2'-fluorouridine
  modified_base 48: mod_base = OTHER; note = 2'-Omethyluridine
  modified_base 49: mod_base = OTHER; note = 2'-Omethylcytosine
  modified_base 73: mod_base = OTHER; note = 2'-Omethylguanosine

SEQ ID NO: 2641 - RNA, 76 nt, synthetic construct; identical to SEQ ID NO: 625
  source 1..76: mol_type = other RNA
  modified_base 1: mod_base = OTHER; note = 2'-Omethylguanosine phosphorothiorate
  modified_base 2: mod_base = OTHER; note = 2'-Omethylguanosine
  modified_base 3: mod_base = OTHER; note = 2'-Omethylcytosine
  modified_base 4: mod_base = OTHER; note = 2'-Omethyluridine
  modified_base 5: mod_base = OTHER; note = 2'-Omethylcytosine
  modified_base 6: mod_base = OTHER; note = 2'-Omethylcytosine
  modified_base 44: mod_base = OTHER; note = 2'-Omethyladenosine
  modified_base 45: mod_base = OTHER; note = 2'-Omethylguanosine
  modified_base 46: mod_base = OTHER; note = 2'-fluoroguanosine
  modified_base 47: mod_base = OTHER; note = 2'-fluorouridine
  modified_base 48: mod_base = OTHER; note = 2'-fluorouridine
  modified_base 49: mod_base = OTHER; note = 2'-Omethylcytosine
  modified_base 73: mod_base = OTHER; note = 2'-Omethylguanosine

SEQ ID NO: 2642 - RNA, 76 nt, synthetic construct; identical to SEQ ID NO: 625
  source 1..76: mol_type = other RNA
  modified_base 1: mod_base = OTHER; note = 2'-Omethylguanosine phosphorothiorate
  modified_base 2: mod_base = OTHER; note = 2'-Omethylguanosine
  modified_base 3: mod_base = OTHER; note = 2'-Omethylcytosine
  modified_base 4: mod_base = OTHER; note = 2'-Omethyluridine
  modified_base 5: mod_base = OTHER; note = 2'-Omethylcytosine
  modified_base 6: mod_base = OTHER; note = 2'-Omethylcytosine
  modified_base 43: mod_base = OTHER; note = 2'-Omethyladenosine
  modified_base 44: mod_base = OTHER; note = 2'-Omethyladenosine
  modified_base 45: mod_base = OTHER; note = 2'-Omethylguanosine
  modified_base 46: mod_base = OTHER; note = 2'-fluoroguanosine
  modified_base 48: mod_base = OTHER; note = 2'-fluorouridine
  modified_base 73: mod_base = OTHER; note = 2'-Omethylguanosine

SEQ ID NO: 2643 - RNA, 76 nt, synthetic construct; identical to SEQ ID NO: 625
  source 1..76: mol_type = other RNA
  modified_base 1: mod_base = OTHER; note = 2'-Omethylguanosine phosphorothiorate
  modified_base 2: mod_base = OTHER; note = 2'-Omethylguanosine
  modified_base 3: mod_base = OTHER; note = 2'-Omethylcytosine
  modified_base 4: mod_base = OTHER; note = 2'-Omethyluridine
  modified_base 5: mod_base = OTHER; note = 2'-Omethylcytosine
  modified_base 6: mod_base = OTHER; note = 2'-Omethylcytosine
  modified_base 43: mod_base = OTHER; note = 2'-Omethyladenosine
  modified_base 44: mod_base = OTHER; note = 2'-Omethyladenosine
  modified_base 45: mod_base = OTHER; note = 2'-Omethylguanosine
  modified_base 46: mod_base = OTHER; note = 2'-fluoroguanosine
  modified_base 48: mod_base = OTHER; note = 2'-fluorouridine
  modified_base 49: mod_base = OTHER; note = 2'-Omethylcytosine
  modified_base 73: mod_base = OTHER; note = 2'-Omethylguanosine

SEQ ID NO: 2644 - RNA, 76 nt, synthetic construct; identical to SEQ ID NO: 625
  source 1..76: mol_type = other RNA
  modified_base 1: mod_base = OTHER; note = 2'-Omethylguanosine phosphorothiorate
  modified_base 2: mod_base = OTHER; note = 2'-Omethylguanosine
  modified_base 3: mod_base = OTHER; note = 2'-Omethylcytosine
  modified_base 4: mod_base = OTHER; note = 2'-Omethyluridine
  modified_base 5: mod_base = OTHER; note = 2'-Omethylcytosine
  modified_base 6: mod_base = OTHER; note = 2'-Omethylcytosine
  modified_base 43: mod_base = OTHER; note = 2'-Omethyladenosine
  modified_base 44: mod_base = OTHER; note = 2'-Omethyladenosine
  modified_base 45: mod_base = OTHER; note = 2'-Omethylguanosine
  modified_base 46: mod_base = OTHER; note = 2'-fluoroguanosine
  modified_base 47: mod_base = OTHER; note = Uridine phosphorothiorate
  modified_base 48: mod_base = OTHER; note = 2'-fluorouridine
  modified_base 49: mod_base = OTHER; note = 2'-Omethylcytosine
  modified_base 73: mod_base = OTHER; note = 2'-Omethylguanosine

SEQ ID NO: 2645 - RNA, 76 nt, synthetic construct; identical to SEQ ID NO: 625
  source 1..76: mol_type = other RNA
  modified_base 1: mod_base = OTHER; note = 2'-Omethylguanosine phosphorothiorate
  modified_base 2: mod_base = OTHER; note = 2'-Omethylguanosine
  modified_base 3: mod_base = OTHER; note = 2'-Omethylcytosine
  modified_base 4: mod_base = OTHER; note = 2'-Omethyluridine
  modified_base 5: mod_base = OTHER; note = 2'-Omethylcytosine
  modified_base 6: mod_base = OTHER; note = 2'-Omethylcytosine
  modified_base 43: mod_base = OTHER; note = 2'-Omethyladenosine
  modified_base 44: mod_base = OTHER; note = 2'-Omethyladenosine
  modified_base 45: mod_base = OTHER; note = 2'-Omethylguanosine
  modified_base 46: mod_base = OTHER; note = 2'-fluoroguanosine
  modified_base 48: mod_base = OTHER; note = 2'-Omethyluridine
  modified_base 49: mod_base = OTHER; note = 2'-Omethylcytosine
  modified_base 73: mod_base = OTHER; note = 2'-Omethylguanosine

SEQ ID NO: 2646 - RNA, 76 nt, synthetic construct; identical to SEQ ID NO: 625
  source 1..76: mol_type = other RNA
  modified_base 1: mod_base = OTHER; note = 2'-Omethylguanosine phosphorothiorate
  modified_base 2: mod_base = OTHER; note = 2'-Omethylguanosine
  modified_base 3: mod_base = OTHER; note = 2'-Omethylcytosine
  modified_base 4: mod_base = OTHER; note = 2'-Omethyluridine
  modified_base 5: mod_base = OTHER; note = 2'-Omethylcytosine
  modified_base 6: mod_base = OTHER; note = 2'-Omethylcytosine
  modified_base 43: mod_base = OTHER; note = 2'-Omethyladenosine
  modified_base 44: mod_base = OTHER; note = 2'-Omethyladenosine
  modified_base 45: mod_base = OTHER; note = 2'-Omethylguanosine
  modified_base 46: mod_base = OTHER; note = 2'-fluoroguanosine
  modified_base 47: mod_base = OTHER; note = Uridine phosphorothiorate
  modified_base 48: mod_base = OTHER; note = 2'-Omethyluridine
  modified_base 49: mod_base = OTHER; note = 2'-Omethylcytosine
  modified_base 73: mod_base = OTHER; note = 2'-Omethylguanosine

SEQ ID NO: 2647 - skipped

SEQ ID NO: 2648 - RNA, 76 nt, synthetic construct; identical to SEQ ID NO: 625
  source 1..76: mol_type = other RNA
  modified_base 1: mod_base = OTHER; note = 2'-Omethylguanosine phosphorothiorate
  modified_base 2: mod_base = OTHER; note = 2'-Omethylguanosine
  modified_base 3: mod_base = OTHER; note = 2'-Omethylcytosine
  modified_base 4: mod_base = OTHER; note = 2'-Omethyluridine
  modified_base 5: mod_base = OTHER; note = 2'-Omethylcytosine
  modified_base 6: mod_base = OTHER; note = 2'-Omethylcytosine
  modified_base 43: mod_base = OTHER; note = 2'-Omethyladenosine
  modified_base 44: mod_base = OTHER; note = 2'-Omethyladenosine
  modified_base 45: mod_base = OTHER; note = 2'-Omethylguanosine
  modified_base 46: mod_base = OTHER; note = 2'-fluoroguanosine
  modified_base 47: mod_base = OTHER; note = 2'-O-(2-Methoxyethyl) thymine
  modified_base 48: mod_base = OTHER; note = 2'-fluorouridine
  modified_base 49: mod_base = OTHER; note = 2'-Omethylcytosine
  modified_base 73: mod_base = OTHER; note = 2'-Omethylguanosine

SEQ ID NO: 2649 - skipped

SEQ ID NO: 2650 - RNA, 76 nt, synthetic construct; identical to SEQ ID NO: 625
  source 1..76: mol_type = other RNA
  modified_base 1: mod_base = OTHER; note = 2'-Omethylguanosine phosphorothiorate
  modified_base 2: mod_base = OTHER; note = 2'-Omethylguanosine
  modified_base 3: mod_base = OTHER; note = 2'-Omethylcytosine
  modified_base 4: mod_base = OTHER; note = 2'-Omethyluridine
  modified_base 5: mod_base = OTHER; note = 2'-Omethylcytosine
  modified_base 6: mod_base = OTHER; note = 2'-Omethylcytosine
  modified_base 43: mod_base = OTHER; note = 2'-Omethyladenosine
  modified_base 44: mod_base = OTHER; note = 2'-Omethyladenosine
  modified_base 45: mod_base = OTHER; note = 2'-Omethylguanosine
  modified_base 46: mod_base = OTHER; note = 2'-fluoroguanosine
  modified_base 47: mod_base = OTHER; note = 2'-O-(2-Methoxyethyl) thymine
  modified_base 48: mod_base = OTHER; note = 2'-Omethyluridine
  modified_base 49: mod_base = OTHER; note = 2'-Omethylcytosine
  modified_base 73: mod_base = OTHER; note = 2'-Omethylguanosine

SEQ ID NO: 2651 - RNA, 76 nt, synthetic construct; identical to SEQ ID NO: 625
  source 1..76: mol_type = other RNA
  modified_base 1: mod_base = OTHER; note = 2'-Omethylguanosine phosphorothiorate
  modified_base 2: mod_base = OTHER; note = 2'-Omethylguanosine
  modified_base 3: mod_base = OTHER; note = 2'-Omethylcytosine
  modified_base 4: mod_base = OTHER; note = 2'-Omethyluridine
  modified_base 5: mod_base = OTHER; note = 2'-Omethylcytosine
  modified_base 6: mod_base = OTHER; note = 2'-Omethylcytosine
  modified_base 43: mod_base = OTHER; note = 2'-Omethyladenosine
  modified_base 44: mod_base = OTHER; note = 2'-Omethyladenosine
  modified_base 45: mod_base = OTHER; note = 2'-Omethylguanosine
  modified_base 46: mod_base = OTHER; note = 2'-fluoroguanosine
  modified_base 47: mod_base = OTHER; note = 2'-fluorouridine
  modified_base 48: mod_base = OTHER; note = 2'-Omethyluridine
  modified_base 49: mod_base = OTHER; note = 2'-Omethylcytosine
  modified_base 73: mod_base = OTHER; note = 2'-Omethylguanosine

SEQ ID NO: 2652 - RNA, 76 nt, synthetic construct; identical to SEQ ID NO: 625
  source 1..76: mol_type = other RNA
  modified_base 1: mod_base = OTHER; note = 2'-Omethylguanosine phosphorothiorate
  modified_base 2: mod_base = OTHER; note = 2'-Omethylguanosine
  modified_base 3: mod_base = OTHER; note = 2'-Omethylcytosine
  modified_base 4: mod_base = OTHER; note = 2'-Omethyluridine
  modified_base 5: mod_base = OTHER; note = 2'-Omethylcytosine
  modified_base 6: mod_base = OTHER; note = 2'-Omethylcytosine
  modified_base 43: mod_base = OTHER; note = 2'-Omethyladenosine
  modified_base 44: mod_base = OTHER; note = 2'-Omethyladenosine
  modified_base 45: mod_base = OTHER; note = 2'-Omethylguanosine
  modified_base 46: mod_base = OTHER; note = 2'-fluoroguanosine
  modified_base 47: mod_base = OTHER; note = 2'-fluorouridine
  modified_base 48: mod_base = OTHER; note = 2'-fluorouridine
  modified_base 49: mod_base = OTHER; note = 2'-Omethylcytosine
  modified_base 73: mod_base = OTHER; note = 2'-Omethylguanosine

SEQ ID NO: 2653 - RNA, 76 nt, synthetic construct; identical to SEQ ID NO: 625
  source 1..76: mol_type = other RNA
  modified_base 1: mod_base = OTHER; note = 2'-Omethylguanosine phosphorothiorate
  modified_base 2: mod_base = OTHER; note = 2'-Omethylguanosine
  modified_base 3: mod_base = OTHER; note = 2'-Omethylcytosine
  modified_base 4: mod_base = OTHER; note = 2'-Omethyluridine
  modified_base 5: mod_base = OTHER; note = 2'-Omethylcytosine
  modified_base 6: mod_base = OTHER; note = 2'-Omethylcytosine
  modified_base 43: mod_base = OTHER; note = 2'-Omethyladenosine
  modified_base 44: mod_base = OTHER; note = 2'-Omethyladenosine
  modified_base 45: mod_base = OTHER; note = 2'-Omethylguanosine
  modified_base 46: mod_base = OTHER; note = 2'-fluoroguanosine
  modified_base 48: mod_base = OTHER; note = 2'-fluorouridine
  modified_base 50: mod_base = OTHER; note = 2'-Omethylcytosine
  modified_base 73: mod_base = OTHER; note = 2'-Omethylguanosine

SEQ ID NO: 2654 - RNA, 76 nt, synthetic construct; identical to SEQ ID NO: 625
  source 1..76: mol_type = other RNA
  modified_base 1: mod_base = OTHER; note = 2'-Omethylguanosine phosphorothiorate
  modified_base 2: mod_base = OTHER; note = 2'-Omethylguanosine
  modified_base 3: mod_base = OTHER; note = 2'-Omethylcytosine
  modified_base 4: mod_base = OTHER; note = 2'-Omethyluridine
  modified_base 5: mod_base = OTHER; note = 2'-Omethylcytosine
  modified_base 6: mod_base = OTHER; note = 2'-Omethylcytosine
  modified_base 43: mod_base = OTHER; note = 2'-Omethyladenosine
  modified_base 44: mod_base = OTHER; note = 2'-Omethyladenosine
  modified_base 45: mod_base = OTHER; note = 2'-Omethylguanosine
  modified_base 46: mod_base = OTHER; note = 2'-fluoroguanosine
  modified_base 48: mod_base = OTHER; note = 2'-fluorouridine
  modified_base 49: mod_base = OTHER; note = 2'-Omethylcytosine
  modified_base 50: mod_base = OTHER; note = 2'-Omethylcytosine
  modified_base 73: mod_base = OTHER; note = 2'-Omethylguanosine

SEQ ID NO: 2655 - RNA, 76 nt, synthetic construct; identical to SEQ ID NO: 625
  source 1..76: mol_type = other RNA
  modified_base 1: mod_base = OTHER; note = 2'-Omethylguanosine phosphorothiorate
  modified_base 2: mod_base = OTHER; note = 2'-Omethylguanosine
  modified_base 3: mod_base = OTHER; note = 2'-Omethylcytosine
  modified_base 4: mod_base = OTHER; note = 2'-Omethyluridine
  modified_base 5: mod_base = OTHER; note = 2'-Omethylcytosine
  modified_base 6: mod_base = OTHER; note = 2'-Omethylcytosine
  modified_base 43: mod_base = OTHER; note = 2'-Omethyladenosine
  modified_base 44: mod_base = OTHER; note = 2'-Omethyladenosine
  modified_base 45: mod_base = OTHER; note = 2'-Omethylguanosine
  modified_base 46: mod_base = OTHER; note = 2'-fluoroguanosine
  modified_base 47: mod_base = OTHER; note = Uridine phosphorothiorate
  modified_base 48: mod_base = OTHER; note = 2'-fluorouridine
  modified_base 49: mod_base = OTHER; note = 2'-Omethylcytosine
  modified_base 50: mod_base = OTHER; note = 2'-Omethylcytosine
  modified_base 73: mod_base = OTHER; note = 2'-Omethylguanosine

SEQ ID NO: 2656 - RNA, 76 nt, synthetic construct; identical to SEQ ID NO: 625
  source 1..76: mol_type = other RNA
  modified_base 1: mod_base = OTHER; note = 2'-Omethylguanosine phosphorothiorate
  modified_base 2: mod_base = OTHER; note = 2'-Omethylguanosine
  modified_base 3: mod_base = OTHER; note = 2'-Omethylcytosine
  modified_base 4: mod_base = OTHER; note = 2'-Omethyluridine
  modified_base 5: mod_base = OTHER; note = 2'-Omethylcytosine
  modified_base 6: mod_base = OTHER; note = 2'-Omethylcytosine
  modified_base 43: mod_base = OTHER; note = 2'-Omethyladenosine
  modified_base 44: mod_base = OTHER; note = 2'-Omethyladenosine
  modified_base 45: mod_base = OTHER; note = 2'-Omethylguanosine
  modified_base 46: mod_base = OTHER; note = 2'-fluoroguanosine
  modified_base 48: mod_base = OTHER; note = 2'-Omethyluridine
  modified_base 49: mod_base = OTHER; note = 2'-Omethylcytosine
  modified_base 50: mod_base = OTHER; note = 2'-Omethylcytosine
  modified_base 73: mod_base = OTHER; note = 2'-Omethylguanosine

SEQ ID NO: 2657 - RNA, 76 nt, synthetic construct; identical to SEQ ID NO: 625
  source 1..76: mol_type = other RNA
  modified_base 1: mod_base = OTHER; note = 2'-Omethylguanosine phosphorothiorate
  modified_base 2: mod_base = OTHER; note = 2'-Omethylguanosine
  modified_base 3: mod_base = OTHER; note = 2'-Omethylcytosine
  modified_base 4: mod_base = OTHER; note = 2'-Omethyluridine
  modified_base 5: mod_base = OTHER; note = 2'-Omethylcytosine
  modified_base 6: mod_base = OTHER; note = 2'-Omethylcytosine
  modified_base 43: mod_base = OTHER; note = 2'-Omethyladenosine
  modified_base 44: mod_base = OTHER; note = 2'-Omethyladenosine
  modified_base 45: mod_base = OTHER; note = 2'-Omethylguanosine
  modified_base 46: mod_base = OTHER; note = 2'-fluoroguanosine
  modified_base 47: mod_base = OTHER; note = Uridine phosphorothiorate
  modified_base 48: mod_base = OTHER; note = 2'-Omethyluridine
  modified_base 49: mod_base = OTHER; note = 2'-Omethylcytosine
  modified_base 50: mod_base = OTHER; note = 2'-Omethylcytosine
  modified_base 73: mod_base = OTHER; note = 2'-Omethylguanosine

SEQ ID NO: 2658 - skipped

SEQ ID NO: 2659 - RNA, 76 nt, synthetic construct; identical to SEQ ID NO: 625
  source 1..76: mol_type = other RNA
  modified_base 1: mod_base = OTHER; note = 2'-Omethylguanosine phosphorothiorate
  modified_base 2: mod_base = OTHER; note = 2'-Omethylguanosine
  modified_base 3: mod_base = OTHER; note = 2'-Omethylcytosine
  modified_base 4: mod_base = OTHER; note = 2'-Omethyluridine
  modified_base 5: mod_base = OTHER; note = 2'-Omethylcytosine
  modified_base 6: mod_base = OTHER; note = 2'-Omethylcytosine
  modified_base 43: mod_base = OTHER; note = 2'-Omethyladenosine
  modified_base 44: mod_base = OTHER; note = 2'-Omethyladenosine
  modified_base 45: mod_base = OTHER; note = 2'-Omethylguanosine
  modified_base 46: mod_base = OTHER; note = 2'-fluoroguanosine
  modified_base 47: mod_base = OTHER; note = 2'-O-(2-Methoxyethyl) thymine
  modified_base 48: mod_base = OTHER; note = 2'-fluorouridine
  modified_base 49: mod_base = OTHER; note = 2'-Omethylcytosine
  modified_base 50: mod_base = OTHER; note = 2'-Omethylcytosine
  modified_base 73: mod_base = OTHER; note = 2'-Omethylguanosine

SEQ ID NO: 2660 - skipped

SEQ ID NO: 2661 - RNA, 76 nt, synthetic construct; identical to SEQ ID NO: 625
  source 1..76: mol_type = other RNA
  modified_base 1: mod_base = OTHER; note = 2'-Omethylguanosine phosphorothiorate
  modified_base 2: mod_base = OTHER; note = 2'-Omethylguanosine
  modified_base 3: mod_base = OTHER; note = 2'-Omethylcytosine
  modified_base 4: mod_base = OTHER; note = 2'-Omethyluridine
  modified_base 5: mod_base = OTHER; note = 2'-Omethylcytosine
  modified_base 6: mod_base = OTHER; note = 2'-Omethylcytosine
  modified_base 43: mod_base = OTHER; note = 2'-Omethyladenosine
  modified_base 44: mod_base = OTHER; note = 2'-Omethyladenosine
  modified_base 45: mod_base = OTHER; note = 2'-Omethylguanosine
  modified_base 46: mod_base = OTHER; note = 2'-fluoroguanosine
  modified_base 47: mod_base = OTHER; note = 2'-O-(2-Methoxyethyl) thymine
  modified_base 48: mod_base = OTHER; note = 2'-Omethyluridine
  modified_base 49: mod_base = OTHER; note = 2'-Omethylcytosine
  modified_base 50: mod_base = OTHER; note = 2'-Omethylcytosine
  modified_base 73: mod_base = OTHER; note = 2'-Omethylguanosine

SEQ ID NO: 2662 - RNA, 76 nt, synthetic construct; identical to SEQ ID NO: 625
  source 1..76: mol_type = other RNA
  modified_base 1: mod_base = OTHER; note = 2'-Omethylguanosine phosphorothiorate
  modified_base 2: mod_base = OTHER; note = 2'-Omethylguanosine
  modified_base 3: mod_base = OTHER; note = 2'-Omethylcytosine
  modified_base 4: mod_base = OTHER; note = 2'-Omethyluridine
  modified_base 5: mod_base = OTHER; note = 2'-Omethylcytosine
  modified_base 6: mod_base = OTHER; note = 2'-Omethylcytosine
  modified_base 43: mod_base = OTHER; note = 2'-Omethyladenosine
  modified_base 44: mod_base = OTHER; note = 2'-Omethyladenosine
  modified_base 45: mod_base = OTHER; note = 2'-Omethylguanosine
  modified_base 46: mod_base = OTHER; note = 2'-fluoroguanosine
  modified_base 47: mod_base = OTHER; note = 2'-fluorouridine
  modified_base 48: mod_base = OTHER; note = 2'-Omethyluridine
  modified_base 49: mod_base = OTHER; note = 2'-Omethylcytosine
  modified_base 50: mod_base = OTHER; note = 2'-Omethylcytosine
  modified_base 73: mod_base = OTHER; note = 2'-Omethylguanosine

SEQ ID NO: 2663 - RNA, 76 nt, synthetic construct; identical to SEQ ID NO: 625
  source 1..76: mol_type = other RNA
  modified_base 1: mod_base = OTHER; note = 2'-Omethylguanosine phosphorothiorate
  modified_base 2: mod_base = OTHER; note = 2'-Omethylguanosine
  modified_base 3: mod_base = OTHER; note = 2'-Omethylcytosine
  modified_base 4: mod_base = OTHER; note = 2'-Omethyluridine
  modified_base 5: mod_base = OTHER; note = 2'-Omethylcytosine
  modified_base 6: mod_base = OTHER; note = 2'-Omethylcytosine
  modified_base 43: mod_base = OTHER; note = 2'-Omethyladenosine
  modified_base 44: mod_base = OTHER; note = 2'-Omethyladenosine
  modified_base 45: mod_base = OTHER; note = 2'-Omethylguanosine
  modified_base 46: mod_base = OTHER; note = 2'-fluoroguanosine
  modified_base 47: mod_base = OTHER; note = 2'-fluorouridine
  modified_base 48: mod_base = OTHER; note = 2'-fluorouridine
  modified_base 49: mod_base = OTHER; note = 2'-Omethylcytosine
  modified_base 50: mod_base = OTHER; note = 2'-Omethylcytosine
  modified_base 73: mod_base = OTHER; note = 2'-Omethylguanosine

SEQ ID NO: 2664 - RNA, 76 nt, synthetic construct; identical to SEQ ID NO: 625
  source 1..76: mol_type = other RNA
  modified_base 7: mod_base = OTHER; note = 2'-O-(2-Methoxyethyl) guanosine

SEQ ID NO: 2665 - RNA, 76 nt, synthetic construct; identical to SEQ ID NO: 625
  source 1..76: mol_type = other RNA
  modified_base 8: mod_base = OTHER; note = 2'-O-(2-Methoxyethyl) thymine

SEQ ID NO: 2666 - RNA, 76 nt, synthetic construct; identical to SEQ ID NO: 625
  source 1..76: mol_type = other RNA
  modified_base 9: mod_base = OTHER; note = 2'-O-(2-Methoxyethyl) guanosine

SEQ ID NO: 2667 - RNA, 76 nt, synthetic construct; identical to SEQ ID NO: 625
  source 1..76: mol_type = other RNA
  modified_base 26: mod_base = OTHER; note = 2'-O-(2-Methoxyethyl) adenosine

SEQ ID NO: 2668 - RNA, 76 nt, synthetic construct; identical to SEQ ID NO: 625
  source 1..76: mol_type = other RNA
  modified_base 31: mod_base = OTHER; note = 2'-O-(2-Methoxyethyl) adenosine

SEQ ID NO: 2669 - RNA, 76 nt, synthetic construct; identical to SEQ ID NO: 625
  source 1..76: mol_type = other RNA
  modified_base 39: mod_base = OTHER; note = 2'-O-(2-Methoxyethyl) thymine

SEQ ID NO: 2670 - RNA, 76 nt, synthetic construct; identical to SEQ ID NO: 625
  source 1..76: mol_type = other RNA
  modified_base 40: mod_base = OTHER; note = 2'-O-(2-Methoxyethyl) thymine

SEQ ID NO: 2671 - skipped

SEQ ID NO: 2672 - RNA, 76 nt, synthetic construct; identical to SEQ ID NO: 625
  source 1..76: mol_type = other RNA
  modified_base 70: mod_base = OTHER; note = 2'-O-(2-Methoxyethyl) guanosine

SEQ ID NO: 2673-2760 - skipped (88 entries)

SEQ ID NO: 2761 - RNA, 76 nt, synthetic construct; identical to SEQ ID NO: 625
  source 1..76: mol_type = other RNA
  modified_base 1: mod_base = OTHER; note = 2'-Omethylguanosine
  modified_base 2: mod_base = OTHER; note = 2'-Omethylguanosine
  modified_base 3: mod_base = OTHER; note = 2'-Omethylcytosine
  modified_base 4: mod_base = OTHER; note = 2'-Omethyluridine
  modified_base 5: mod_base = OTHER; note = 2'-Omethylcytosine
  modified_base 6: mod_base = OTHER; note = 2'-Omethylcytosine
  modified_base 10: mod_base = OTHER; note = 2'-Omethylguanosine
  modified_base 11: mod_base = OTHER; note = 2'-Omethylcytosine
  modified_base 12: mod_base = OTHER; note = 2'-Omethylguanosine
  modified_base 13: mod_base = OTHER; note = 2'-Omethylcytosine
  modified_base 22: mod_base = OTHER; note = 2'-Omethylguanosine
  modified_base 23: mod_base = OTHER; note = 2'-Omethylcytosine
  modified_base 24: mod_base = OTHER; note = 2'-Omethylguanosine
  modified_base 25: mod_base = OTHER; note = 2'-Omethylcytosine
  modified_base 49: mod_base = OTHER; note = 2'-Omethylcytosine
  modified_base 50: mod_base = OTHER; note = 2'-Omethylcytosine
  modified_base 51: mod_base = OTHER; note = 2'-Omethylguanosine
  modified_base 52: mod_base = OTHER; note = 2'-Omethylguanosine
  modified_base 53: mod_base = OTHER; note = 2'-Omethylguanosine
  modified_base 61: mod_base = OTHER; note = 2'-Omethylcytosine
  modified_base 62: mod_base = OTHER; note = 2'-Omethylcytosine
  modified_base 63: mod_base = OTHER; note = 2'-fluorocytosine
  modified_base 64: mod_base = OTHER; note = 2'-Omethylguanosine
  modified_base 65: mod_base = OTHER; note = 2'-Omethylguanosine
  modified_base 66: mod_base = OTHER; note = 2'-Omethylcytosine
  modified_base 67: mod_base = OTHER; note = 2'-Omethylguanosine
  modified_base 68: mod_base = OTHER; note = 2'-Omethylguanosine
  modified_base 73: mod_base = OTHER; note = 2'-Omethylguanosine

SEQ ID NO: 2762 - RNA, 76 nt, synthetic construct; identical to SEQ ID NO: 625
  source 1..76: mol_type = other RNA
  modified_base 1: mod_base = OTHER; note = 2'-Omethylguanosine
  modified_base 2: mod_base = OTHER; note = 2'-Omethylguanosine
  modified_base 3: mod_base = OTHER; note = 2'-Omethylcytosine
  modified_base 4: mod_base = OTHER; note = 2'-Omethyluridine
  modified_base 5: mod_base = OTHER; note = 2'-Omethylcytosine
  modified_base 6: mod_base = OTHER; note = 2'-Omethylcytosine
  modified_base 10: mod_base = OTHER; note = 2'-Omethylguanosine
  modified_base 11: mod_base = OTHER; note = 2'-Omethylcytosine
  modified_base 12: mod_base = OTHER; note = 2'-Omethylguanosine
  modified_base 13: mod_base = OTHER; note = 2'-Omethylcytosine
  modified_base 22: mod_base = OTHER; note = 2'-Omethylguanosine
  modified_base 23: mod_base = OTHER; note = 2'-Omethylcytosine
  modified_base 24: mod_base = OTHER; note = 2'-Omethylguanosine
  modified_base 25: mod_base = OTHER; note = 2'-Omethylcytosine
  modified_base 49: mod_base = OTHER; note = 2'-Omethylcytosine
  modified_base 50: mod_base = OTHER; note = 2'-Omethylcytosine
  modified_base 51: mod_base = OTHER; note = 2'-Omethylguanosine
  modified_base 52: mod_base = OTHER; note = 2'-Omethylguanosine
  modified_base 53: mod_base = OTHER; note = 2'-Omethylguanosine
  modified_base 54: mod_base = OTHER; note = 2'-Omethyluridine
  modified_base 56: mod_base = OTHER; note = 2'-Omethylcytosine
  modified_base 59: mod_base = OTHER; note = 2'-Omethylguanosine
  modified_base 61: mod_base = OTHER; note = 2'-Omethylcytosine
  modified_base 62: mod_base = OTHER; note = 2'-Omethylcytosine
  modified_base 63: mod_base = OTHER; note = 2'-fluorocytosine
  modified_base 64: mod_base = OTHER; note = 2'-Omethylguanosine
  modified_base 65: mod_base = OTHER; note = 2'-Omethylguanosine
  modified_base 66: mod_base = OTHER; note = 2'-Omethylcytosine
  modified_base 67: mod_base = OTHER; note = 2'-Omethylguanosine
  modified_base 68: mod_base = OTHER; note = 2'-Omethylguanosine
  modified_base 73: mod_base = OTHER; note = 2'-Omethylguanosine

SEQ ID NO: 2763 - RNA, 76 nt, synthetic construct; identical to SEQ ID NO: 625
  source 1..76: mol_type = other RNA
  modified_base 1: mod_base = OTHER; note = 2'-Omethylguanosine phosphorothiorate
  modified_base 2: mod_base = OTHER; note = 2'-Omethylguanosine phosphorothiorate
  modified_base 3: mod_base = OTHER; note = 2'-Omethylcytosine
  modified_base 4: mod_base = OTHER; note = 2'-Omethyluridine
  modified_base 5: mod_base = OTHER; note = 2'-Omethylcytosine
  modified_base 6: mod_base = OTHER; note = 2'-Omethylcytosine
  modified_base 10: mod_base = OTHER; note = 2'-Omethylguanosine
  modified_base 11: mod_base = OTHER; note = 2'-Omethylcytosine
  modified_base 12: mod_base = OTHER; note = 2'-Omethylguanosine
  modified_base 13: mod_base = OTHER; note = 2'-Omethylcytosine
  modified_base 22: mod_base = OTHER; note = 2'-Omethylguanosine
  modified_base 23: mod_base = OTHER; note = 2'-Omethylcytosine
  modified_base 24: mod_base = OTHER; note = 2'-Omethylguanosine
  modified_base 25: mod_base = OTHER; note = 2'-Omethylcytosine
  modified_base 49: mod_base = OTHER; note = 2'-Omethylcytosine
  modified_base 50: mod_base = OTHER; note = 2'-Omethylcytosine
  modified_base 51: mod_base = OTHER; note = 2'-Omethylguanosine
  modified_base 52: mod_base = OTHER; note = 2'-Omethylguanosine
  modified_base 53: mod_base = OTHER; note = 2'-Omethylguanosine
  modified_base 54: mod_base = OTHER; note = 2'-Omethyluridine
  modified_base 56: mod_base = OTHER; note = 2'-Omethylcytosine
  modified_base 59: mod_base = OTHER; note = 2'-Omethylguanosine
  modified_base 61: mod_base = OTHER; note = 2'-Omethylcytosine
  modified_base 62: mod_base = OTHER; note = 2'-Omethylcytosine
  modified_base 63: mod_base = OTHER; note = 2'-fluorocytosine
  modified_base 64: mod_base = OTHER; note = 2'-Omethylguanosine
  modified_base 65: mod_base = OTHER; note = 2'-Omethylguanosine
  modified_base 66: mod_base = OTHER; note = 2'-Omethylcytosine
  modified_base 67: mod_base = OTHER; note = 2'-Omethylguanosine
  modified_base 68: mod_base = OTHER; note = 2'-Omethylguanosine
  modified_base 73: mod_base = OTHER; note = 2'-Omethylguanosine

SEQ ID NO: 2764 - RNA, 76 nt, synthetic construct; identical to SEQ ID NO: 625
  source 1..76: mol_type = other RNA
  modified_base 1: mod_base = OTHER; note = 2'-Omethylguanosine phosphorothiorate
  modified_base 2: mod_base = OTHER; note = 2'-Omethylguanosine phosphorothiorate
  modified_base 3: mod_base = OTHER; note = 2'-Omethylcytosine
  modified_base 4: mod_base = OTHER; note = 2'-Omethyluridine
  modified_base 5: mod_base = OTHER; note = 2'-Omethylcytosine
  modified_base 6: mod_base = OTHER; note = 2'-Omethylcytosine
  modified_base 10: mod_base = OTHER; note = 2'-Omethylguanosine
  modified_base 11: mod_base = OTHER; note = 2'-Omethylcytosine
  modified_base 12: mod_base = OTHER; note = 2'-Omethylguanosine
  modified_base 13: mod_base = OTHER; note = 2'-Omethylcytosine
  modified_base 22: mod_base = OTHER; note = 2'-Omethylguanosine
  modified_base 23: mod_base = OTHER; note = 2'-Omethylcytosine
  modified_base 24: mod_base = OTHER; note = 2'-Omethylguanosine
  modified_base 25: mod_base = OTHER; note = 2'-Omethylcytosine
  modified_base 33: mod_base = OTHER; note = 2'-fluorouridine
  modified_base 35: mod_base = OTHER; note = Cytosine phosphorothiorate
  modified_base 37: mod_base = OTHER; note = Adenosine phosphorothiorate
  modified_base 38: mod_base = OTHER; note = Adenosine phosphorothiorate
  modified_base 49: mod_base = OTHER; note = 2'-Omethylcytosine
  modified_base 50: mod_base = OTHER; note = 2'-Omethylcytosine
  modified_base 51: mod_base = OTHER; note = 2'-Omethylguanosine
  modified_base 52: mod_base = OTHER; note = 2'-Omethylguanosine
  modified_base 53: mod_base = OTHER; note = 2'-Omethylguanosine
  modified_base 54: mod_base = OTHER; note = 2'-Omethyluridine
  modified_base 56: mod_base = OTHER; note = 2'-Omethylcytosine
  modified_base 59: mod_base = OTHER; note = 2'-Omethylguanosine
  modified_base 61: mod_base = OTHER; note = 2'-Omethylcytosine
  modified_base 62: mod_base = OTHER; note = 2'-Omethylcytosine
  modified_base 63: mod_base = OTHER; note = 2'-fluorocytosine
  modified_base 64: mod_base = OTHER; note = 2'-Omethylguanosine
  modified_base 65: mod_base = OTHER; note = 2'-Omethylguanosine
  modified_base 66: mod_base = OTHER; note = 2'-Omethylcytosine
  modified_base 67: mod_base = OTHER; note = 2'-Omethylguanosine
  modified_base 68: mod_base = OTHER; note = 2'-Omethylguanosine
  modified_base 73: mod_base = OTHER; note = 2'-Omethylguanosine

SEQ ID NO: 2765 - RNA, 76 nt, synthetic construct; identical to SEQ ID NO: 625
  source 1..76: mol_type = other RNA
  modified_base 1: mod_base = OTHER; note = 2'-Omethylguanosine
  modified_base 2: mod_base = OTHER; note = 2'-Omethylguanosine
  modified_base 3: mod_base = OTHER; note = 2'-Omethylcytosine
  modified_base 4: mod_base = OTHER; note = 2'-Omethyluridine
  modified_base 5: mod_base = OTHER; note = 2'-Omethylcytosine
  modified_base 6: mod_base = OTHER; note = 2'-Omethylcytosine
  modified_base 10: mod_base = OTHER; note = 2'-Omethylguanosine
  modified_base 11: mod_base = OTHER; note = 2'-Omethylcytosine
  modified_base 12: mod_base = OTHER; note = 2'-Omethylguanosine
  modified_base 13: mod_base = OTHER; note = 2'-Omethylcytosine
  modified_base 16: mod_base = OTHER; note = 2'-Omethyluridine
  modified_base 17: mod_base = OTHER; note = 2'-Omethylguanosine
  modified_base 18: mod_base = OTHER; note = 2'-Omethylguanosine
  modified_base 22: mod_base = OTHER; note = 2'-Omethylguanosine
  modified_base 23: mod_base = OTHER; note = 2'-Omethylcytosine
  modified_base 24: mod_base = OTHER; note = 2'-Omethylguanosine
  modified_base 25: mod_base = OTHER; note = 2'-Omethylcytosine
  modified_base 33: mod_base = OTHER; note = 2'-fluorouridine
  modified_base 35: mod_base = OTHER; note = Cytosine phosphorothiorate
  modified_base 37: mod_base = OTHER; note = Adenosine phosphorothiorate
  modified_base 38: mod_base = OTHER; note = Adenosine phosphorothiorate
  modified_base 49: mod_base = OTHER; note = 2'-Omethylcytosine
  modified_base 50: mod_base = OTHER; note = 2'-Omethylcytosine
  modified_base 51: mod_base = OTHER; note = 2'-Omethylguanosine
  modified_base 52: mod_base = OTHER; note = 2'-Omethylguanosine
  modified_base 53: mod_base = OTHER; note = 2'-Omethylguanosine
  modified_base 54: mod_base = OTHER; note = 2'-Omethyluridine
  modified_base 56: mod_base = OTHER; note = 2'-Omethylcytosine
  modified_base 59: mod_base = OTHER; note = 2'-Omethylguanosine
  modified_base 61: mod_base = OTHER; note = 2'-Omethylcytosine
  modified_base 62: mod_base = OTHER; note = 2'-Omethylcytosine
  modified_base 63: mod_base = OTHER; note = 2'-fluorocytosine
  modified_base 64: mod_base = OTHER; note = 2'-Omethylguanosine
  modified_base 65: mod_base = OTHER; note = 2'-Omethylguanosine
  modified_base 66: mod_base = OTHER; note = 2'-Omethylcytosine
  modified_base 67: mod_base = OTHER; note = 2'-Omethylguanosine
  modified_base 68: mod_base = OTHER; note = 2'-Omethylguanosine
  modified_base 73: mod_base = OTHER; note = 2'-Omethylguanosine

SEQ ID NO: 2766 - RNA, 74 nt, synthetic construct; identical to SEQ ID NO: 766
  source 1..74: mol_type = other RNA
  modified_base 1: mod_base = OTHER; note = 2'-Omethylguanosine phosphorothiorate
  modified_base 2: mod_base = OTHER; note = 2'-Omethylguanosine phosphorothiorate
  modified_base 3: mod_base = OTHER; note = 2'-Omethylcytosine
  modified_base 4: mod_base = OTHER; note = 2'-Omethyluridine
  modified_base 5: mod_base = OTHER; note = 2'-Omethylcytosine
  modified_base 6: mod_base = OTHER; note = 2'-Omethylcytosine
  modified_base 10: mod_base = OTHER; note = 2'-Omethylguanosine
  modified_base 11: mod_base = OTHER; note = 2'-Omethylcytosine
  modified_base 12: mod_base = OTHER; note = 2'-Omethylguanosine
  modified_base 13: mod_base = OTHER; note = 2'-Omethylcytosine
  modified_base 16: mod_base = OTHER; note = 2'-Omethyluridine
  modified_base 17: mod_base = OTHER; note = 2'-Omethylguanosine
  modified_base 18: mod_base = OTHER; note = 2'-Omethylguanosine
  modified_base 22: mod_base = OTHER; note = 2'-Omethylguanosine
  modified_base 23: mod_base = OTHER; note = 2'-Omethylcytosine
  modified_base 24: mod_base = OTHER; note = 2'-Omethylguanosine
  modified_base 25: mod_base = OTHER; note = 2'-Omethylcytosine
  modified_base 33: mod_base = OTHER; note = 2'-fluorouridine
  modified_base 35: mod_base = OTHER; note = Cytosine phosphorothiorate
  modified_base 37: mod_base = OTHER; note = Adenosine phosphorothiorate
  modified_base 38: mod_base = OTHER; note = Adenosine phosphorothiorate
  modified_base 49: mod_base = OTHER; note = 2'-Omethylcytosine
  modified_base 50: mod_base = OTHER; note = 2'-Omethylcytosine
  modified_base 51: mod_base = OTHER; note = 2'-Omethylguanosine
  modified_base 52: mod_base = OTHER; note = 2'-Omethylguanosine
  modified_base 53: mod_base = OTHER; note = 2'-Omethylguanosine
  modified_base 54: mod_base = OTHER; note = 2'-Omethyluridine
  modified_base 56: mod_base = OTHER; note = 2'-Omethylcytosine
  modified_base 59: mod_base = OTHER; note = 2'-Omethylguanosine
  modified_base 61: mod_base = OTHER; note = 2'-Omethylcytosine
  modified_base 62: mod_base = OTHER; note = 2'-Omethylcytosine
  modified_base 63: mod_base = OTHER; note = 2'-fluorocytosine
  modified_base 64: mod_base = OTHER; note = 2'-Omethylguanosine
  modified_base 65: mod_base = OTHER; note = 2'-Omethylguanosine
  modified_base 66: mod_base = OTHER; note = 2'-Omethylcytosine
  modified_base 67: mod_base = OTHER; note = 2'-Omethylguanosine
  modified_base 68: mod_base = OTHER; note = 2'-Omethylguanosine
  modified_base 73: mod_base = OTHER; note = 2'-Omethylguanosine

SEQ ID NO: 2767 - RNA, 76 nt, synthetic construct; identical to SEQ ID NO: 625
  source 1..76: mol_type = other RNA
  modified_base 1: mod_base = OTHER; note = 2'-Omethylguanosine phosphorothiorate
  modified_base 2: mod_base = OTHER; note = 2'-Omethylguanosine phosphorothiorate
  modified_base 3: mod_base = OTHER; note = 2'-Omethylcytosine
  modified_base 4: mod_base = OTHER; note = 2'-Omethyluridine
  modified_base 5: mod_base = OTHER; note = 2'-Omethylcytosine
  modified_base 6: mod_base = OTHER; note = 2'-Omethylcytosine
  modified_base 44: mod_base = OTHER; note = 2'-Omethyladenosine
  modified_base 49: mod_base = OTHER; note = 2'-Omethylcytosine
  modified_base 50: mod_base = OTHER; note = 2'-Omethylcytosine
  modified_base 51: mod_base = OTHER; note = 2'-Omethylguanosine
  modified_base 52: mod_base = OTHER; note = 2'-Omethylguanosine
  modified_base 53: mod_base = OTHER; note = 2'-Omethylguanosine
  modified_base 54: mod_base = OTHER; note = 2'-Omethyluridine
  modified_base 61: mod_base = OTHER; note = 2'-Omethylcytosine
  modified_base 62: mod_base = OTHER; note = 2'-Omethylcytosine
  modified_base 63: mod_base = OTHER; note = 2'-fluorocytosine
  modified_base 64: mod_base = OTHER; note = 2'-Omethylguanosine
  modified_base 65: mod_base = OTHER; note = 2'-Omethylguanosine
  modified_base 66: mod_base = OTHER; note = 2'-Omethylcytosine
  modified_base 67: mod_base = OTHER; note = 2'-Omethylguanosine
  modified_base 68: mod_base = OTHER; note = 2'-Omethylguanosine
  modified_base 73: mod_base = OTHER; note = 2'-Omethylguanosine

SEQ ID NO: 2768 - RNA, 76 nt, synthetic construct; identical to SEQ ID NO: 625
  source 1..76: mol_type = other RNA
  modified_base 1: mod_base = OTHER; note = 2'-Omethylguanosine phosphorothiorate
  modified_base 2: mod_base = OTHER; note = 2'-Omethylguanosine phosphorothiorate
  modified_base 3: mod_base = OTHER; note = 2'-Omethylcytosine
  modified_base 4: mod_base = OTHER; note = 2'-Omethyluridine
  modified_base 5: mod_base = OTHER; note = 2'-Omethylcytosine
  modified_base 6: mod_base = OTHER; note = 2'-Omethylcytosine
  modified_base 44: mod_base = OTHER; note = 2'-Omethyladenosine
  modified_base 45: mod_base = OTHER; note = 2'-Omethylguanosine
  modified_base 49: mod_base = OTHER; note = 2'-Omethylcytosine
  modified_base 50: mod_base = OTHER; note = 2'-Omethylcytosine
  modified_base 51: mod_base = OTHER; note = 2'-Omethylguanosine
  modified_base 52: mod_base = OTHER; note = 2'-Omethylguanosine
  modified_base 53: mod_base = OTHER; note = 2'-Omethylguanosine
  modified_base 54: mod_base = OTHER; note = 2'-Omethyluridine
  modified_base 61: mod_base = OTHER; note = 2'-Omethylcytosine
  modified_base 62: mod_base = OTHER; note = 2'-Omethylcytosine
  modified_base 63: mod_base = OTHER; note = 2'-fluorocytosine
  modified_base 64: mod_base = OTHER; note = 2'-Omethylguanosine
  modified_base 65: mod_base = OTHER; note = 2'-Omethylguanosine
  modified_base 66: mod_base = OTHER; note = 2'-Omethylcytosine
  modified_base 67: mod_base = OTHER; note = 2'-Omethylguanosine
  modified_base 68: mod_base = OTHER; note = 2'-Omethylguanosine
  modified_base 73: mod_base = OTHER; note = 2'-Omethylguanosine

SEQ ID NO: 2769 - RNA, 76 nt, synthetic construct; identical to SEQ ID NO: 625
  source 1..76: mol_type = other RNA
  modified_base 1: mod_base = OTHER; note = 2'-Omethylguanosine phosphorothiorate
  modified_base 2: mod_base = OTHER; note = 2'-Omethylguanosine phosphorothiorate
  modified_base 3: mod_base = OTHER; note = 2'-Omethylcytosine
  modified_base 4: mod_base = OTHER; note = 2'-Omethyluridine
  modified_base 5: mod_base = OTHER; note = 2'-Omethylcytosine
  modified_base 6: mod_base = OTHER; note = 2'-Omethylcytosine
  modified_base 44: mod_base = OTHER; note = 2'-Omethyladenosine
  modified_base 45: mod_base = OTHER; note = 2'-Omethylguanosine
  modified_base 46: mod_base = OTHER; note = 2'-fluoroguanosine
  modified_base 49: mod_base = OTHER; note = 2'-Omethylcytosine
  modified_base 50: mod_base = OTHER; note = 2'-Omethylcytosine
  modified_base 51: mod_base = OTHER; note = 2'-Omethylguanosine
  modified_base 52: mod_base = OTHER; note = 2'-Omethylguanosine
  modified_base 53: mod_base = OTHER; note = 2'-Omethylguanosine
  modified_base 54: mod_base = OTHER; note = 2'-Omethyluridine
  modified_base 61: mod_base = OTHER; note = 2'-Omethylcytosine
  modified_base 62: mod_base = OTHER; note = 2'-Omethylcytosine
  modified_base 63: mod_base = OTHER; note = 2'-fluorocytosine
  modified_base 64: mod_base = OTHER; note = 2'-Omethylguanosine
  modified_base 65: mod_base = OTHER; note = 2'-Omethylguanosine
  modified_base 66: mod_base = OTHER; note = 2'-Omethylcytosine
  modified_base 67: mod_base = OTHER; note = 2'-Omethylguanosine
  modified_base 68: mod_base = OTHER; note = 2'-Omethylguanosine
  modified_base 73: mod_base = OTHER; note = 2'-Omethylguanosine

SEQ ID NO: 2770 - RNA, 76 nt, synthetic construct; identical to SEQ ID NO: 625
  source 1..76: mol_type = other RNA
  modified_base 1: mod_base = OTHER; note = 2'-Omethylguanosine phosphorothiorate
  modified_base 2: mod_base = OTHER; note = 2'-Omethylguanosine phosphorothiorate
  modified_base 3: mod_base = OTHER; note = 2'-Omethylcytosine
  modified_base 4: mod_base = OTHER; note = 2'-Omethyluridine
  modified_base 5: mod_base = OTHER; note = 2'-Omethylcytosine
  modified_base 6: mod_base = OTHER; note = 2'-Omethylcytosine
  modified_base 44: mod_base = OTHER; note = 2'-Omethyladenosine
  modified_base 45: mod_base = OTHER; note = 2'-Omethylguanosine
  modified_base 46: mod_base = OTHER; note = 2'-fluoroguanosine
  modified_base 47: mod_base = OTHER; note = 2'-fluorouridine
  modified_base 49: mod_base = OTHER; note = 2'-Omethylcytosine
  modified_base 50: mod_base = OTHER; note = 2'-Omethylcytosine
  modified_base 51: mod_base = OTHER; note = 2'-Omethylguanosine
  modified_base 52: mod_base = OTHER; note = 2'-Omethylguanosine
  modified_base 53: mod_base = OTHER; note = 2'-Omethylguanosine
  modified_base 54: mod_base = OTHER; note = 2'-Omethyluridine
  modified_base 61: mod_base = OTHER; note = 2'-Omethylcytosine
  modified_base 62: mod_base = OTHER; note = 2'-Omethylcytosine
  modified_base 63: mod_base = OTHER; note = 2'-fluorocytosine
  modified_base 64: mod_base = OTHER; note = 2'-Omethylguanosine
  modified_base 65: mod_base = OTHER; note = 2'-Omethylguanosine
  modified_base 66: mod_base = OTHER; note = 2'-Omethylcytosine
  modified_base 67: mod_base = OTHER; note = 2'-Omethylguanosine
  modified_base 68: mod_base = OTHER; note = 2'-Omethylguanosine
  modified_base 73: mod_base = OTHER; note = 2'-Omethylguanosine

SEQ ID NO: 2771 - RNA, 76 nt, synthetic construct; identical to SEQ ID NO: 625
  source 1..76: mol_type = other RNA
  modified_base 1: mod_base = OTHER; note = 2'-Omethylguanosine phosphorothiorate
  modified_base 2: mod_base = OTHER; note = 2'-Omethylguanosine phosphorothiorate
  modified_base 3: mod_base = OTHER; note = 2'-Omethylcytosine
  modified_base 4: mod_base = OTHER; note = 2'-Omethyluridine
  modified_base 5: mod_base = OTHER; note = 2'-Omethylcytosine
  modified_base 6: mod_base = OTHER; note = 2'-Omethylcytosine
  modified_base 48: mod_base = OTHER; note = 2'-fluorouridine
  modified_base 49: mod_base = OTHER; note = 2'-Omethylcytosine
  modified_base 50: mod_base = OTHER; note = 2'-Omethylcytosine
  modified_base 51: mod_base = OTHER; note = 2'-Omethylguanosine
  modified_base 52: mod_base = OTHER; note = 2'-Omethylguanosine
  modified_base 53: mod_base = OTHER; note = 2'-Omethylguanosine
  modified_base 54: mod_base = OTHER; note = 2'-Omethyluridine
  modified_base 61: mod_base = OTHER; note = 2'-Omethylcytosine
  modified_base 62: mod_base = OTHER; note = 2'-Omethylcytosine
  modified_base 63: mod_base = OTHER; note = 2'-fluorocytosine
  modified_base 64: mod_base = OTHER; note = 2'-Omethylguanosine
  modified_base 65: mod_base = OTHER; note = 2'-Omethylguanosine
  modified_base 66: mod_base = OTHER; note = 2'-Omethylcytosine
  modified_base 67: mod_base = OTHER; note = 2'-Omethylguanosine
  modified_base 68: mod_base = OTHER; note = 2'-Omethylguanosine
  modified_base 73: mod_base = OTHER; note = 2'-Omethylguanosine

SEQ ID NO: 2772 - RNA, 76 nt, synthetic construct; identical to SEQ ID NO: 625
  source 1..76: mol_type = other RNA
  modified_base 1: mod_base = OTHER; note = 2'-Omethylguanosine phosphorothiorate
  modified_base 2: mod_base = OTHER; note = 2'-Omethylguanosine phosphorothiorate
  modified_base 3: mod_base = OTHER; note = 2'-Omethylcytosine
  modified_base 4: mod_base = OTHER; note = 2'-Omethyluridine
  modified_base 5: mod_base = OTHER; note = 2'-Omethylcytosine
  modified_base 6: mod_base = OTHER; note = 2'-Omethylcytosine
  modified_base 47: mod_base = OTHER; note = 2'-fluorouridine
  modified_base 48: mod_base = OTHER; note = 2'-fluorouridine
  modified_base 49: mod_base = OTHER; note = 2'-Omethylcytosine
  modified_base 50: mod_base = OTHER; note = 2'-Omethylcytosine
  modified_base 51: mod_base = OTHER; note = 2'-Omethylguanosine
  modified_base 52: mod_base = OTHER; note = 2'-Omethylguanosine
  modified_base 53: mod_base = OTHER; note = 2'-Omethylguanosine
  modified_base 54: mod_base = OTHER; note = 2'-Omethyluridine
  modified_base 61: mod_base = OTHER; note = 2'-Omethylcytosine
  modified_base 62: mod_base = OTHER; note = 2'-Omethylcytosine
  modified_base 63: mod_base = OTHER; note = 2'-fluorocytosine
  modified_base 64: mod_base = OTHER; note = 2'-Omethylguanosine
  modified_base 65: mod_base = OTHER; note = 2'-Omethylguanosine
  modified_base 66: mod_base = OTHER; note = 2'-Omethylcytosine
  modified_base 67: mod_base = OTHER; note = 2'-Omethylguanosine
  modified_base 68: mod_base = OTHER; note = 2'-Omethylguanosine
  modified_base 73: mod_base = OTHER; note = 2'-Omethylguanosine

SEQ ID NO: 2773 - RNA, 76 nt, synthetic construct; identical to SEQ ID NO: 625
  source 1..76: mol_type = other RNA
  modified_base 1: mod_base = OTHER; note = 2'-Omethylguanosine phosphorothiorate
  modified_base 2: mod_base = OTHER; note = 2'-Omethylguanosine phosphorothiorate
  modified_base 3: mod_base = OTHER; note = 2'-Omethylcytosine
  modified_base 4: mod_base = OTHER; note = 2'-Omethyluridine
  modified_base 5: mod_base = OTHER; note = 2'-Omethylcytosine
  modified_base 6: mod_base = OTHER; note = 2'-Omethylcytosine
  modified_base 46: mod_base = OTHER; note = 2'-fluoroguanosine
  modified_base 47: mod_base = OTHER; note = 2'-fluorouridine
  modified_base 48: mod_base = OTHER; note = 2'-fluorouridine
  modified_base 49: mod_base = OTHER; note = 2'-Omethylcytosine
  modified_base 50: mod_base = OTHER; note = 2'-Omethylcytosine
  modified_base 51: mod_base = OTHER; note = 2'-Omethylguanosine
  modified_base 52: mod_base = OTHER; note = 2'-Omethylguanosine
  modified_base 53: mod_base = OTHER; note = 2'-Omethylguanosine
  modified_base 54: mod_base = OTHER; note = 2'-Omethyluridine
  modified_base 61: mod_base = OTHER; note = 2'-Omethylcytosine
  modified_base 62: mod_base = OTHER; note = 2'-Omethylcytosine
  modified_base 63: mod_base = OTHER; note = 2'-fluorocytosine
  modified_base 64: mod_base = OTHER; note = 2'-Omethylguanosine
  modified_base 65: mod_base = OTHER; note = 2'-Omethylguanosine
  modified_base 66: mod_base = OTHER; note = 2'-Omethylcytosine
  modified_base 67: mod_base = OTHER; note = 2'-Omethylguanosine
  modified_base 68: mod_base = OTHER; note = 2'-Omethylguanosine
  modified_base 73: mod_base = OTHER; note = 2'-Omethylguanosine

SEQ ID NO: 2774 - RNA, 76 nt, synthetic construct; identical to SEQ ID NO: 625
  source 1..76: mol_type = other RNA
  modified_base 1: mod_base = OTHER; note = 2'-Omethylguanosine phosphorothiorate
  modified_base 2: mod_base = OTHER; note = 2'-Omethylguanosine phosphorothiorate
  modified_base 3: mod_base = OTHER; note = 2'-Omethylcytosine
  modified_base 4: mod_base = OTHER; note = 2'-Omethyluridine
  modified_base 5: mod_base = OTHER; note = 2'-Omethylcytosine
  modified_base 6: mod_base = OTHER; note = 2'-Omethylcytosine
  modified_base 45: mod_base = OTHER; note = 2'-Omethylguanosine
  modified_base 46: mod_base = OTHER; note = 2'-fluoroguanosine
  modified_base 47: mod_base = OTHER; note = 2'-fluorouridine
  modified_base 48: mod_base = OTHER; note = 2'-fluorouridine
  modified_base 49: mod_base = OTHER; note = 2'-Omethylcytosine
  modified_base 50: mod_base = OTHER; note = 2'-Omethylcytosine
  modified_base 51: mod_base = OTHER; note = 2'-Omethylguanosine
  modified_base 52: mod_base = OTHER; note = 2'-Omethylguanosine
  modified_base 53: mod_base = OTHER; note = 2'-Omethylguanosine
  modified_base 54: mod_base = OTHER; note = 2'-Omethyluridine
  modified_base 61: mod_base = OTHER; note = 2'-Omethylcytosine
  modified_base 62: mod_base = OTHER; note = 2'-Omethylcytosine
  modified_base 63: mod_base = OTHER; note = 2'-fluorocytosine
  modified_base 64: mod_base = OTHER; note = 2'-Omethylguanosine
  modified_base 65: mod_base = OTHER; note = 2'-Omethylguanosine
  modified_base 66: mod_base = OTHER; note = 2'-Omethylcytosine
  modified_base 67: mod_base = OTHER; note = 2'-Omethylguanosine
  modified_base 68: mod_base = OTHER; note = 2'-Omethylguanosine
  modified_base 73: mod_base = OTHER; note = 2'-Omethylguanosine

SEQ ID NO: 2775 - RNA, 76 nt, synthetic construct; identical to SEQ ID NO: 625
  source 1..76: mol_type = other RNA
  modified_base 1: mod_base = OTHER; note = 2'-Omethylguanosine phosphorothiorate
  modified_base 2: mod_base = OTHER; note = 2'-Omethylguanosine phosphorothiorate
  modified_base 3: mod_base = OTHER; note = 2'-Omethylcytosine
  modified_base 4: mod_base = OTHER; note = 2'-Omethyluridine
  modified_base 5: mod_base = OTHER; note = 2'-Omethylcytosine
  modified_base 6: mod_base = OTHER; note = 2'-Omethylcytosine
  modified_base 16: mod_base = OTHER; note = 2'-Omethyluridine
  modified_base 17: mod_base = OTHER; note = 2'-Omethylguanosine
  modified_base 18: mod_base = OTHER; note = 2'-Omethylguanosine
  modified_base 49: mod_base = OTHER; note = 2'-Omethylcytosine
  modified_base 50: mod_base = OTHER; note = 2'-Omethylcytosine
  modified_base 51: mod_base = OTHER; note = 2'-Omethylguanosine
  modified_base 52: mod_base = OTHER; note = 2'-Omethylguanosine
  modified_base 53: mod_base = OTHER; note = 2'-Omethylguanosine
  modified_base 54: mod_base = OTHER; note = 2'-Omethyluridine
  modified_base 61: mod_base = OTHER; note = 2'-Omethylcytosine
  modified_base 62: mod_base = OTHER; note = 2'-Omethylcytosine
  modified_base 63: mod_base = OTHER; note = 2'-fluorocytosine
  modified_base 64: mod_base = OTHER; note = 2'-Omethylguanosine
  modified_base 65: mod_base = OTHER; note = 2'-Omethylguanosine
  modified_base 66: mod_base = OTHER; note = 2'-Omethylcytosine
  modified_base 67: mod_base = OTHER; note = 2'-Omethylguanosine
  modified_base 68: mod_base = OTHER; note = 2'-Omethylguanosine
  modified_base 73: mod_base = OTHER; note = 2'-Omethylguanosine

SEQ ID NO: 2776 - RNA, 76 nt, synthetic construct; identical to SEQ ID NO: 625
  source 1..76: mol_type = other RNA
  modified_base 1: mod_base = OTHER; note = 2'-Omethylguanosine phosphorothiorate
  modified_base 2: mod_base = OTHER; note = 2'-Omethylguanosine phosphorothiorate
  modified_base 3: mod_base = OTHER; note = 2'-Omethylcytosine
  modified_base 4: mod_base = OTHER; note = 2'-Omethyluridine
  modified_base 5: mod_base = OTHER; note = 2'-Omethylcytosine
  modified_base 6: mod_base = OTHER; note = 2'-Omethylcytosine
  modified_base 33: mod_base = OTHER; note = 2'-fluorouridine
  modified_base 35: mod_base = OTHER; note = Cytosine phosphorothiorate
  modified_base 37: mod_base = OTHER; note = Adenosine phosphorothiorate
  modified_base 38: mod_base = OTHER; note = Adenosine phosphorothiorate
  modified_base 49: mod_base = OTHER; note = 2'-Omethylcytosine
  modified_base 50: mod_base = OTHER; note = 2'-Omethylcytosine
  modified_base 51: mod_base = OTHER; note = 2'-Omethylguanosine
  modified_base 52: mod_base = OTHER; note = 2'-Omethylguanosine
  modified_base 53: mod_base = OTHER; note = 2'-Omethylguanosine
  modified_base 54: mod_base = OTHER; note = 2'-Omethyluridine
  modified_base 61: mod_base = OTHER; note = 2'-Omethylcytosine
  modified_base 62: mod_base = OTHER; note = 2'-Omethylcytosine
  modified_base 63: mod_base = OTHER; note = 2'-fluorocytosine
  modified_base 64: mod_base = OTHER; note = 2'-Omethylguanosine
  modified_base 65: mod_base = OTHER; note = 2'-Omethylguanosine
  modified_base 66: mod_base = OTHER; note = 2'-Omethylcytosine
  modified_base 67: mod_base = OTHER; note = 2'-Omethylguanosine
  modified_base 68: mod_base = OTHER; note = 2'-Omethylguanosine
  modified_base 73: mod_base = OTHER; note = 2'-Omethylguanosine

SEQ ID NO: 2777 - RNA, 76 nt, synthetic construct; identical to SEQ ID NO: 625
  source 1..76: mol_type = other RNA
  modified_base 1: mod_base = OTHER; note = 2'-Omethylguanosine phosphorothiorate
  modified_base 2: mod_base = OTHER; note = 2'-Omethylguanosine phosphorothiorate
  modified_base 3: mod_base = OTHER; note = 2'-Omethylcytosine
  modified_base 4: mod_base = OTHER; note = 2'-Omethyluridine
  modified_base 5: mod_base = OTHER; note = 2'-Omethylcytosine
  modified_base 6: mod_base = OTHER; note = 2'-Omethylcytosine
  modified_base 16: mod_base = OTHER; note = 2'-Omethyluridine
  modified_base 17: mod_base = OTHER; note = 2'-Omethylguanosine
  modified_base 18: mod_base = OTHER; note = 2'-Omethylguanosine
  modified_base 33: mod_base = OTHER; note = 2'-fluorouridine
  modified_base 35: mod_base = OTHER; note = Cytosine phosphorothiorate
  modified_base 37: mod_base = OTHER; note = Adenosine phosphorothiorate
  modified_base 38: mod_base = OTHER; note = Adenosine phosphorothiorate
  modified_base 49: mod_base = OTHER; note = 2'-Omethylcytosine
  modified_base 50: mod_base = OTHER; note = 2'-Omethylcytosine
  modified_base 51: mod_base = OTHER; note = 2'-Omethylguanosine
  modified_base 52: mod_base = OTHER; note = 2'-Omethylguanosine
  modified_base 53: mod_base = OTHER; note = 2'-Omethylguanosine
  modified_base 54: mod_base = OTHER; note = 2'-Omethyluridine
  modified_base 61: mod_base = OTHER; note = 2'-Omethylcytosine
  modified_base 62: mod_base = OTHER; note = 2'-Omethylcytosine
  modified_base 63: mod_base = OTHER; note = 2'-fluorocytosine
  modified_base 64: mod_base = OTHER; note = 2'-Omethylguanosine
  modified_base 65: mod_base = OTHER; note = 2'-Omethylguanosine
  modified_base 66: mod_base = OTHER; note = 2'-Omethylcytosine
  modified_base 67: mod_base = OTHER; note = 2'-Omethylguanosine
  modified_base 68: mod_base = OTHER; note = 2'-Omethylguanosine
  modified_base 73: mod_base = OTHER; note = 2'-Omethylguanosine

SEQ ID NO: 2778 - RNA, 76 nt, synthetic construct; identical to SEQ ID NO: 625
  source 1..76: mol_type = other RNA
  modified_base 1: mod_base = OTHER; note = 2'-Omethylguanosine phosphorothiorate
  modified_base 2: mod_base = OTHER; note = 2'-Omethylguanosine phosphorothiorate
  modified_base 3: mod_base = OTHER; note = 2'-Omethylcytosine
  modified_base 4: mod_base = OTHER; note = 2'-Omethyluridine
  modified_base 5: mod_base = OTHER; note = 2'-Omethylcytosine
  modified_base 6: mod_base = OTHER; note = 2'-Omethylcytosine
  modified_base 49: mod_base = OTHER; note = 2'-Omethylcytosine
  modified_base 50: mod_base = OTHER; note = 2'-Omethylcytosine
  modified_base 51: mod_base = OTHER; note = 2'-Omethylguanosine
  modified_base 52: mod_base = OTHER; note = 2'-Omethylguanosine
  modified_base 53: mod_base = OTHER; note = 2'-Omethylguanosine
  modified_base 54: mod_base = OTHER; note = 2'-Omethyluridine
  modified_base 56: mod_base = OTHER; note = 2'-Omethylcytosine
  modified_base 59: mod_base = OTHER; note = 2'-Omethylguanosine
  modified_base 61: mod_base = OTHER; note = 2'-Omethylcytosine
  modified_base 62: mod_base = OTHER; note = 2'-Omethylcytosine
  modified_base 63: mod_base = OTHER; note = 2'-fluorocytosine
  modified_base 64: mod_base = OTHER; note = 2'-Omethylguanosine
  modified_base 65: mod_base = OTHER; note = 2'-Omethylguanosine
  modified_base 66: mod_base = OTHER; note = 2'-Omethylcytosine
  modified_base 67: mod_base = OTHER; note = 2'-Omethylguanosine
  modified_base 68: mod_base = OTHER; note = 2'-Omethylguanosine
  modified_base 73: mod_base = OTHER; note = 2'-Omethylguanosine

SEQ ID NO: 2779 - RNA, 76 nt, synthetic construct; identical to SEQ ID NO: 625
  source 1..76: mol_type = other RNA
  modified_base 1: mod_base = OTHER; note = 2'-Omethylguanosine phosphorothiorate
  modified_base 2: mod_base = OTHER; note = 2'-Omethylguanosine phosphorothiorate
  modified_base 3: mod_base = OTHER; note = 2'-Omethylcytosine
  modified_base 4: mod_base = OTHER; note = 2'-Omethyluridine
  modified_base 5: mod_base = OTHER; note = 2'-Omethylcytosine
  modified_base 6: mod_base = OTHER; note = 2'-Omethylcytosine
  modified_base 16: mod_base = OTHER; note = 2'-Omethyluridine
  modified_base 17: mod_base = OTHER; note = 2'-Omethylguanosine
  modified_base 18: mod_base = OTHER; note = 2'-Omethylguanosine
  modified_base 33: mod_base = OTHER; note = 2'-fluorouridine
  modified_base 35: mod_base = OTHER; note = Cytosine phosphorothiorate
  modified_base 37: mod_base = OTHER; note = Adenosine phosphorothiorate
  modified_base 38: mod_base = OTHER; note = Adenosine phosphorothiorate
  modified_base 49: mod_base = OTHER; note = 2'-Omethylcytosine
  modified_base 50: mod_base = OTHER; note = 2'-Omethylcytosine
  modified_base 51: mod_base = OTHER; note = 2'-Omethylguanosine
  modified_base 52: mod_base = OTHER; note = 2'-Omethylguanosine
  modified_base 53: mod_base = OTHER; note = 2'-Omethylguanosine
  modified_base 54: mod_base = OTHER; note = 2'-Omethyluridine
  modified_base 56: mod_base = OTHER; note = 2'-Omethylcytosine
  modified_base 59: mod_base = OTHER; note = 2'-Omethylguanosine
  modified_base 61: mod_base = OTHER; note = 2'-Omethylcytosine
  modified_base 62: mod_base = OTHER; note = 2'-Omethylcytosine
  modified_base 63: mod_base = OTHER; note = 2'-fluorocytosine
  modified_base 64: mod_base = OTHER; note = 2'-Omethylguanosine
  modified_base 65: mod_base = OTHER; note = 2'-Omethylguanosine
  modified_base 66: mod_base = OTHER; note = 2'-Omethylcytosine
  modified_base 67: mod_base = OTHER; note = 2'-Omethylguanosine
  modified_base 68: mod_base = OTHER; note = 2'-Omethylguanosine
  modified_base 73: mod_base = OTHER; note = 2'-Omethylguanosine

SEQ ID NO: 2780 - RNA, 76 nt, synthetic construct; identical to SEQ ID NO: 625
  source 1..76: mol_type = other RNA
  modified_base 1: mod_base = OTHER; note = 2'-Omethylguanosine phosphorothiorate
  modified_base 2: mod_base = OTHER; note = 2'-Omethylguanosine phosphorothiorate
  modified_base 3: mod_base = OTHER; note = 2'-Omethylcytosine
  modified_base 4: mod_base = OTHER; note = 2'-Omethyluridine
  modified_base 5: mod_base = OTHER; note = 2'-Omethylcytosine
  modified_base 6: mod_base = OTHER; note = 2'-Omethylcytosine
  modified_base 16: mod_base = OTHER; note = 2'-Omethyluridine
  modified_base 17: mod_base = OTHER; note = 2'-Omethylguanosine
  modified_base 18: mod_base = OTHER; note = 2'-Omethylguanosine
  modified_base 33: mod_base = OTHER; note = 2'-fluorouridine
  modified_base 35: mod_base = OTHER; note = Cytosine phosphorothiorate
  modified_base 37: mod_base = OTHER; note = Adenosine phosphorothiorate
  modified_base 38: mod_base = OTHER; note = Adenosine phosphorothiorate
  modified_base 44: mod_base = OTHER; note = 2'-Omethyladenosine
  modified_base 49: mod_base = OTHER; note = 2'-Omethylcytosine
  modified_base 50: mod_base = OTHER; note = 2'-Omethylcytosine
  modified_base 51: mod_base = OTHER; note = 2'-Omethylguanosine
  modified_base 52: mod_base = OTHER; note = 2'-Omethylguanosine
  modified_base 53: mod_base = OTHER; note = 2'-Omethylguanosine
  modified_base 54: mod_base = OTHER; note = 2'-Omethyluridine
  modified_base 56: mod_base = OTHER; note = 2'-Omethylcytosine
  modified_base 59: mod_base = OTHER; note = 2'-Omethylguanosine
  modified_base 61: mod_base = OTHER; note = 2'-Omethylcytosine
  modified_base 62: mod_base = OTHER; note = 2'-Omethylcytosine
  modified_base 63: mod_base = OTHER; note = 2'-fluorocytosine
  modified_base 64: mod_base = OTHER; note = 2'-Omethylguanosine
  modified_base 65: mod_base = OTHER; note = 2'-Omethylguanosine
  modified_base 66: mod_base = OTHER; note = 2'-Omethylcytosine
  modified_base 67: mod_base = OTHER; note = 2'-Omethylguanosine
  modified_base 68: mod_base = OTHER; note = 2'-Omethylguanosine
  modified_base 73: mod_base = OTHER; note = 2'-Omethylguanosine

SEQ ID NO: 2781 - RNA, 76 nt, synthetic construct; identical to SEQ ID NO: 625
  source 1..76: mol_type = other RNA
  modified_base 1: mod_base = OTHER; note = 2'-Omethylguanosine phosphorothiorate
  modified_base 2: mod_base = OTHER; note = 2'-Omethylguanosine phosphorothiorate
  modified_base 3: mod_base = OTHER; note = 2'-Omethylcytosine
  modified_base 4: mod_base = OTHER; note = 2'-Omethyluridine
  modified_base 5: mod_base = OTHER; note = 2'-Omethylcytosine
  modified_base 6: mod_base = OTHER; note = 2'-Omethylcytosine
  modified_base 16: mod_base = OTHER; note = 2'-Omethyluridine
  modified_base 17: mod_base = OTHER; note = 2'-Omethylguanosine
  modified_base 18: mod_base = OTHER; note = 2'-Omethylguanosine
  modified_base 33: mod_base = OTHER; note = 2'-fluorouridine
  modified_base 35: mod_base = OTHER; note = Cytosine phosphorothiorate
  modified_base 37: mod_base = OTHER; note = Adenosine phosphorothiorate
  modified_base 38: mod_base = OTHER; note = Adenosine phosphorothiorate
  modified_base 44: mod_base = OTHER; note = 2'-Omethyladenosine
  modified_base 45: mod_base = OTHER; note = 2'-Omethylguanosine
  modified_base 49: mod_base = OTHER; note = 2'-Omethylcytosine
  modified_base 50: mod_base = OTHER; note = 2'-Omethylcytosine
  modified_base 51: mod_base = OTHER; note = 2'-Omethylguanosine
  modified_base 52: mod_base = OTHER; note = 2'-Omethylguanosine
  modified_base 53: mod_base = OTHER; note = 2'-Omethylguanosine
  modified_base 54: mod_base = OTHER; note = 2'-Omethyluridine
  modified_base 56: mod_base = OTHER; note = 2'-Omethylcytosine
  modified_base 59: mod_base = OTHER; note = 2'-Omethylguanosine
  modified_base 61: mod_base = OTHER; note = 2'-Omethylcytosine
  modified_base 62: mod_base = OTHER; note = 2'-Omethylcytosine
  modified_base 63: mod_base = OTHER; note = 2'-fluorocytosine
  modified_base 64: mod_base = OTHER; note = 2'-Omethylguanosine
  modified_base 65: mod_base = OTHER; note = 2'-Omethylguanosine
  modified_base 66: mod_base = OTHER; note = 2'-Omethylcytosine
  modified_base 67: mod_base = OTHER; note = 2'-Omethylguanosine
  modified_base 68: mod_base = OTHER; note = 2'-Omethylguanosine
  modified_base 73: mod_base = OTHER; note = 2'-Omethylguanosine

SEQ ID NO: 2782 - RNA, 76 nt, synthetic construct; identical to SEQ ID NO: 625
  source 1..76: mol_type = other RNA
  modified_base 1: mod_base = OTHER; note = 2'-Omethylguanosine phosphorothiorate
  modified_base 2: mod_base = OTHER; note = 2'-Omethylguanosine phosphorothiorate
  modified_base 3: mod_base = OTHER; note = 2'-Omethylcytosine
  modified_base 4: mod_base = OTHER; note = 2'-Omethyluridine
  modified_base 5: mod_base = OTHER; note = 2'-Omethylcytosine
  modified_base 6: mod_base = OTHER; note = 2'-Omethylcytosine
  modified_base 16: mod_base = OTHER; note = 2'-Omethyluridine
  modified_base 17: mod_base = OTHER; note = 2'-Omethylguanosine
  modified_base 18: mod_base = OTHER; note = 2'-Omethylguanosine
  modified_base 33: mod_base = OTHER; note = 2'-fluorouridine
  modified_base 35: mod_base = OTHER; note = Cytosine phosphorothiorate
  modified_base 37: mod_base = OTHER; note = Adenosine phosphorothiorate
  modified_base 38: mod_base = OTHER; note = Adenosine phosphorothiorate
  modified_base 44: mod_base = OTHER; note = 2'-Omethyladenosine
  modified_base 45: mod_base = OTHER; note = 2'-Omethylguanosine
  modified_base 46: mod_base = OTHER; note = 2'-fluoroguanosine
  modified_base 49: mod_base = OTHER; note = 2'-Omethylcytosine
  modified_base 50: mod_base = OTHER; note = 2'-Omethylcytosine
  modified_base 51: mod_base = OTHER; note = 2'-Omethylguanosine
  modified_base 52: mod_base = OTHER; note = 2'-Omethylguanosine
  modified_base 53: mod_base = OTHER; note = 2'-Omethylguanosine
  modified_base 54: mod_base = OTHER; note = 2'-Omethyluridine
  modified_base 56: mod_base = OTHER; note = 2'-Omethylcytosine
  modified_base 59: mod_base = OTHER; note = 2'-Omethylguanosine
  modified_base 61: mod_base = OTHER; note = 2'-Omethylcytosine
  modified_base 62: mod_base = OTHER; note = 2'-Omethylcytosine
  modified_base 63: mod_base = OTHER; note = 2'-fluorocytosine
  modified_base 64: mod_base = OTHER; note = 2'-Omethylguanosine
  modified_base 65: mod_base = OTHER; note = 2'-Omethylguanosine
  modified_base 66: mod_base = OTHER; note = 2'-Omethylcytosine
  modified_base 67: mod_base = OTHER; note = 2'-Omethylguanosine
  modified_base 68: mod_base = OTHER; note = 2'-Omethylguanosine
  modified_base 73: mod_base = OTHER; note = 2'-Omethylguanosine

SEQ ID NO: 2783 - RNA, 76 nt, synthetic construct; identical to SEQ ID NO: 625
  source 1..76: mol_type = other RNA
  modified_base 1: mod_base = OTHER; note = 2'-Omethylguanosine phosphorothiorate
  modified_base 2: mod_base = OTHER; note = 2'-Omethylguanosine phosphorothiorate
  modified_base 3: mod_base = OTHER; note = 2'-Omethylcytosine
  modified_base 4: mod_base = OTHER; note = 2'-Omethyluridine
  modified_base 5: mod_base = OTHER; note = 2'-Omethylcytosine
  modified_base 6: mod_base = OTHER; note = 2'-Omethylcytosine
  modified_base 16: mod_base = OTHER; note = 2'-Omethyluridine
  modified_base 17: mod_base = OTHER; note = 2'-Omethylguanosine
  modified_base 18: mod_base = OTHER; note = 2'-Omethylguanosine
  modified_base 33: mod_base = OTHER; note = 2'-fluorouridine
  modified_base 35: mod_base = OTHER; note = Cytosine phosphorothiorate
  modified_base 37: mod_base = OTHER; note = Adenosine phosphorothiorate
  modified_base 38: mod_base = OTHER; note = Adenosine phosphorothiorate
  modified_base 44: mod_base = OTHER; note = 2'-Omethyladenosine
  modified_base 45: mod_base = OTHER; note = 2'-Omethylguanosine
  modified_base 46: mod_base = OTHER; note = 2'-fluoroguanosine
  modified_base 47: mod_base = OTHER; note = 2'-fluorouridine
  modified_base 49: mod_base = OTHER; note = 2'-Omethylcytosine
  modified_base 50: mod_base = OTHER; note = 2'-Omethylcytosine
  modified_base 51: mod_base = OTHER; note = 2'-Omethylguanosine
  modified_base 52: mod_base = OTHER; note = 2'-Omethylguanosine
  modified_base 53: mod_base = OTHER; note = 2'-Omethylguanosine
  modified_base 54: mod_base = OTHER; note = 2'-Omethyluridine
  modified_base 56: mod_base = OTHER; note = 2'-Omethylcytosine
  modified_base 59: mod_base = OTHER; note = 2'-Omethylguanosine
  modified_base 61: mod_base = OTHER; note = 2'-Omethylcytosine
  modified_base 62: mod_base = OTHER; note = 2'-Omethylcytosine
  modified_base 63: mod_base = OTHER; note = 2'-fluorocytosine
  modified_base 64: mod_base = OTHER; note = 2'-Omethylguanosine
  modified_base 65: mod_base = OTHER; note = 2'-Omethylguanosine
  modified_base 66: mod_base = OTHER; note = 2'-Omethylcytosine
  modified_base 67: mod_base = OTHER; note = 2'-Omethylguanosine
  modified_base 68: mod_base = OTHER; note = 2'-Omethylguanosine
  modified_base 73: mod_base = OTHER; note = 2'-Omethylguanosine

SEQ ID NO: 2784 - RNA, 76 nt, synthetic construct; identical to SEQ ID NO: 625
  source 1..76: mol_type = other RNA
  modified_base 1: mod_base = OTHER; note = 2'-Omethylguanosine phosphorothiorate
  modified_base 2: mod_base = OTHER; note = 2'-Omethylguanosine phosphorothiorate
  modified_base 3: mod_base = OTHER; note = 2'-Omethylcytosine
  modified_base 4: mod_base = OTHER; note = 2'-Omethyluridine
  modified_base 5: mod_base = OTHER; note = 2'-Omethylcytosine
  modified_base 6: mod_base = OTHER; note = 2'-Omethylcytosine
  modified_base 10: mod_base = OTHER; note = 2'-Omethylguanosine
  modified_base 11: mod_base = OTHER; note = 2'-Omethylcytosine
  modified_base 12: mod_base = OTHER; note = 2'-Omethylguanosine
  modified_base 13: mod_base = OTHER; note = 2'-Omethylcytosine
  modified_base 49: mod_base = OTHER; note = 2'-Omethylcytosine
  modified_base 50: mod_base = OTHER; note = 2'-Omethylcytosine
  modified_base 51: mod_base = OTHER; note = 2'-Omethylguanosine
  modified_base 52: mod_base = OTHER; note = 2'-Omethylguanosine
  modified_base 53: mod_base = OTHER; note = 2'-Omethylguanosine
  modified_base 54: mod_base = OTHER; note = 2'-Omethyluridine
  modified_base 61: mod_base = OTHER; note = 2'-Omethylcytosine
  modified_base 62: mod_base = OTHER; note = 2'-Omethylcytosine
  modified_base 63: mod_base = OTHER; note = 2'-fluorocytosine
  modified_base 64: mod_base = OTHER; note = 2'-Omethylguanosine
  modified_base 65: mod_base = OTHER; note = 2'-Omethylguanosine
  modified_base 66: mod_base = OTHER; note = 2'-Omethylcytosine
  modified_base 67: mod_base = OTHER; note = 2'-Omethylguanosine
  modified_base 68: mod_base = OTHER; note = 2'-Omethylguanosine
  modified_base 73: mod_base = OTHER; note = 2'-Omethylguanosine

SEQ ID NO: 2785 - RNA, 76 nt, synthetic construct; identical to SEQ ID NO: 625
  source 1..76: mol_type = other RNA
  modified_base 1: mod_base = OTHER; note = 2'-Omethylguanosine phosphorothiorate
  modified_base 2: mod_base = OTHER; note = 2'-Omethylguanosine phosphorothiorate
  modified_base 3: mod_base = OTHER; note = 2'-Omethylcytosine
  modified_base 4: mod_base = OTHER; note = 2'-Omethyluridine
  modified_base 5: mod_base = OTHER; note = 2'-Omethylcytosine
  modified_base 6: mod_base = OTHER; note = 2'-Omethylcytosine
  modified_base 22: mod_base = OTHER; note = 2'-Omethylguanosine
  modified_base 23: mod_base = OTHER; note = 2'-Omethylcytosine
  modified_base 24: mod_base = OTHER; note = 2'-Omethylguanosine
  modified_base 25: mod_base = OTHER; note = 2'-Omethylcytosine
  modified_base 49: mod_base = OTHER; note = 2'-Omethylcytosine
  modified_base 50: mod_base = OTHER; note = 2'-Omethylcytosine
  modified_base 51: mod_base = OTHER; note = 2'-Omethylguanosine
  modified_base 52: mod_base = OTHER; note = 2'-Omethylguanosine
  modified_base 53: mod_base = OTHER; note = 2'-Omethylguanosine
  modified_base 54: mod_base = OTHER; note = 2'-Omethyluridine
  modified_base 61: mod_base = OTHER; note = 2'-Omethylcytosine
  modified_base 62: mod_base = OTHER; note = 2'-Omethylcytosine
  modified_base 63: mod_base = OTHER; note = 2'-fluorocytosine
  modified_base 64: mod_base = OTHER; note = 2'-Omethylguanosine
  modified_base 65: mod_base = OTHER; note = 2'-Omethylguanosine
  modified_base 66: mod_base = OTHER; note = 2'-Omethylcytosine
  modified_base 67: mod_base = OTHER; note = 2'-Omethylguanosine
  modified_base 68: mod_base = OTHER; note = 2'-Omethylguanosine
  modified_base 73: mod_base = OTHER; note = 2'-Omethylguanosine

SEQ ID NO: 2786 - RNA, 76 nt, synthetic construct; identical to SEQ ID NO: 625
  source 1..76: mol_type = other RNA
  modified_base 1: mod_base = OTHER; note = 2'-Omethylguanosine phosphorothiorate
  modified_base 2: mod_base = OTHER; note = 2'-Omethylguanosine phosphorothiorate
  modified_base 3: mod_base = OTHER; note = 2'-Omethylcytosine
  modified_base 4: mod_base = OTHER; note = 2'-Omethyluridine
  modified_base 5: mod_base = OTHER; note = 2'-Omethylcytosine
  modified_base 6: mod_base = OTHER; note = 2'-Omethylcytosine
  modified_base 10: mod_base = OTHER; note = 2'-Omethylguanosine
  modified_base 11: mod_base = OTHER; note = 2'-Omethylcytosine
  modified_base 12: mod_base = OTHER; note = 2'-Omethylguanosine
  modified_base 13: mod_base = OTHER; note = 2'-Omethylcytosine
  modified_base 22: mod_base = OTHER; note = 2'-Omethylguanosine
  modified_base 23: mod_base = OTHER; note = 2'-Omethylcytosine
  modified_base 24: mod_base = OTHER; note = 2'-Omethylguanosine
  modified_base 25: mod_base = OTHER; note = 2'-Omethylcytosine
  modified_base 49: mod_base = OTHER; note = 2'-Omethylcytosine
  modified_base 50: mod_base = OTHER; note = 2'-Omethylcytosine
  modified_base 51: mod_base = OTHER; note = 2'-Omethylguanosine
  modified_base 52: mod_base = OTHER; note = 2'-Omethylguanosine
  modified_base 53: mod_base = OTHER; note = 2'-Omethylguanosine
  modified_base 54: mod_base = OTHER; note = 2'-Omethyluridine
  modified_base 61: mod_base = OTHER; note = 2'-Omethylcytosine
  modified_base 62: mod_base = OTHER; note = 2'-Omethylcytosine
  modified_base 63: mod_base = OTHER; note = 2'-fluorocytosine
  modified_base 64: mod_base = OTHER; note = 2'-Omethylguanosine
  modified_base 65: mod_base = OTHER; note = 2'-Omethylguanosine
  modified_base 66: mod_base = OTHER; note = 2'-Omethylcytosine
  modified_base 67: mod_base = OTHER; note = 2'-Omethylguanosine
  modified_base 68: mod_base = OTHER; note = 2'-Omethylguanosine
  modified_base 73: mod_base = OTHER; note = 2'-Omethylguanosine

SEQ ID NO: 2787 - RNA, 76 nt, synthetic construct; identical to SEQ ID NO: 625
  source 1..76: mol_type = other RNA
  modified_base 1: mod_base = OTHER; note = 2'-Omethylguanosine phosphorothiorate
  modified_base 2: mod_base = OTHER; note = 2'-Omethylguanosine phosphorothiorate
  modified_base 3: mod_base = OTHER; note = 2'-Omethylcytosine
  modified_base 4: mod_base = OTHER; note = 2'-Omethyluridine
  modified_base 5: mod_base = OTHER; note = 2'-Omethylcytosine
  modified_base 6: mod_base = OTHER; note = 2'-Omethylcytosine
  modified_base 10: mod_base = OTHER; note = 2'-Omethylguanosine
  modified_base 11: mod_base = OTHER; note = 2'-Omethylcytosine
  modified_base 12: mod_base = OTHER; note = 2'-Omethylguanosine
  modified_base 13: mod_base = OTHER; note = 2'-Omethylcytosine
  modified_base 16: mod_base = OTHER; note = 2'-Omethyluridine
  modified_base 17: mod_base = OTHER; note = 2'-Omethylguanosine
  modified_base 18: mod_base = OTHER; note = 2'-Omethylguanosine
  modified_base 20: mod_base = OTHER; note = 2'-Omethyluridine
  modified_base 22: mod_base = OTHER; note = 2'-Omethylguanosine
  modified_base 23: mod_base = OTHER; note = 2'-Omethylcytosine
  modified_base 24: mod_base = OTHER; note = 2'-Omethylguanosine
  modified_base 25: mod_base = OTHER; note = 2'-Omethylcytosine
  modified_base 49: mod_base = OTHER; note = 2'-Omethylcytosine
  modified_base 50: mod_base = OTHER; note = 2'-Omethylcytosine
  modified_base 51: mod_base = OTHER; note = 2'-Omethylguanosine
  modified_base 52: mod_base = OTHER; note = 2'-Omethylguanosine
  modified_base 53: mod_base = OTHER; note = 2'-Omethylguanosine
  modified_base 54: mod_base = OTHER; note = 2'-Omethyluridine
  modified_base 61: mod_base = OTHER; note = 2'-Omethylcytosine
  modified_base 62: mod_base = OTHER; note = 2'-Omethylcytosine
  modified_base 63: mod_base = OTHER; note = 2'-fluorocytosine
  modified_base 64: mod_base = OTHER; note = 2'-Omethylguanosine
  modified_base 65: mod_base = OTHER; note = 2'-Omethylguanosine
  modified_base 66: mod_base = OTHER; note = 2'-Omethylcytosine
  modified_base 67: mod_base = OTHER; note = 2'-Omethylguanosine
  modified_base 68: mod_base = OTHER; note = 2'-Omethylguanosine
  modified_base 73: mod_base = OTHER; note = 2'-Omethylguanosine

SEQ ID NO: 2788 - RNA, 76 nt, synthetic construct; identical to SEQ ID NO: 625
  source 1..76: mol_type = other RNA
  modified_base 1: mod_base = OTHER; note = 2'-Omethylguanosine phosphorothiorate
  modified_base 2: mod_base = OTHER; note = 2'-Omethylguanosine phosphorothiorate
  modified_base 3: mod_base = OTHER; note = 2'-Omethylcytosine
  modified_base 4: mod_base = OTHER; note = 2'-Omethyluridine
  modified_base 5: mod_base = OTHER; note = 2'-Omethylcytosine
  modified_base 6: mod_base = OTHER; note = 2'-Omethylcytosine
  modified_base 10: mod_base = OTHER; note = 2'-Omethylguanosine
  modified_base 11: mod_base = OTHER; note = 2'-Omethylcytosine
  modified_base 12: mod_base = OTHER; note = 2'-Omethylguanosine
  modified_base 13: mod_base = OTHER; note = 2'-Omethylcytosine
  modified_base 14: mod_base = OTHER; note = 2'-Omethyladenosine
  modified_base 15: mod_base = OTHER; note = 2'-fluoroadenosine
  modified_base 16: mod_base = OTHER; note = 2'-Omethyluridine
  modified_base 17: mod_base = OTHER; note = 2'-Omethylguanosine
  modified_base 18: mod_base = OTHER; note = 2'-Omethylguanosine
  modified_base 19: mod_base = OTHER; note = 2'-fluoroadenosine
  modified_base 20: mod_base = OTHER; note = 2'-Omethyluridine
  modified_base 22: mod_base = OTHER; note = 2'-Omethylguanosine
  modified_base 23: mod_base = OTHER; note = 2'-Omethylcytosine
  modified_base 24: mod_base = OTHER; note = 2'-Omethylguanosine
  modified_base 25: mod_base = OTHER; note = 2'-Omethylcytosine
  modified_base 49: mod_base = OTHER; note = 2'-Omethylcytosine
  modified_base 50: mod_base = OTHER; note = 2'-Omethylcytosine
  modified_base 51: mod_base = OTHER; note = 2'-Omethylguanosine
  modified_base 52: mod_base = OTHER; note = 2'-Omethylguanosine
  modified_base 53: mod_base = OTHER; note = 2'-Omethylguanosine
  modified_base 54: mod_base = OTHER; note = 2'-Omethyluridine
  modified_base 61: mod_base = OTHER; note = 2'-Omethylcytosine
  modified_base 62: mod_base = OTHER; note = 2'-Omethylcytosine
  modified_base 63: mod_base = OTHER; note = 2'-fluorocytosine
  modified_base 64: mod_base = OTHER; note = 2'-Omethylguanosine
  modified_base 65: mod_base = OTHER; note = 2'-Omethylguanosine
  modified_base 66: mod_base = OTHER; note = 2'-Omethylcytosine
  modified_base 67: mod_base = OTHER; note = 2'-Omethylguanosine
  modified_base 68: mod_base = OTHER; note = 2'-Omethylguanosine
  modified_base 73: mod_base = OTHER; note = 2'-Omethylguanosine

SEQ ID NO: 2789 - RNA, 76 nt, synthetic construct; identical to SEQ ID NO: 625
  source 1..76: mol_type = other RNA
  modified_base 1: mod_base = OTHER; note = 2'-Omethylguanosine phosphorothiorate
  modified_base 2: mod_base = OTHER; note = 2'-Omethylguanosine phosphorothiorate
  modified_base 3: mod_base = OTHER; note = 2'-Omethylcytosine
  modified_base 4: mod_base = OTHER; note = 2'-Omethyluridine
  modified_base 5: mod_base = OTHER; note = 2'-Omethylcytosine
  modified_base 6: mod_base = OTHER; note = 2'-Omethylcytosine
  modified_base 10: mod_base = OTHER; note = 2'-Omethylguanosine
  modified_base 11: mod_base = OTHER; note = 2'-Omethylcytosine
  modified_base 12: mod_base = OTHER; note = 2'-Omethylguanosine
  modified_base 13: mod_base = OTHER; note = 2'-Omethylcytosine
  modified_base 22: mod_base = OTHER; note = 2'-Omethylguanosine
  modified_base 23: mod_base = OTHER; note = 2'-Omethylcytosine
  modified_base 24: mod_base = OTHER; note = 2'-Omethylguanosine
  modified_base 25: mod_base = OTHER; note = 2'-Omethylcytosine
  modified_base 33: mod_base = OTHER; note = 2'-fluorouridine
  modified_base 35: mod_base = OTHER; note = Cytosine phosphorothiorate
  modified_base 37: mod_base = OTHER; note = Adenosine phosphorothiorate
  modified_base 38: mod_base = OTHER; note = Adenosine phosphorothiorate
  modified_base 49: mod_base = OTHER; note = 2'-Omethylcytosine
  modified_base 50: mod_base = OTHER; note = 2'-Omethylcytosine
  modified_base 51: mod_base = OTHER; note = 2'-Omethylguanosine
  modified_base 52: mod_base = OTHER; note = 2'-Omethylguanosine
  modified_base 53: mod_base = OTHER; note = 2'-Omethylguanosine
  modified_base 54: mod_base = OTHER; note = 2'-Omethyluridine
  modified_base 61: mod_base = OTHER; note = 2'-Omethylcytosine
  modified_base 62: mod_base = OTHER; note = 2'-Omethylcytosine
  modified_base 63: mod_base = OTHER; note = 2'-fluorocytosine
  modified_base 64: mod_base = OTHER; note = 2'-Omethylguanosine
  modified_base 65: mod_base = OTHER; note = 2'-Omethylguanosine
  modified_base 66: mod_base = OTHER; note = 2'-Omethylcytosine
  modified_base 67: mod_base = OTHER; note = 2'-Omethylguanosine
  modified_base 68: mod_base = OTHER; note = 2'-Omethylguanosine
  modified_base 73: mod_base = OTHER; note = 2'-Omethylguanosine

SEQ ID NO: 2790 - RNA, 76 nt, synthetic construct; identical to SEQ ID NO: 625
  source 1..76: mol_type = other RNA
  modified_base 1: mod_base = OTHER; note = 2'-Omethylguanosine phosphorothiorate
  modified_base 2: mod_base = OTHER; note = 2'-Omethylguanosine phosphorothiorate
  modified_base 3: mod_base = OTHER; note = 2'-Omethylcytosine
  modified_base 4: mod_base = OTHER; note = 2'-Omethyluridine
  modified_base 5: mod_base = OTHER; note = 2'-Omethylcytosine
  modified_base 6: mod_base = OTHER; note = 2'-Omethylcytosine
  modified_base 10: mod_base = OTHER; note = 2'-Omethylguanosine
  modified_base 11: mod_base = OTHER; note = 2'-Omethylcytosine
  modified_base 12: mod_base = OTHER; note = 2'-Omethylguanosine
  modified_base 13: mod_base = OTHER; note = 2'-Omethylcytosine
  modified_base 16: mod_base = OTHER; note = 2'-Omethyluridine
  modified_base 17: mod_base = OTHER; note = 2'-Omethylguanosine
  modified_base 18: mod_base = OTHER; note = 2'-Omethylguanosine
  modified_base 22: mod_base = OTHER; note = 2'-Omethylguanosine
  modified_base 23: mod_base = OTHER; note = 2'-Omethylcytosine
  modified_base 24: mod_base = OTHER; note = 2'-Omethylguanosine
  modified_base 25: mod_base = OTHER; note = 2'-Omethylcytosine
  modified_base 33: mod_base = OTHER; note = 2'-fluorouridine
  modified_base 35: mod_base = OTHER; note = Cytosine phosphorothiorate
  modified_base 37: mod_base = OTHER; note = Adenosine phosphorothiorate
  modified_base 38: mod_base = OTHER; note = Adenosine phosphorothiorate
  modified_base 49: mod_base = OTHER; note = 2'-Omethylcytosine
  modified_base 50: mod_base = OTHER; note = 2'-Omethylcytosine
  modified_base 51: mod_base = OTHER; note = 2'-Omethylguanosine
  modified_base 52: mod_base = OTHER; note = 2'-Omethylguanosine
  modified_base 53: mod_base = OTHER; note = 2'-Omethylguanosine
  modified_base 54: mod_base = OTHER; note = 2'-Omethyluridine
  modified_base 56: mod_base = OTHER; note = 2'-Omethylcytosine
  modified_base 59: mod_base = OTHER; note = 2'-Omethylguanosine
  modified_base 61: mod_base = OTHER; note = 2'-Omethylcytosine
  modified_base 62: mod_base = OTHER; note = 2'-Omethylcytosine
  modified_base 63: mod_base = OTHER; note = 2'-fluorocytosine
  modified_base 64: mod_base = OTHER; note = 2'-Omethylguanosine
  modified_base 65: mod_base = OTHER; note = 2'-Omethylguanosine
  modified_base 66: mod_base = OTHER; note = 2'-Omethylcytosine
  modified_base 67: mod_base = OTHER; note = 2'-Omethylguanosine
  modified_base 68: mod_base = OTHER; note = 2'-Omethylguanosine
  modified_base 73: mod_base = OTHER; note = 2'-Omethylguanosine

SEQ ID NO: 2791 - RNA, 76 nt, synthetic construct; identical to SEQ ID NO: 625
  source 1..76: mol_type = other RNA
  modified_base 1: mod_base = OTHER; note = 2'-Omethylguanosine phosphorothiorate
  modified_base 2: mod_base = OTHER; note = 2'-Omethylguanosine phosphorothiorate
  modified_base 3: mod_base = OTHER; note = 2'-Omethylcytosine
  modified_base 4: mod_base = OTHER; note = 2'-Omethyluridine
  modified_base 5: mod_base = OTHER; note = 2'-Omethylcytosine
  modified_base 6: mod_base = OTHER; note = 2'-Omethylcytosine
  modified_base 14: mod_base = OTHER; note = 2'-Omethyladenosine
  modified_base 15: mod_base = OTHER; note = 2'-fluoroadenosine
  modified_base 16: mod_base = OTHER; note = 2'-Omethyluridine
  modified_base 17: mod_base = OTHER; note = 2'-Omethylguanosine
  modified_base 18: mod_base = OTHER; note = 2'-Omethylguanosine
  modified_base 19: mod_base = OTHER; note = 2'-fluoroadenosine
  modified_base 20: mod_base = OTHER; note = 2'-Omethyluridine
  modified_base 49: mod_base = OTHER; note = 2'-Omethylcytosine
  modified_base 50: mod_base = OTHER; note = 2'-Omethylcytosine
  modified_base 51: mod_base = OTHER; note = 2'-Omethylguanosine
  modified_base 52: mod_base = OTHER; note = 2'-Omethylguanosine
  modified_base 53: mod_base = OTHER; note = 2'-Omethylguanosine
  modified_base 54: mod_base = OTHER; note = 2'-Omethyluridine
  modified_base 56: mod_base = OTHER; note = 2'-Omethylcytosine
  modified_base 59: mod_base = OTHER; note = 2'-Omethylguanosine
  modified_base 61: mod_base = OTHER; note = 2'-Omethylcytosine
  modified_base 62: mod_base = OTHER; note = 2'-Omethylcytosine
  modified_base 63: mod_base = OTHER; note = 2'-fluorocytosine
  modified_base 64: mod_base = OTHER; note = 2'-Omethylguanosine
  modified_base 65: mod_base = OTHER; note = 2'-Omethylguanosine
  modified_base 66: mod_base = OTHER; note = 2'-Omethylcytosine
  modified_base 67: mod_base = OTHER; note = 2'-Omethylguanosine
  modified_base 68: mod_base = OTHER; note = 2'-Omethylguanosine
  modified_base 73: mod_base = OTHER; note = 2'-Omethylguanosine

SEQ ID NO: 2792 - RNA, 76 nt, synthetic construct; identical to SEQ ID NO: 625
  source 1..76: mol_type = other RNA
  modified_base 1: mod_base = OTHER; note = 2'-Omethylguanosine phosphorothiorate
  modified_base 2: mod_base = OTHER; note = 2'-Omethylguanosine phosphorothiorate
  modified_base 3: mod_base = OTHER; note = 2'-Omethylcytosine
  modified_base 4: mod_base = OTHER; note = 2'-Omethyluridine
  modified_base 5: mod_base = OTHER; note = 2'-Omethylcytosine
  modified_base 6: mod_base = OTHER; note = 2'-Omethylcytosine
  modified_base 10: mod_base = OTHER; note = 2'-Omethylguanosine
  modified_base 11: mod_base = OTHER; note = 2'-Omethylcytosine
  modified_base 12: mod_base = OTHER; note = 2'-Omethylguanosine
  modified_base 13: mod_base = OTHER; note = 2'-Omethylcytosine
  modified_base 14: mod_base = OTHER; note = 2'-Omethyladenosine
  modified_base 15: mod_base = OTHER; note = 2'-fluoroadenosine
  modified_base 16: mod_base = OTHER; note = 2'-Omethyluridine
  modified_base 17: mod_base = OTHER; note = 2'-Omethylguanosine
  modified_base 18: mod_base = OTHER; note = 2'-Omethylguanosine
  modified_base 19: mod_base = OTHER; note = 2'-fluoroadenosine
  modified_base 20: mod_base = OTHER; note = 2'-Omethyluridine
  modified_base 22: mod_base = OTHER; note = 2'-Omethylguanosine
  modified_base 23: mod_base = OTHER; note = 2'-Omethylcytosine
  modified_base 24: mod_base = OTHER; note = 2'-Omethylguanosine
  modified_base 25: mod_base = OTHER; note = 2'-Omethylcytosine
  modified_base 49: mod_base = OTHER; note = 2'-Omethylcytosine
  modified_base 50: mod_base = OTHER; note = 2'-Omethylcytosine
  modified_base 51: mod_base = OTHER; note = 2'-Omethylguanosine
  modified_base 52: mod_base = OTHER; note = 2'-Omethylguanosine
  modified_base 53: mod_base = OTHER; note = 2'-Omethylguanosine
  modified_base 54: mod_base = OTHER; note = 2'-Omethyluridine
  modified_base 56: mod_base = OTHER; note = 2'-Omethylcytosine
  modified_base 59: mod_base = OTHER; note = 2'-Omethylguanosine
  modified_base 61: mod_base = OTHER; note = 2'-Omethylcytosine
  modified_base 62: mod_base = OTHER; note = 2'-Omethylcytosine
  modified_base 63: mod_base = OTHER; note = 2'-fluorocytosine
  modified_base 64: mod_base = OTHER; note = 2'-Omethylguanosine
  modified_base 65: mod_base = OTHER; note = 2'-Omethylguanosine
  modified_base 66: mod_base = OTHER; note = 2'-Omethylcytosine
  modified_base 67: mod_base = OTHER; note = 2'-Omethylguanosine
  modified_base 68: mod_base = OTHER; note = 2'-Omethylguanosine
  modified_base 73: mod_base = OTHER; note = 2'-Omethylguanosine

SEQ ID NO: 2793 - RNA, 76 nt, synthetic construct; identical to SEQ ID NO: 625
  source 1..76: mol_type = other RNA
  modified_base 1: mod_base = OTHER; note = 2'-Omethylguanosine phosphorothiorate
  modified_base 2: mod_base = OTHER; note = 2'-Omethylguanosine phosphorothiorate
  modified_base 3: mod_base = OTHER; note = 2'-Omethylcytosine
  modified_base 4: mod_base = OTHER; note = 2'-Omethyluridine
  modified_base 5: mod_base = OTHER; note = 2'-Omethylcytosine
  modified_base 6: mod_base = OTHER; note = 2'-Omethylcytosine
  modified_base 10: mod_base = OTHER; note = 2'-Omethylguanosine
  modified_base 11: mod_base = OTHER; note = 2'-Omethylcytosine
  modified_base 12: mod_base = OTHER; note = 2'-Omethylguanosine
  modified_base 13: mod_base = OTHER; note = 2'-Omethylcytosine
  modified_base 14: mod_base = OTHER; note = 2'-Omethyladenosine
  modified_base 15: mod_base = OTHER; note = 2'-fluoroadenosine
  modified_base 16: mod_base = OTHER; note = 2'-Omethyluridine
  modified_base 17: mod_base = OTHER; note = 2'-Omethylguanosine
  modified_base 18: mod_base = OTHER; note = 2'-Omethylguanosine
  modified_base 19: mod_base = OTHER; note = 2'-fluoroadenosine
  modified_base 20: mod_base = OTHER; note = 2'-Omethyluridine
  modified_base 22: mod_base = OTHER; note = 2'-Omethylguanosine
  modified_base 23: mod_base = OTHER; note = 2'-Omethylcytosine
  modified_base 24: mod_base = OTHER; note = 2'-Omethylguanosine
  modified_base 25: mod_base = OTHER; note = 2'-Omethylcytosine
  modified_base 33: mod_base = OTHER; note = 2'-fluorouridine
  modified_base 35: mod_base = OTHER; note = Cytosine phosphorothiorate
  modified_base 37: mod_base = OTHER; note = Adenosine phosphorothiorate
  modified_base 38: mod_base = OTHER; note = Adenosine phosphorothiorate
  modified_base 49: mod_base = OTHER; note = 2'-Omethylcytosine
  modified_base 50: mod_base = OTHER; note = 2'-Omethylcytosine
  modified_base 51: mod_base = OTHER; note = 2'-Omethylguanosine
  modified_base 52: mod_base = OTHER; note = 2'-Omethylguanosine
  modified_base 53: mod_base = OTHER; note = 2'-Omethylguanosine
  modified_base 54: mod_base = OTHER; note = 2'-Omethyluridine
  modified_base 56: mod_base = OTHER; note = 2'-Omethylcytosine
  modified_base 59: mod_base = OTHER; note = 2'-Omethylguanosine
  modified_base 61: mod_base = OTHER; note = 2'-Omethylcytosine
  modified_base 62: mod_base = OTHER; note = 2'-Omethylcytosine
  modified_base 63: mod_base = OTHER; note = 2'-fluorocytosine
  modified_base 64: mod_base = OTHER; note = 2'-Omethylguanosine
  modified_base 65: mod_base = OTHER; note = 2'-Omethylguanosine
  modified_base 66: mod_base = OTHER; note = 2'-Omethylcytosine
  modified_base 67: mod_base = OTHER; note = 2'-Omethylguanosine
  modified_base 68: mod_base = OTHER; note = 2'-Omethylguanosine
  modified_base 73: mod_base = OTHER; note = 2'-Omethylguanosine

SEQ ID NO: 2794 - RNA, 76 nt, synthetic construct; identical to SEQ ID NO: 625
  source 1..76: mol_type = other RNA
  modified_base 1: mod_base = OTHER; note = 2'-Omethylguanosine phosphorothiorate
  modified_base 2: mod_base = OTHER; note = 2'-Omethylguanosine phosphorothiorate
  modified_base 3: mod_base = OTHER; note = 2'-Omethylcytosine
  modified_base 4: mod_base = OTHER; note = 2'-Omethyluridine
  modified_base 5: mod_base = OTHER; note = 2'-Omethylcytosine
  modified_base 6: mod_base = OTHER; note = 2'-Omethylcytosine
  modified_base 16: mod_base = OTHER; note = 2'-Omethyluridine
  modified_base 17: mod_base = OTHER; note = 2'-Omethylguanosine
  modified_base 18: mod_base = OTHER; note = 2'-Omethylguanosine
  modified_base 33: mod_base = OTHER; note = 2'-fluorouridine
  modified_base 35: mod_base = OTHER; note = Cytosine phosphorothiorate
  modified_base 37: mod_base = OTHER; note = Adenosine phosphorothiorate
  modified_base 38: mod_base = OTHER; note = Adenosine phosphorothiorate
  modified_base 44: mod_base = OTHER; note = 2'-Omethyladenosine
  modified_base 45: mod_base = OTHER; note = 2'-Omethylguanosine
  modified_base 46: mod_base = OTHER; note = 2'-fluoroguanosine
  modified_base 47: mod_base = OTHER; note = 2'-fluorouridine
  modified_base 48: mod_base = OTHER; note = 2'-fluorouridine
  modified_base 49: mod_base = OTHER; note = 2'-Omethylcytosine
  modified_base 54: mod_base = OTHER; note = 2'-Omethyluridine
  modified_base 56: mod_base = OTHER; note = 2'-Omethylcytosine
  modified_base 59: mod_base = OTHER; note = 2'-Omethylguanosine
  modified_base 61: mod_base = OTHER; note = 2'-Omethylcytosine
  modified_base 62: mod_base = OTHER; note = 2'-Omethylcytosine
  modified_base 63: mod_base = OTHER; note = 2'-fluorocytosine
  modified_base 64: mod_base = OTHER; note = 2'-Omethylguanosine
  modified_base 65: mod_base = OTHER; note = 2'-Omethylguanosine
  modified_base 66: mod_base = OTHER; note = 2'-Omethylcytosine
  modified_base 67: mod_base = OTHER; note = 2'-Omethylguanosine
  modified_base 68: mod_base = OTHER; note = 2'-Omethylguanosine
  modified_base 73: mod_base = OTHER; note = 2'-Omethylguanosine

SEQ ID NO: 2795 - RNA, 76 nt, synthetic construct; identical to SEQ ID NO: 625
  source 1..76: mol_type = other RNA
  modified_base 1: mod_base = OTHER; note = 2'-Omethylguanosine phosphorothiorate
  modified_base 2: mod_base = OTHER; note = 2'-Omethylguanosine phosphorothiorate
  modified_base 3: mod_base = OTHER; note = 2'-Omethylcytosine
  modified_base 4: mod_base = OTHER; note = 2'-Omethyluridine
  modified_base 5: mod_base = OTHER; note = 2'-Omethylcytosine
  modified_base 6: mod_base = OTHER; note = 2'-Omethylcytosine
  modified_base 16: mod_base = OTHER; note = 2'-Omethyluridine
  modified_base 17: mod_base = OTHER; note = 2'-Omethylguanosine
  modified_base 18: mod_base = OTHER; note = 2'-Omethylguanosine
  modified_base 33: mod_base = OTHER; note = 2'-fluorouridine
  modified_base 35: mod_base = OTHER; note = Cytosine phosphorothiorate
  modified_base 37: mod_base = OTHER; note = Adenosine phosphorothiorate
  modified_base 38: mod_base = OTHER; note = Adenosine phosphorothiorate
  modified_base 44: mod_base = OTHER; note = 2'-Omethyladenosine
  modified_base 45: mod_base = OTHER; note = 2'-Omethylguanosine
  modified_base 46: mod_base = OTHER; note = 2'-fluoroguanosine
  modified_base 47: mod_base = OTHER; note = 2'-fluorouridine
  modified_base 48: mod_base = OTHER; note = 2'-fluorouridine
  modified_base 49: mod_base = OTHER; note = 2'-Omethylcytosine
  modified_base 50: mod_base = OTHER; note = 2'-Omethylcytosine
  modified_base 54: mod_base = OTHER; note = 2'-Omethyluridine
  modified_base 56: mod_base = OTHER; note = 2'-Omethylcytosine
  modified_base 59: mod_base = OTHER; note = 2'-Omethylguanosine
  modified_base 61: mod_base = OTHER; note = 2'-Omethylcytosine
  modified_base 62: mod_base = OTHER; note = 2'-Omethylcytosine
  modified_base 63: mod_base = OTHER; note = 2'-fluorocytosine
  modified_base 64: mod_base = OTHER; note = 2'-Omethylguanosine
  modified_base 65: mod_base = OTHER; note = 2'-Omethylguanosine
  modified_base 66: mod_base = OTHER; note = 2'-Omethylcytosine
  modified_base 67: mod_base = OTHER; note = 2'-Omethylguanosine
  modified_base 68: mod_base = OTHER; note = 2'-Omethylguanosine
  modified_base 73: mod_base = OTHER; note = 2'-Omethylguanosine

SEQ ID NO: 2796 - RNA, 76 nt, synthetic construct; identical to SEQ ID NO: 625
  source 1..76: mol_type = other RNA
  modified_base 1: mod_base = OTHER; note = 2'-Omethylguanosine phosphorothiorate
  modified_base 2: mod_base = OTHER; note = 2'-Omethylguanosine phosphorothiorate
  modified_base 3: mod_base = OTHER; note = 2'-Omethylcytosine
  modified_base 4: mod_base = OTHER; note = 2'-Omethyluridine
  modified_base 5: mod_base = OTHER; note = 2'-Omethylcytosine
  modified_base 6: mod_base = OTHER; note = 2'-Omethylcytosine
  modified_base 16: mod_base = OTHER; note = 2'-Omethyluridine
  modified_base 17: mod_base = OTHER; note = 2'-Omethylguanosine
  modified_base 18: mod_base = OTHER; note = 2'-Omethylguanosine
  modified_base 33: mod_base = OTHER; note = 2'-fluorouridine
  modified_base 35: mod_base = OTHER; note = Cytosine phosphorothiorate
  modified_base 37: mod_base = OTHER; note = Adenosine phosphorothiorate
  modified_base 38: mod_base = OTHER; note = Adenosine phosphorothiorate
  modified_base 44: mod_base = OTHER; note = 2'-Omethyladenosine
  modified_base 45: mod_base = OTHER; note = 2'-Omethylguanosine
  modified_base 46: mod_base = OTHER; note = 2'-fluoroguanosine
  modified_base 47: mod_base = OTHER; note = 2'-fluorouridine
  modified_base 48: mod_base = OTHER; note = 2'-fluorouridine
  modified_base 49: mod_base = OTHER; note = 2'-Omethylcytosine
  modified_base 50: mod_base = OTHER; note = 2'-Omethylcytosine
  modified_base 51: mod_base = OTHER; note = 2'-Omethylguanosine
  modified_base 54: mod_base = OTHER; note = 2'-Omethyluridine
  modified_base 56: mod_base = OTHER; note = 2'-Omethylcytosine
  modified_base 59: mod_base = OTHER; note = 2'-Omethylguanosine
  modified_base 61: mod_base = OTHER; note = 2'-Omethylcytosine
  modified_base 62: mod_base = OTHER; note = 2'-Omethylcytosine
  modified_base 63: mod_base = OTHER; note = 2'-fluorocytosine
  modified_base 64: mod_base = OTHER; note = 2'-Omethylguanosine
  modified_base 65: mod_base = OTHER; note = 2'-Omethylguanosine
  modified_base 66: mod_base = OTHER; note = 2'-Omethylcytosine
  modified_base 67: mod_base = OTHER; note = 2'-Omethylguanosine
  modified_base 68: mod_base = OTHER; note = 2'-Omethylguanosine
  modified_base 73: mod_base = OTHER; note = 2'-Omethylguanosine

SEQ ID NO: 2797 - RNA, 76 nt, synthetic construct; identical to SEQ ID NO: 625
  source 1..76: mol_type = other RNA
  modified_base 1: mod_base = OTHER; note = 2'-Omethylguanosine phosphorothiorate
  modified_base 2: mod_base = OTHER; note = 2'-Omethylguanosine phosphorothiorate
  modified_base 3: mod_base = OTHER; note = 2'-Omethylcytosine
  modified_base 4: mod_base = OTHER; note = 2'-Omethyluridine
  modified_base 5: mod_base = OTHER; note = 2'-Omethylcytosine
  modified_base 6: mod_base = OTHER; note = 2'-Omethylcytosine
  modified_base 16: mod_base = OTHER; note = 2'-Omethyluridine
  modified_base 17: mod_base = OTHER; note = 2'-Omethylguanosine
  modified_base 18: mod_base = OTHER; note = 2'-Omethylguanosine
  modified_base 33: mod_base = OTHER; note = 2'-fluorouridine
  modified_base 35: mod_base = OTHER; note = Cytosine phosphorothiorate
  modified_base 37: mod_base = OTHER; note = Adenosine phosphorothiorate
  modified_base 38: mod_base = OTHER; note = Adenosine phosphorothiorate
  modified_base 44: mod_base = OTHER; note = 2'-Omethyladenosine
  modified_base 45: mod_base = OTHER; note = 2'-Omethylguanosine
  modified_base 46: mod_base = OTHER; note = 2'-fluoroguanosine
  modified_base 47: mod_base = OTHER; note = 2'-fluorouridine
  modified_base 48: mod_base = OTHER; note = 2'-fluorouridine
  modified_base 49: mod_base = OTHER; note = 2'-Omethylcytosine
  modified_base 50: mod_base = OTHER; note = 2'-Omethylcytosine
  modified_base 51: mod_base = OTHER; note = 2'-Omethylguanosine
  modified_base 52: mod_base = OTHER; note = 2'-Omethylguanosine
  modified_base 54: mod_base = OTHER; note = 2'-Omethyluridine
  modified_base 56: mod_base = OTHER; note = 2'-Omethylcytosine
  modified_base 59: mod_base = OTHER; note = 2'-Omethylguanosine
  modified_base 61: mod_base = OTHER; note = 2'-Omethylcytosine
  modified_base 62: mod_base = OTHER; note = 2'-Omethylcytosine
  modified_base 63: mod_base = OTHER; note = 2'-fluorocytosine
  modified_base 64: mod_base = OTHER; note = 2'-Omethylguanosine
  modified_base 65: mod_base = OTHER; note = 2'-Omethylguanosine
  modified_base 66: mod_base = OTHER; note = 2'-Omethylcytosine
  modified_base 67: mod_base = OTHER; note = 2'-Omethylguanosine
  modified_base 68: mod_base = OTHER; note = 2'-Omethylguanosine
  modified_base 73: mod_base = OTHER; note = 2'-Omethylguanosine

SEQ ID NO: 2798 - RNA, 76 nt, synthetic construct; identical to SEQ ID NO: 625
  source 1..76: mol_type = other RNA
  modified_base 1: mod_base = OTHER; note = 2'-Omethylguanosine phosphorothiorate
  modified_base 2: mod_base = OTHER; note = 2'-Omethylguanosine phosphorothiorate
  modified_base 3: mod_base = OTHER; note = 2'-Omethylcytosine
  modified_base 4: mod_base = OTHER; note = 2'-Omethyluridine
  modified_base 5: mod_base = OTHER; note = 2'-Omethylcytosine
  modified_base 6: mod_base = OTHER; note = 2'-Omethylcytosine
  modified_base 16: mod_base = OTHER; note = 2'-Omethyluridine
  modified_base 17: mod_base = OTHER; note = 2'-Omethylguanosine
  modified_base 18: mod_base = OTHER; note = 2'-Omethylguanosine
  modified_base 33: mod_base = OTHER; note = 2'-fluorouridine
  modified_base 35: mod_base = OTHER; note = Cytosine phosphorothiorate
  modified_base 37: mod_base = OTHER; note = Adenosine phosphorothiorate
  modified_base 38: mod_base = OTHER; note = Adenosine phosphorothiorate
  modified_base 44: mod_base = OTHER; note = 2'-Omethyladenosine
  modified_base 45: mod_base = OTHER; note = 2'-Omethylguanosine
  modified_base 46: mod_base = OTHER; note = 2'-fluoroguanosine
  modified_base 47: mod_base = OTHER; note = 2'-fluorouridine
  modified_base 48: mod_base = OTHER; note = 2'-fluorouridine
  modified_base 54: mod_base = OTHER; note = 2'-Omethyluridine
  modified_base 56: mod_base = OTHER; note = 2'-Omethylcytosine
  modified_base 59: mod_base = OTHER; note = 2'-Omethylguanosine
  modified_base 61: mod_base = OTHER; note = 2'-Omethylcytosine
  modified_base 62: mod_base = OTHER; note = 2'-Omethylcytosine
  modified_base 63: mod_base = OTHER; note = 2'-fluorocytosine
  modified_base 64: mod_base = OTHER; note = 2'-Omethylguanosine
  modified_base 65: mod_base = OTHER; note = 2'-Omethylguanosine
  modified_base 66: mod_base = OTHER; note = 2'-Omethylcytosine
  modified_base 67: mod_base = OTHER; note = 2'-Omethylguanosine
  modified_base 68: mod_base = OTHER; note = 2'-Omethylguanosine
  modified_base 73: mod_base = OTHER; note = 2'-Omethylguanosine

SEQ ID NO: 2799 - RNA, 76 nt, synthetic construct; identical to SEQ ID NO: 625
  source 1..76: mol_type = other RNA
  modified_base 1: mod_base = OTHER; note = 2'-Omethylguanosine phosphorothiorate
  modified_base 2: mod_base = OTHER; note = 2'-Omethylguanosine phosphorothiorate
  modified_base 3: mod_base = OTHER; note = 2'-Omethylcytosine
  modified_base 4: mod_base = OTHER; note = 2'-Omethyluridine
  modified_base 5: mod_base = OTHER; note = 2'-Omethylcytosine
  modified_base 6: mod_base = OTHER; note = 2'-Omethylcytosine
  modified_base 16: mod_base = OTHER; note = 2'-Omethyluridine
  modified_base 17: mod_base = OTHER; note = 2'-Omethylguanosine
  modified_base 18: mod_base = OTHER; note = 2'-Omethylguanosine
  modified_base 33: mod_base = OTHER; note = 2'-fluorouridine
  modified_base 35: mod_base = OTHER; note = Cytosine phosphorothiorate
  modified_base 37: mod_base = OTHER; note = Adenosine phosphorothiorate
  modified_base 38: mod_base = OTHER; note = Adenosine phosphorothiorate
  modified_base 44: mod_base = OTHER; note = 2'-Omethyladenosine
  modified_base 45: mod_base = OTHER; note = 2'-Omethylguanosine
  modified_base 46: mod_base = OTHER; note = 2'-fluoroguanosine
  modified_base 47: mod_base = OTHER; note = 2'-fluorouridine
  modified_base 48: mod_base = OTHER; note = 2'-fluorouridine
  modified_base 53: mod_base = OTHER; note = 2'-Omethylguanosine
  modified_base 54: mod_base = OTHER; note = 2'-Omethyluridine
  modified_base 56: mod_base = OTHER; note = 2'-Omethylcytosine
  modified_base 59: mod_base = OTHER; note = 2'-Omethylguanosine
  modified_base 61: mod_base = OTHER; note = 2'-Omethylcytosine
  modified_base 62: mod_base = OTHER; note = 2'-Omethylcytosine
  modified_base 63: mod_base = OTHER; note = 2'-fluorocytosine
  modified_base 64: mod_base = OTHER; note = 2'-Omethylguanosine
  modified_base 65: mod_base = OTHER; note = 2'-Omethylguanosine
  modified_base 66: mod_base = OTHER; note = 2'-Omethylcytosine
  modified_base 67: mod_base = OTHER; note = 2'-Omethylguanosine
  modified_base 68: mod_base = OTHER; note = 2'-Omethylguanosine
  modified_base 73: mod_base = OTHER; note = 2'-Omethylguanosine

SEQ ID NO: 2800 - RNA, 76 nt, synthetic construct; identical to SEQ ID NO: 625
  source 1..76: mol_type = other RNA
  modified_base 1: mod_base = OTHER; note = 2'-Omethylguanosine phosphorothiorate
  modified_base 2: mod_base = OTHER; note = 2'-Omethylguanosine phosphorothiorate
  modified_base 3: mod_base = OTHER; note = 2'-Omethylcytosine
  modified_base 4: mod_base = OTHER; note = 2'-Omethyluridine
  modified_base 5: mod_base = OTHER; note = 2'-Omethylcytosine
  modified_base 6: mod_base = OTHER; note = 2'-Omethylcytosine
  modified_base 16: mod_base = OTHER; note = 2'-Omethyluridine
  modified_base 17: mod_base = OTHER; note = 2'-Omethylguanosine
  modified_base 18: mod_base = OTHER; note = 2'-Omethylguanosine
  modified_base 33: mod_base = OTHER; note = 2'-fluorouridine
  modified_base 35: mod_base = OTHER; note = Cytosine phosphorothiorate
  modified_base 37: mod_base = OTHER; note = Adenosine phosphorothiorate
  modified_base 38: mod_base = OTHER; note = Adenosine phosphorothiorate
  modified_base 44: mod_base = OTHER; note = 2'-Omethyladenosine
  modified_base 45: mod_base = OTHER; note = 2'-Omethylguanosine
  modified_base 46: mod_base = OTHER; note = 2'-fluoroguanosine
  modified_base 47: mod_base = OTHER; note = 2'-fluorouridine
  modified_base 48: mod_base = OTHER; note = 2'-fluorouridine
  modified_base 52: mod_base = OTHER; note = 2'-Omethylguanosine
  modified_base 53: mod_base = OTHER; note = 2'-Omethylguanosine
  modified_base 54: mod_base = OTHER; note = 2'-Omethyluridine
  modified_base 56: mod_base = OTHER; note = 2'-Omethylcytosine
  modified_base 59: mod_base = OTHER; note = 2'-Omethylguanosine
  modified_base 61: mod_base = OTHER; note = 2'-Omethylcytosine
  modified_base 62: mod_base = OTHER; note = 2'-Omethylcytosine
  modified_base 63: mod_base = OTHER; note = 2'-fluorocytosine
  modified_base 64: mod_base = OTHER; note = 2'-Omethylguanosine
  modified_base 65: mod_base = OTHER; note = 2'-Omethylguanosine
  modified_base 66: mod_base = OTHER; note = 2'-Omethylcytosine
  modified_base 67: mod_base = OTHER; note = 2'-Omethylguanosine
  modified_base 68: mod_base = OTHER; note = 2'-Omethylguanosine
  modified_base 73: mod_base = OTHER; note = 2'-Omethylguanosine

SEQ ID NO: 2801 - RNA, 76 nt, synthetic construct; identical to SEQ ID NO: 625
  source 1..76: mol_type = other RNA
  modified_base 1: mod_base = OTHER; note = 2'-Omethylguanosine phosphorothiorate
  modified_base 2: mod_base = OTHER; note = 2'-Omethylguanosine phosphorothiorate
  modified_base 3: mod_base = OTHER; note = 2'-Omethylcytosine
  modified_base 4: mod_base = OTHER; note = 2'-Omethyluridine
  modified_base 5: mod_base = OTHER; note = 2'-Omethylcytosine
  modified_base 6: mod_base = OTHER; note = 2'-Omethylcytosine
  modified_base 16: mod_base = OTHER; note = 2'-Omethyluridine
  modified_base 17: mod_base = OTHER; note = 2'-Omethylguanosine
  modified_base 18: mod_base = OTHER; note = 2'-Omethylguanosine
  modified_base 33: mod_base = OTHER; note = 2'-fluorouridine
  modified_base 35: mod_base = OTHER; note = Cytosine phosphorothiorate
  modified_base 37: mod_base = OTHER; note = Adenosine phosphorothiorate
  modified_base 38: mod_base = OTHER; note = Adenosine phosphorothiorate
  modified_base 44: mod_base = OTHER; note = 2'-Omethyladenosine
  modified_base 45: mod_base = OTHER; note = 2'-Omethylguanosine
  modified_base 46: mod_base = OTHER; note = 2'-fluoroguanosine
  modified_base 47: mod_base = OTHER; note = 2'-fluorouridine
  modified_base 48: mod_base = OTHER; note = 2'-fluorouridine
  modified_base 51: mod_base = OTHER; note = 2'-Omethylguanosine
  modified_base 52: mod_base = OTHER; note = 2'-Omethylguanosine
  modified_base 53: mod_base = OTHER; note = 2'-Omethylguanosine
  modified_base 54: mod_base = OTHER; note = 2'-Omethyluridine
  modified_base 56: mod_base = OTHER; note = 2'-Omethylcytosine
  modified_base 59: mod_base = OTHER; note = 2'-Omethylguanosine
  modified_base 61: mod_base = OTHER; note = 2'-Omethylcytosine
  modified_base 62: mod_base = OTHER; note = 2'-Omethylcytosine
  modified_base 63: mod_base = OTHER; note = 2'-fluorocytosine
  modified_base 64: mod_base = OTHER; note = 2'-Omethylguanosine
  modified_base 65: mod_base = OTHER; note = 2'-Omethylguanosine
  modified_base 66: mod_base = OTHER; note = 2'-Omethylcytosine
  modified_base 67: mod_base = OTHER; note = 2'-Omethylguanosine
  modified_base 68: mod_base = OTHER; note = 2'-Omethylguanosine
  modified_base 73: mod_base = OTHER; note = 2'-Omethylguanosine

SEQ ID NO: 2802 - RNA, 76 nt, synthetic construct; identical to SEQ ID NO: 625
  source 1..76: mol_type = other RNA
  modified_base 1: mod_base = OTHER; note = 2'-Omethylguanosine phosphorothiorate
  modified_base 2: mod_base = OTHER; note = 2'-Omethylguanosine phosphorothiorate
  modified_base 3: mod_base = OTHER; note = 2'-Omethylcytosine
  modified_base 4: mod_base = OTHER; note = 2'-Omethyluridine
  modified_base 5: mod_base = OTHER; note = 2'-Omethylcytosine
  modified_base 6: mod_base = OTHER; note = 2'-Omethylcytosine
  modified_base 10: mod_base = OTHER; note = 2'-Omethylguanosine
  modified_base 11: mod_base = OTHER; note = 2'-Omethylcytosine
  modified_base 12: mod_base = OTHER; note = 2'-Omethylguanosine
  modified_base 13: mod_base = OTHER; note = 2'-Omethylcytosine
  modified_base 16: mod_base = OTHER; note = 2'-Omethyluridine
  modified_base 17: mod_base = OTHER; note = 2'-Omethylguanosine
  modified_base 18: mod_base = OTHER; note = 2'-Omethylguanosine
  modified_base 33: mod_base = OTHER; note = 2'-fluorouridine
  modified_base 35: mod_base = OTHER; note = Cytosine phosphorothiorate
  modified_base 37: mod_base = OTHER; note = Adenosine phosphorothiorate
  modified_base 38: mod_base = OTHER; note = Adenosine phosphorothiorate
  modified_base 44: mod_base = OTHER; note = 2'-Omethyladenosine
  modified_base 45: mod_base = OTHER; note = 2'-Omethylguanosine
  modified_base 46: mod_base = OTHER; note = 2'-fluoroguanosine
  modified_base 47: mod_base = OTHER; note = 2'-fluorouridine
  modified_base 48: mod_base = OTHER; note = 2'-fluorouridine
  modified_base 56: mod_base = OTHER; note = 2'-Omethylcytosine
  modified_base 59: mod_base = OTHER; note = 2'-Omethylguanosine
  modified_base 61: mod_base = OTHER; note = 2'-Omethylcytosine
  modified_base 62: mod_base = OTHER; note = 2'-Omethylcytosine
  modified_base 63: mod_base = OTHER; note = 2'-fluorocytosine
  modified_base 64: mod_base = OTHER; note = 2'-Omethylguanosine
  modified_base 65: mod_base = OTHER; note = 2'-Omethylguanosine
  modified_base 66: mod_base = OTHER; note = 2'-Omethylcytosine
  modified_base 67: mod_base = OTHER; note = 2'-Omethylguanosine
  modified_base 68: mod_base = OTHER; note = 2'-Omethylguanosine
  modified_base 73: mod_base = OTHER; note = 2'-Omethylguanosine

SEQ ID NO: 2803 - RNA, 76 nt, synthetic construct; identical to SEQ ID NO: 625
  source 1..76: mol_type = other RNA
  modified_base 1: mod_base = OTHER; note = 2'-Omethylguanosine phosphorothiorate
  modified_base 2: mod_base = OTHER; note = 2'-Omethylguanosine phosphorothiorate
  modified_base 3: mod_base = OTHER; note = 2'-Omethylcytosine
  modified_base 4: mod_base = OTHER; note = 2'-Omethyluridine
  modified_base 5: mod_base = OTHER; note = 2'-Omethylcytosine
  modified_base 6: mod_base = OTHER; note = 2'-Omethylcytosine
  modified_base 16: mod_base = OTHER; note = 2'-Omethyluridine
  modified_base 17: mod_base = OTHER; note = 2'-Omethylguanosine
  modified_base 18: mod_base = OTHER; note = 2'-Omethylguanosine
  modified_base 22: mod_base = OTHER; note = 2'-Omethylguanosine
  modified_base 23: mod_base = OTHER; note = 2'-Omethylcytosine
  modified_base 24: mod_base = OTHER; note = 2'-Omethylguanosine
  modified_base 25: mod_base = OTHER; note = 2'-Omethylcytosine
  modified_base 33: mod_base = OTHER; note = 2'-fluorouridine
  modified_base 35: mod_base = OTHER; note = Cytosine phosphorothiorate
  modified_base 37: mod_base = OTHER; note = Adenosine phosphorothiorate
  modified_base 38: mod_base = OTHER; note = Adenosine phosphorothiorate
  modified_base 44: mod_base = OTHER; note = 2'-Omethyladenosine
  modified_base 45: mod_base = OTHER; note = 2'-Omethylguanosine
  modified_base 46: mod_base = OTHER; note = 2'-fluoroguanosine
  modified_base 47: mod_base = OTHER; note = 2'-fluorouridine
  modified_base 48: mod_base = OTHER; note = 2'-fluorouridine
  modified_base 56: mod_base = OTHER; note = 2'-Omethylcytosine
  modified_base 59: mod_base = OTHER; note = 2'-Omethylguanosine
  modified_base 61: mod_base = OTHER; note = 2'-Omethylcytosine
  modified_base 62: mod_base = OTHER; note = 2'-Omethylcytosine
  modified_base 63: mod_base = OTHER; note = 2'-fluorocytosine
  modified_base 64: mod_base = OTHER; note = 2'-Omethylguanosine
  modified_base 65: mod_base = OTHER; note = 2'-Omethylguanosine
  modified_base 66: mod_base = OTHER; note = 2'-Omethylcytosine
  modified_base 67: mod_base = OTHER; note = 2'-Omethylguanosine
  modified_base 68: mod_base = OTHER; note = 2'-Omethylguanosine
  modified_base 73: mod_base = OTHER; note = 2'-Omethylguanosine

SEQ ID NO: 2804 - RNA, 76 nt, synthetic construct; identical to SEQ ID NO: 625
  source 1..76: mol_type = other RNA
  modified_base 1: mod_base = OTHER; note = 2'-Omethylguanosine phosphorothiorate
  modified_base 2: mod_base = OTHER; note = 2'-Omethylguanosine phosphorothiorate
  modified_base 3: mod_base = OTHER; note = 2'-Omethylcytosine
  modified_base 4: mod_base = OTHER; note = 2'-Omethyluridine
  modified_base 5: mod_base = OTHER; note = 2'-Omethylcytosine
  modified_base 6: mod_base = OTHER; note = 2'-Omethylcytosine
  modified_base 10: mod_base = OTHER; note = 2'-Omethylguanosine
  modified_base 11: mod_base = OTHER; note = 2'-Omethylcytosine
  modified_base 12: mod_base = OTHER; note = 2'-Omethylguanosine
  modified_base 13: mod_base = OTHER; note = 2'-Omethylcytosine
  modified_base 16: mod_base = OTHER; note = 2'-Omethyluridine
  modified_base 17: mod_base = OTHER; note = 2'-Omethylguanosine
  modified_base 18: mod_base = OTHER; note = 2'-Omethylguanosine
  modified_base 22: mod_base = OTHER; note = 2'-Omethylguanosine
  modified_base 23: mod_base = OTHER; note = 2'-Omethylcytosine
  modified_base 24: mod_base = OTHER; note = 2'-Omethylguanosine
  modified_base 25: mod_base = OTHER; note = 2'-Omethylcytosine
  modified_base 33: mod_base = OTHER; note = 2'-fluorouridine
  modified_base 35: mod_base = OTHER; note = Cytosine phosphorothiorate
  modified_base 37: mod_base = OTHER; note = Adenosine phosphorothiorate
  modified_base 38: mod_base = OTHER; note = Adenosine phosphorothiorate
  modified_base 44: mod_base = OTHER; note = 2'-Omethyladenosine
  modified_base 45: mod_base = OTHER; note = 2'-Omethylguanosine
  modified_base 46: mod_base = OTHER; note = 2'-fluoroguanosine
  modified_base 47: mod_base = OTHER; note = 2'-fluorouridine
  modified_base 48: mod_base = OTHER; note = 2'-fluorouridine
  modified_base 56: mod_base = OTHER; note = 2'-Omethylcytosine
  modified_base 59: mod_base = OTHER; note = 2'-Omethylguanosine
  modified_base 61: mod_base = OTHER; note = 2'-Omethylcytosine
  modified_base 62: mod_base = OTHER; note = 2'-Omethylcytosine
  modified_base 63: mod_base = OTHER; note = 2'-fluorocytosine
  modified_base 64: mod_base = OTHER; note = 2'-Omethylguanosine
  modified_base 65: mod_base = OTHER; note = 2'-Omethylguanosine
  modified_base 66: mod_base = OTHER; note = 2'-Omethylcytosine
  modified_base 67: mod_base = OTHER; note = 2'-Omethylguanosine
  modified_base 68: mod_base = OTHER; note = 2'-Omethylguanosine
  modified_base 73: mod_base = OTHER; note = 2'-Omethylguanosine

SEQ ID NO: 2805 - RNA, 76 nt, synthetic construct; identical to SEQ ID NO: 625
  source 1..76: mol_type = other RNA
  modified_base 1: mod_base = OTHER; note = 2'-Omethylguanosine phosphorothiorate
  modified_base 2: mod_base = OTHER; note = 2'-Omethylguanosine phosphorothiorate
  modified_base 3: mod_base = OTHER; note = 2'-Omethylcytosine
  modified_base 4: mod_base = OTHER; note = 2'-Omethyluridine
  modified_base 5: mod_base = OTHER; note = 2'-Omethylcytosine
  modified_base 6: mod_base = OTHER; note = 2'-Omethylcytosine
  modified_base 14: mod_base = OTHER; note = 2'-Omethyladenosine
  modified_base 15: mod_base = OTHER; note = 2'-fluoroadenosine
  modified_base 16: mod_base = OTHER; note = 2'-Omethyluridine
  modified_base 17: mod_base = OTHER; note = 2'-Omethylguanosine
  modified_base 18: mod_base = OTHER; note = 2'-Omethylguanosine
  modified_base 19: mod_base = OTHER; note = 2'-fluoroadenosine
  modified_base 20: mod_base = OTHER; note = 2'-Omethyluridine
  modified_base 33: mod_base = OTHER; note = 2'-fluorouridine
  modified_base 35: mod_base = OTHER; note = Cytosine phosphorothiorate
  modified_base 37: mod_base = OTHER; note = Adenosine phosphorothiorate
  modified_base 38: mod_base = OTHER; note = Adenosine phosphorothiorate
  modified_base 44: mod_base = OTHER; note = 2'-Omethyladenosine
  modified_base 45: mod_base = OTHER; note = 2'-Omethylguanosine
  modified_base 46: mod_base = OTHER; note = 2'-fluoroguanosine
  modified_base 47: mod_base = OTHER; note = 2'-fluorouridine
  modified_base 48: mod_base = OTHER; note = 2'-fluorouridine
  modified_base 56: mod_base = OTHER; note = 2'-Omethylcytosine
  modified_base 59: mod_base = OTHER; note = 2'-Omethylguanosine
  modified_base 61: mod_base = OTHER; note = 2'-Omethylcytosine
  modified_base 62: mod_base = OTHER; note = 2'-Omethylcytosine
  modified_base 63: mod_base = OTHER; note = 2'-fluorocytosine
  modified_base 64: mod_base = OTHER; note = 2'-Omethylguanosine
  modified_base 65: mod_base = OTHER; note = 2'-Omethylguanosine
  modified_base 66: mod_base = OTHER; note = 2'-Omethylcytosine
  modified_base 67: mod_base = OTHER; note = 2'-Omethylguanosine
  modified_base 68: mod_base = OTHER; note = 2'-Omethylguanosine
  modified_base 73: mod_base = OTHER; note = 2'-Omethylguanosine

SEQ ID NO: 2806 - RNA, 76 nt, synthetic construct; identical to SEQ ID NO: 625
  source 1..76: mol_type = other RNA
  modified_base 1: mod_base = OTHER; note = 2'-Omethylguanosine phosphorothiorate
  modified_base 2: mod_base = OTHER; note = 2'-Omethylguanosine phosphorothiorate
  modified_base 3: mod_base = OTHER; note = 2'-Omethylcytosine
  modified_base 4: mod_base = OTHER; note = 2'-Omethyluridine
  modified_base 5: mod_base = OTHER; note = 2'-Omethylcytosine
  modified_base 6: mod_base = OTHER; note = 2'-Omethylcytosine
  modified_base 10: mod_base = OTHER; note = 2'-Omethylguanosine
  modified_base 11: mod_base = OTHER; note = 2'-Omethylcytosine
  modified_base 12: mod_base = OTHER; note = 2'-Omethylguanosine
  modified_base 13: mod_base = OTHER; note = 2'-Omethylcytosine
  modified_base 14: mod_base = OTHER; note = 2'-Omethyladenosine
  modified_base 15: mod_base = OTHER; note = 2'-fluoroadenosine
  modified_base 16: mod_base = OTHER; note = 2'-Omethyluridine
  modified_base 17: mod_base = OTHER; note = 2'-Omethylguanosine
  modified_base 18: mod_base = OTHER; note = 2'-Omethylguanosine
  modified_base 19: mod_base = OTHER; note = 2'-fluoroadenosine
  modified_base 20: mod_base = OTHER; note = 2'-Omethyluridine
  modified_base 33: mod_base = OTHER; note = 2'-fluorouridine
  modified_base 35: mod_base = OTHER; note = Cytosine phosphorothiorate
  modified_base 37: mod_base = OTHER; note = Adenosine phosphorothiorate
  modified_base 38: mod_base = OTHER; note = Adenosine phosphorothiorate
  modified_base 44: mod_base = OTHER; note = 2'-Omethyladenosine
  modified_base 45: mod_base = OTHER; note = 2'-Omethylguanosine
  modified_base 46: mod_base = OTHER; note = 2'-fluoroguanosine
  modified_base 47: mod_base = OTHER; note = 2'-fluorouridine
  modified_base 48: mod_base = OTHER; note = 2'-fluorouridine
  modified_base 56: mod_base = OTHER; note = 2'-Omethylcytosine
  modified_base 59: mod_base = OTHER; note = 2'-Omethylguanosine
  modified_base 61: mod_base = OTHER; note = 2'-Omethylcytosine
  modified_base 62: mod_base = OTHER; note = 2'-Omethylcytosine
  modified_base 63: mod_base = OTHER; note = 2'-fluorocytosine
  modified_base 64: mod_base = OTHER; note = 2'-Omethylguanosine
  modified_base 65: mod_base = OTHER; note = 2'-Omethylguanosine
  modified_base 66: mod_base = OTHER; note = 2'-Omethylcytosine
  modified_base 67: mod_base = OTHER; note = 2'-Omethylguanosine
  modified_base 68: mod_base = OTHER; note = 2'-Omethylguanosine
  modified_base 73: mod_base = OTHER; note = 2'-Omethylguanosine

SEQ ID NO: 2807 - RNA, 76 nt, synthetic construct; identical to SEQ ID NO: 625
  source 1..76: mol_type = other RNA
  modified_base 1: mod_base = OTHER; note = 2'-Omethylguanosine phosphorothiorate
  modified_base 2: mod_base = OTHER; note = 2'-Omethylguanosine phosphorothiorate
  modified_base 3: mod_base = OTHER; note = 2'-Omethylcytosine
  modified_base 4: mod_base = OTHER; note = 2'-Omethyluridine
  modified_base 5: mod_base = OTHER; note = 2'-Omethylcytosine
  modified_base 6: mod_base = OTHER; note = 2'-Omethylcytosine
  modified_base 14: mod_base = OTHER; note = 2'-Omethyladenosine
  modified_base 15: mod_base = OTHER; note = 2'-fluoroadenosine
  modified_base 16: mod_base = OTHER; note = 2'-Omethyluridine
  modified_base 17: mod_base = OTHER; note = 2'-Omethylguanosine
  modified_base 18: mod_base = OTHER; note = 2'-Omethylguanosine
  modified_base 19: mod_base = OTHER; note = 2'-fluoroadenosine
  modified_base 20: mod_base = OTHER; note = 2'-Omethyluridine
  modified_base 22: mod_base = OTHER; note = 2'-Omethylguanosine
  modified_base 23: mod_base = OTHER; note = 2'-Omethylcytosine
  modified_base 24: mod_base = OTHER; note = 2'-Omethylguanosine
  modified_base 25: mod_base = OTHER; note = 2'-Omethylcytosine
  modified_base 33: mod_base = OTHER; note = 2'-fluorouridine
  modified_base 35: mod_base = OTHER; note = Cytosine phosphorothiorate
  modified_base 37: mod_base = OTHER; note = Adenosine phosphorothiorate
  modified_base 38: mod_base = OTHER; note = Adenosine phosphorothiorate
  modified_base 44: mod_base = OTHER; note = 2'-Omethyladenosine
  modified_base 45: mod_base = OTHER; note = 2'-Omethylguanosine
  modified_base 46: mod_base = OTHER; note = 2'-fluoroguanosine
  modified_base 47: mod_base = OTHER; note = 2'-fluorouridine
  modified_base 48: mod_base = OTHER; note = 2'-fluorouridine
  modified_base 56: mod_base = OTHER; note = 2'-Omethylcytosine
  modified_base 59: mod_base = OTHER; note = 2'-Omethylguanosine
  modified_base 61: mod_base = OTHER; note = 2'-Omethylcytosine
  modified_base 62: mod_base = OTHER; note = 2'-Omethylcytosine
  modified_base 63: mod_base = OTHER; note = 2'-fluorocytosine
  modified_base 64: mod_base = OTHER; note = 2'-Omethylguanosine
  modified_base 65: mod_base = OTHER; note = 2'-Omethylguanosine
  modified_base 66: mod_base = OTHER; note = 2'-Omethylcytosine
  modified_base 67: mod_base = OTHER; note = 2'-Omethylguanosine
  modified_base 68: mod_base = OTHER; note = 2'-Omethylguanosine
  modified_base 73: mod_base = OTHER; note = 2'-Omethylguanosine

SEQ ID NO: 2808 - RNA, 76 nt, synthetic construct; identical to SEQ ID NO: 625
  source 1..76: mol_type = other RNA
  modified_base 1: mod_base = OTHER; note = 2'-Omethylguanosine phosphorothiorate
  modified_base 2: mod_base = OTHER; note = 2'-Omethylguanosine phosphorothiorate
  modified_base 3: mod_base = OTHER; note = 2'-Omethylcytosine
  modified_base 4: mod_base = OTHER; note = 2'-Omethyluridine
  modified_base 5: mod_base = OTHER; note = 2'-Omethylcytosine
  modified_base 6: mod_base = OTHER; note = 2'-Omethylcytosine
  modified_base 10: mod_base = OTHER; note = 2'-Omethylguanosine
  modified_base 11: mod_base = OTHER; note = 2'-Omethylcytosine
  modified_base 12: mod_base = OTHER; note = 2'-Omethylguanosine
  modified_base 13: mod_base = OTHER; note = 2'-Omethylcytosine
  modified_base 14: mod_base = OTHER; note = 2'-Omethyladenosine
  modified_base 15: mod_base = OTHER; note = 2'-fluoroadenosine
  modified_base 16: mod_base = OTHER; note = 2'-Omethyluridine
  modified_base 17: mod_base = OTHER; note = 2'-Omethylguanosine
  modified_base 18: mod_base = OTHER; note = 2'-Omethylguanosine
  modified_base 19: mod_base = OTHER; note = 2'-fluoroadenosine
  modified_base 20: mod_base = OTHER; note = 2'-Omethyluridine
  modified_base 22: mod_base = OTHER; note = 2'-Omethylguanosine
  modified_base 23: mod_base = OTHER; note = 2'-Omethylcytosine
  modified_base 24: mod_base = OTHER; note = 2'-Omethylguanosine
  modified_base 25: mod_base = OTHER; note = 2'-Omethylcytosine
  modified_base 33: mod_base = OTHER; note = 2'-fluorouridine
  modified_base 35: mod_base = OTHER; note = Cytosine phosphorothiorate
  modified_base 37: mod_base = OTHER; note = Adenosine phosphorothiorate
  modified_base 38: mod_base = OTHER; note = Adenosine phosphorothiorate
  modified_base 44: mod_base = OTHER; note = 2'-Omethyladenosine
  modified_base 45: mod_base = OTHER; note = 2'-Omethylguanosine
  modified_base 46: mod_base = OTHER; note = 2'-fluoroguanosine
  modified_base 47: mod_base = OTHER; note = 2'-fluorouridine
  modified_base 48: mod_base = OTHER; note = 2'-fluorouridine
  modified_base 56: mod_base = OTHER; note = 2'-Omethylcytosine
  modified_base 59: mod_base = OTHER; note = 2'-Omethylguanosine
  modified_base 61: mod_base = OTHER; note = 2'-Omethylcytosine
  modified_base 62: mod_base = OTHER; note = 2'-Omethylcytosine
  modified_base 63: mod_base = OTHER; note = 2'-fluorocytosine
  modified_base 64: mod_base = OTHER; note = 2'-Omethylguanosine
  modified_base 65: mod_base = OTHER; note = 2'-Omethylguanosine
  modified_base 66: mod_base = OTHER; note = 2'-Omethylcytosine
  modified_base 67: mod_base = OTHER; note = 2'-Omethylguanosine
  modified_base 68: mod_base = OTHER; note = 2'-Omethylguanosine
  modified_base 73: mod_base = OTHER; note = 2'-Omethylguanosine

SEQ ID NO: 2809 - RNA, 76 nt, synthetic construct; identical to SEQ ID NO: 625
  source 1..76: mol_type = other RNA
  modified_base 1: mod_base = OTHER; note = 2'-Omethylguanosine phosphorothiorate
  modified_base 2: mod_base = OTHER; note = 2'-Omethylguanosine phosphorothiorate
  modified_base 3: mod_base = OTHER; note = 2'-Omethylcytosine
  modified_base 4: mod_base = OTHER; note = 2'-Omethyluridine
  modified_base 5: mod_base = OTHER; note = 2'-Omethylcytosine
  modified_base 6: mod_base = OTHER; note = 2'-Omethylcytosine
  modified_base 16: mod_base = OTHER; note = 2'-Omethyluridine
  modified_base 17: mod_base = OTHER; note = 2'-Omethylguanosine
  modified_base 18: mod_base = OTHER; note = 2'-Omethylguanosine
  modified_base 20: mod_base = OTHER; note = 2'-Omethyluridine phosphorothiorate
  modified_base 25: mod_base = OTHER; note = 2'-Omethylcytosine
  modified_base 33: mod_base = OTHER; note = 2'-fluorouridine
  modified_base 35: mod_base = OTHER; note = Cytosine phosphorothiorate
  modified_base 37: mod_base = OTHER; note = Adenosine phosphorothiorate
  modified_base 38: mod_base = OTHER; note = Adenosine phosphorothiorate
  modified_base 41: mod_base = OTHER; note = 2'-Omethylcytosine
  modified_base 44: mod_base = OTHER; note = 2'-Omethyladenosine
  modified_base 45: mod_base = OTHER; note = 2'-Omethylguanosine
  modified_base 46: mod_base = OTHER; note = 2'-fluoroguanosine
  modified_base 47: mod_base = OTHER; note = 2'-fluorouridine
  modified_base 48: mod_base = OTHER; note = 2'-fluorouridine
  modified_base 56: mod_base = OTHER; note = 2'-Omethylcytosine
  modified_base 59: mod_base = OTHER; note = 2'-Omethylguanosine
  modified_base 61: mod_base = OTHER; note = 2'-Omethylcytosine
  modified_base 62: mod_base = OTHER; note = 2'-Omethylcytosine
  modified_base 63: mod_base = OTHER; note = 2'-fluorocytosine
  modified_base 64: mod_base = OTHER; note = 2'-Omethylguanosine
  modified_base 65: mod_base = OTHER; note = 2'-Omethylguanosine
  modified_base 66: mod_base = OTHER; note = 2'-Omethylcytosine
  modified_base 67: mod_base = OTHER; note = 2'-Omethylguanosine
  modified_base 68: mod_base = OTHER; note = 2'-Omethylguanosine
  modified_base 73: mod_base = OTHER; note = 2'-Omethylguanosine

SEQ ID NO: 2810 - RNA, 76 nt, synthetic construct; identical to SEQ ID NO: 625
  source 1..76: mol_type = other RNA
  modified_base 1: mod_base = OTHER; note = 2'-Omethylguanosine phosphorothiorate
  modified_base 2: mod_base = OTHER; note = 2'-Omethylguanosine phosphorothiorate
  modified_base 3: mod_base = OTHER; note = 2'-Omethylcytosine
  modified_base 4: mod_base = OTHER; note = 2'-Omethyluridine
  modified_base 5: mod_base = OTHER; note = 2'-Omethylcytosine
  modified_base 6: mod_base = OTHER; note = 2'-Omethylcytosine
  modified_base 16: mod_base = OTHER; note = 2'-Omethyluridine
  modified_base 17: mod_base = OTHER; note = 2'-Omethylguanosine
  modified_base 18: mod_base = OTHER; note = 2'-Omethylguanosine
  modified_base 20: mod_base = OTHER; note = 2'-Omethyluridine phosphorothiorate
  modified_base 25: mod_base = OTHER; note = 2'-Omethylcytosine
  modified_base 33: mod_base = OTHER; note = 2'-fluorouridine
  modified_base 35: mod_base = OTHER; note = Cytosine phosphorothiorate
  modified_base 37: mod_base = OTHER; note = Adenosine phosphorothiorate
  modified_base 38: mod_base = OTHER; note = Adenosine phosphorothiorate
  modified_base 41: mod_base = OTHER; note = 2'-fluorocytosine phosphorothiorate
  modified_base 44: mod_base = OTHER; note = 2'-Omethyladenosine
  modified_base 45: mod_base = OTHER; note = 2'-Omethylguanosine
  modified_base 46: mod_base = OTHER; note = 2'-fluoroguanosine
  modified_base 47: mod_base = OTHER; note = 2'-fluorouridine
  modified_base 48: mod_base = OTHER; note = 2'-fluorouridine
  modified_base 56: mod_base = OTHER; note = 2'-Omethylcytosine
  modified_base 59: mod_base = OTHER; note = 2'-Omethylguanosine
  modified_base 61: mod_base = OTHER; note = 2'-Omethylcytosine
  modified_base 62: mod_base = OTHER; note = 2'-Omethylcytosine
  modified_base 63: mod_base = OTHER; note = 2'-fluorocytosine
  modified_base 64: mod_base = OTHER; note = 2'-Omethylguanosine
  modified_base 65: mod_base = OTHER; note = 2'-Omethylguanosine
  modified_base 66: mod_base = OTHER; note = 2'-Omethylcytosine
  modified_base 67: mod_base = OTHER; note = 2'-Omethylguanosine
  modified_base 68: mod_base = OTHER; note = 2'-Omethylguanosine
  modified_base 73: mod_base = OTHER; note = 2'-Omethylguanosine

SEQ ID NO: 2811 - RNA, 76 nt, synthetic construct; identical to SEQ ID NO: 625
  source 1..76: mol_type = other RNA
  modified_base 1: mod_base = OTHER; note = 2'-Omethylguanosine phosphorothiorate
  modified_base 2: mod_base = OTHER; note = 2'-Omethylguanosine phosphorothiorate
  modified_base 3: mod_base = OTHER; note = 2'-Omethylcytosine
  modified_base 4: mod_base = OTHER; note = 2'-Omethyluridine
  modified_base 5: mod_base = OTHER; note = 2'-Omethylcytosine
  modified_base 6: mod_base = OTHER; note = 2'-Omethylcytosine
  modified_base 16: mod_base = OTHER; note = 2'-Omethyluridine
  modified_base 17: mod_base = OTHER; note = 2'-Omethylguanosine
  modified_base 18: mod_base = OTHER; note = 2'-Omethylguanosine
  modified_base 20: mod_base = OTHER; note = 2'-Omethyluridine phosphorothiorate
  modified_base 25: mod_base = OTHER; note = 2'-Omethylcytosine
  modified_base 33: mod_base = OTHER; note = 2'-fluorouridine
  modified_base 35: mod_base = OTHER; note = Cytosine phosphorothiorate
  modified_base 37: mod_base = OTHER; note = Adenosine phosphorothiorate
  modified_base 38: mod_base = OTHER; note = Adenosine phosphorothiorate
  modified_base 41: mod_base = OTHER; note = 2'-fluorocytosine phosphorothiorate
  modified_base 42: mod_base = OTHER; note = 2'-Omethyladenosine
  modified_base 43: mod_base = OTHER; note = 2'-Omethyladenosine
  modified_base 44: mod_base = OTHER; note = 2'-Omethyladenosine
  modified_base 45: mod_base = OTHER; note = 2'-Omethylguanosine
  modified_base 46: mod_base = OTHER; note = 2'-fluoroguanosine
  modified_base 47: mod_base = OTHER; note = 2'-fluorouridine
  modified_base 48: mod_base = OTHER; note = 2'-fluorouridine
  modified_base 56: mod_base = OTHER; note = 2'-Omethylcytosine
  modified_base 59: mod_base = OTHER; note = 2'-Omethylguanosine
  modified_base 61: mod_base = OTHER; note = 2'-Omethylcytosine
  modified_base 62: mod_base = OTHER; note = 2'-Omethylcytosine
  modified_base 63: mod_base = OTHER; note = 2'-fluorocytosine
  modified_base 64: mod_base = OTHER; note = 2'-Omethylguanosine
  modified_base 65: mod_base = OTHER; note = 2'-Omethylguanosine
  modified_base 66: mod_base = OTHER; note = 2'-Omethylcytosine
  modified_base 67: mod_base = OTHER; note = 2'-Omethylguanosine
  modified_base 68: mod_base = OTHER; note = 2'-Omethylguanosine
  modified_base 73: mod_base = OTHER; note = 2'-Omethylguanosine

SEQ ID NO: 2812 - RNA, 76 nt, synthetic construct; identical to SEQ ID NO: 625
  source 1..76: mol_type = other RNA
  modified_base 1: mod_base = OTHER; note = 2'-Omethylguanosine phosphorothiorate
  modified_base 2: mod_base = OTHER; note = 2'-Omethylguanosine phosphorothiorate
  modified_base 3: mod_base = OTHER; note = 2'-Omethylcytosine
  modified_base 4: mod_base = OTHER; note = 2'-Omethyluridine
  modified_base 5: mod_base = OTHER; note = 2'-Omethylcytosine
  modified_base 6: mod_base = OTHER; note = 2'-Omethylcytosine
  modified_base 13: mod_base = OTHER; note = 2'-Omethylcytosine
  modified_base 16: mod_base = OTHER; note = 2'-Omethyluridine
  modified_base 17: mod_base = OTHER; note = 2'-Omethylguanosine
  modified_base 18: mod_base = OTHER; note = 2'-Omethylguanosine
  modified_base 20: mod_base = OTHER; note = 2'-Omethyluridine phosphorothiorate
  modified_base 25: mod_base = OTHER; note = 2'-Omethylcytosine
  modified_base 33: mod_base = OTHER; note = 2'-fluorouridine
  modified_base 35: mod_base = OTHER; note = Cytosine phosphorothiorate
  modified_base 37: mod_base = OTHER; note = Adenosine phosphorothiorate
  modified_base 38: mod_base = OTHER; note = Adenosine phosphorothiorate
  modified_base 41: mod_base = OTHER; note = 2'-fluorocytosine phosphorothiorate
  modified_base 42: mod_base = OTHER; note = 2'-Omethyladenosine
  modified_base 43: mod_base = OTHER; note = 2'-Omethyladenosine
  modified_base 44: mod_base = OTHER; note = 2'-fluoroadenosine
  modified_base 45: mod_base = OTHER; note = 2'-Omethylguanosine
  modified_base 46: mod_base = OTHER; note = 2'-fluoroguanosine
  modified_base 47: mod_base = OTHER; note = 2'-fluorouridine
  modified_base 48: mod_base = OTHER; note = 2'-fluorouridine
  modified_base 56: mod_base = OTHER; note = 2'-Omethylcytosine
  modified_base 59: mod_base = OTHER; note = 2'-Omethylguanosine
  modified_base 61: mod_base = OTHER; note = 2'-Omethylcytosine
  modified_base 62: mod_base = OTHER; note = 2'-Omethylcytosine
  modified_base 63: mod_base = OTHER; note = 2'-fluorocytosine
  modified_base 64: mod_base = OTHER; note = 2'-Omethylguanosine
  modified_base 65: mod_base = OTHER; note = 2'-Omethylguanosine
  modified_base 66: mod_base = OTHER; note = 2'-Omethylcytosine
  modified_base 67: mod_base = OTHER; note = 2'-Omethylguanosine
  modified_base 68: mod_base = OTHER; note = 2'-Omethylguanosine
  modified_base 71: mod_base = OTHER; note = 2'-Omethyluridine
  modified_base 73: mod_base = OTHER; note = 2'-Omethylguanosine

SEQ ID NO: 2813 - RNA, 76 nt, synthetic construct; identical to SEQ ID NO: 625
  source 1..76: mol_type = other RNA
  modified_base 1: mod_base = OTHER; note = 2'-Omethylguanosine phosphorothiorate
  modified_base 2: mod_base = OTHER; note = 2'-Omethylguanosine phosphorothiorate
  modified_base 3: mod_base = OTHER; note = 2'-Omethylcytosine
  modified_base 4: mod_base = OTHER; note = 2'-Omethyluridine
  modified_base 5: mod_base = OTHER; note = 2'-Omethylcytosine
  modified_base 6: mod_base = OTHER; note = 2'-Omethylcytosine
  modified_base 10: mod_base = OTHER; note = 2'-Omethylguanosine
  modified_base 13: mod_base = OTHER; note = 2'-Omethylcytosine
  modified_base 16: mod_base = OTHER; note = 2'-Omethyluridine
  modified_base 17: mod_base = OTHER; note = 2'-Omethylguanosine
  modified_base 18: mod_base = OTHER; note = 2'-Omethylguanosine
  modified_base 20: mod_base = OTHER; note = 2'-Omethyluridine phosphorothiorate
  modified_base 25: mod_base = OTHER; note = 2'-Omethylcytosine
  modified_base 29: mod_base = OTHER; note = 2'-Omethylguanosine
  modified_base 33: mod_base = OTHER; note = 2'-fluorouridine
  modified_base 35: mod_base = OTHER; note = Cytosine phosphorothiorate
  modified_base 37: mod_base = OTHER; note = Adenosine phosphorothiorate
  modified_base 38: mod_base = OTHER; note = Adenosine phosphorothiorate
  modified_base 41: mod_base = OTHER; note = 2'-fluorocytosine phosphorothiorate
  modified_base 43: mod_base = OTHER; note = 2'-Omethyladenosine
  modified_base 44: mod_base = OTHER; note = 2'-fluoroadenosine
  modified_base 45: mod_base = OTHER; note = 2'-Omethylguanosine
  modified_base 46: mod_base = OTHER; note = 2'-fluoroguanosine
  modified_base 47: mod_base = OTHER; note = 2'-fluorouridine
  modified_base 48: mod_base = OTHER; note = 2'-fluorouridine
  modified_base 50: mod_base = OTHER; note = 2'-Omethylcytosine
  modified_base 52: mod_base = OTHER; note = 2'-Omethylguanosine
  modified_base 54: mod_base = OTHER; note = Uridine phosphorothiorate
  modified_base 55: mod_base = OTHER; note = Uridine phosphorothiorate
  modified_base 56: mod_base = OTHER; note = 2'-Omethylcytosine
  modified_base 57: mod_base = OTHER; note = Guanosine phosphorothiorate
  modified_base 59: mod_base = OTHER; note = 2'-Omethylguanosine
  modified_base 61: mod_base = OTHER; note = 2'-Omethylcytosine
  modified_base 62: mod_base = OTHER; note = 2'-Omethylcytosine
  modified_base 63: mod_base = OTHER; note = 2'-fluorocytosine
  modified_base 64: mod_base = OTHER; note = 2'-Omethylguanosine
  modified_base 65: mod_base = OTHER; note = 2'-Omethylguanosine
  modified_base 66: mod_base = OTHER; note = 2'-Omethylcytosine
  modified_base 67: mod_base = OTHER; note = 2'-Omethylguanosine
  modified_base 68: mod_base = OTHER; note = 2'-Omethylguanosine
  modified_base 71: mod_base = OTHER; note = 2'-Omethyluridine
  modified_base 73: mod_base = OTHER; note = 2'-Omethylguanosine

SEQ ID NO: 2814 - RNA, 76 nt, synthetic construct; identical to SEQ ID NO: 625
  source 1..76: mol_type = other RNA
  modified_base 1: mod_base = OTHER; note = 2'-Omethylguanosine phosphorothiorate
  modified_base 2: mod_base = OTHER; note = 2'-Omethylguanosine phosphorothiorate
  modified_base 3: mod_base = OTHER; note = 2'-Omethylcytosine
  modified_base 4: mod_base = OTHER; note = 2'-Omethyluridine
  modified_base 5: mod_base = OTHER; note = 2'-Omethylcytosine
  modified_base 6: mod_base = OTHER; note = 2'-Omethylcytosine
  modified_base 66: mod_base = OTHER; note = 2'-Omethylcytosine
  modified_base 67: mod_base = OTHER; note = 2'-Omethylguanosine
  modified_base 68: mod_base = OTHER; note = 2'-Omethylguanosine
  modified_base 69: mod_base = OTHER; note = 2'-Omethyladenosine
  modified_base 71: mod_base = OTHER; note = 2'-fluorouridine
  modified_base 72: mod_base = OTHER; note = 2'-Omethylcytosine
  modified_base 73: mod_base = OTHER; note = 2'-Omethylguanosine

SEQ ID NO: 2815 - RNA, 76 nt, synthetic construct; identical to SEQ ID NO: 625
  source 1..76: mol_type = other RNA
  modified_base 1: mod_base = OTHER; note = 2'-Omethylguanosine phosphorothiorate
  modified_base 2: mod_base = OTHER; note = 2'-Omethylguanosine phosphorothiorate
  modified_base 3: mod_base = OTHER; note = 2'-Omethylcytosine
  modified_base 4: mod_base = OTHER; note = 2'-Omethyluridine
  modified_base 5: mod_base = OTHER; note = 2'-Omethylcytosine
  modified_base 6: mod_base = OTHER; note = 2'-Omethylcytosine
  modified_base 66: mod_base = OTHER; note = 2'-Omethylcytosine
  modified_base 67: mod_base = OTHER; note = 2'-Omethylguanosine
  modified_base 68: mod_base = OTHER; note = 2'-Omethylguanosine
  modified_base 69: mod_base = OTHER; note = 2'-Omethyladenosine
  modified_base 71: mod_base = OTHER; note = 2'-Omethyluridine
  modified_base 72: mod_base = OTHER; note = 2'-fluorocytosine
  modified_base 73: mod_base = OTHER; note = 2'-Omethylguanosine

SEQ ID NO: 2816 - RNA, 76 nt, synthetic construct; identical to SEQ ID NO: 625
  source 1..76: mol_type = other RNA
  modified_base 1: mod_base = OTHER; note = 2'-Omethylguanosine phosphorothiorate
  modified_base 2: mod_base = OTHER; note = 2'-Omethylguanosine phosphorothiorate
  modified_base 3: mod_base = OTHER; note = 2'-Omethylcytosine
  modified_base 4: mod_base = OTHER; note = 2'-Omethyluridine
  modified_base 5: mod_base = OTHER; note = 2'-Omethylcytosine
  modified_base 6: mod_base = OTHER; note = 2'-Omethylcytosine
  modified_base 66: mod_base = OTHER; note = 2'-Omethylcytosine
  modified_base 67: mod_base = OTHER; note = 2'-Omethylguanosine
  modified_base 68: mod_base = OTHER; note = 2'-Omethylguanosine
  modified_base 71: mod_base = OTHER; note = 2'-Omethyluridine
  modified_base 72: mod_base = OTHER; note = 2'-Omethylcytosine
  modified_base 73: mod_base = OTHER; note = 2'-Omethylguanosine

SEQ ID NO: 2817 - RNA, 76 nt, synthetic construct; identical to SEQ ID NO: 625
  source 1..76: mol_type = other RNA
  modified_base 1: mod_base = OTHER; note = 2'-Omethylguanosine
  modified_base 2: mod_base = OTHER; note = 2'-Omethylguanosine
  modified_base 3: mod_base = OTHER; note = 2'-Omethylcytosine
  modified_base 4: mod_base = OTHER; note = 2'-Omethyluridine
  modified_base 5: mod_base = OTHER; note = 2'-Omethylcytosine
  modified_base 6: mod_base = OTHER; note = 2'-Omethylcytosine
  modified_base 10: mod_base = OTHER; note = 2'-Omethylguanosine
  modified_base 13: mod_base = OTHER; note = 2'-Omethylcytosine
  modified_base 17: mod_base = OTHER; note = Guanosine phosphorothiorate
  modified_base 18: mod_base = OTHER; note = 2'-Omethylguanosine
  modified_base 19: mod_base = OTHER; note = Adenosine phosphorothiorate
  modified_base 20: mod_base = OTHER; note = 2'-Omethyluridine
  modified_base 25: mod_base = OTHER; note = 2'-Omethylcytosine
  modified_base 29: mod_base = OTHER; note = 2'-Omethylguanosine
  modified_base 33: mod_base = OTHER; note = 2'-fluorouridine
  modified_base 35: mod_base = OTHER; note = Cytosine phosphorothiorate
  modified_base 37: mod_base = OTHER; note = Adenosine phosphorothiorate
  modified_base 38: mod_base = OTHER; note = Adenosine phosphorothiorate
  modified_base 41: mod_base = OTHER; note = 2'-fluorocytosine phosphorothiorate
  modified_base 43: mod_base = OTHER; note = 2'-Omethyladenosine
  modified_base 44: mod_base = OTHER; note = 2'-fluoroadenosine
  modified_base 46: mod_base = OTHER; note = Guanosine phosphorothiorate
  modified_base 50: mod_base = OTHER; note = 2'-Omethylcytosine
  modified_base 52: mod_base = OTHER; note = 2'-Omethylguanosine
  modified_base 54: mod_base = OTHER; note = Uridine phosphorothiorate
  modified_base 55: mod_base = OTHER; note = Uridine phosphorothiorate
  modified_base 56: mod_base = OTHER; note = 2'-Omethylcytosine
  modified_base 57: mod_base = OTHER; note = Guanosine phosphorothiorate
  modified_base 62: mod_base = OTHER; note = 2'-Omethylcytosine
  modified_base 63: mod_base = OTHER; note = 2'-fluorocytosine
  modified_base 65: mod_base = OTHER; note = 2'-Omethylguanosine
  modified_base 71: mod_base = OTHER; note = 2'-Omethyluridine
  modified_base 73: mod_base = OTHER; note = 2'-Omethylguanosine

SEQ ID NO: 2818 - RNA, 76 nt, synthetic construct; identical to SEQ ID NO: 625
  source 1..76: mol_type = other RNA
  modified_base 1: mod_base = OTHER; note = 2'-Omethylguanosine phosphorothiorate
  modified_base 2: mod_base = OTHER; note = 2'-Omethylguanosine phosphorothiorate
  modified_base 3: mod_base = OTHER; note = 2'-Omethylcytosine
  modified_base 4: mod_base = OTHER; note = 2'-Omethyluridine
  modified_base 5: mod_base = OTHER; note = 2'-Omethylcytosine
  modified_base 6: mod_base = OTHER; note = 2'-Omethylcytosine
  modified_base 10: mod_base = OTHER; note = 2'-Omethylguanosine
  modified_base 13: mod_base = OTHER; note = 2'-Omethylcytosine
  modified_base 17: mod_base = OTHER; note = Guanosine phosphorothiorate
  modified_base 18: mod_base = OTHER; note = 2'-Omethylguanosine
  modified_base 19: mod_base = OTHER; note = Adenosine phosphorothiorate
  modified_base 20: mod_base = OTHER; note = 2'-Omethyluridine
  modified_base 25: mod_base = OTHER; note = 2'-Omethylcytosine
  modified_base 29: mod_base = OTHER; note = 2'-Omethylguanosine
  modified_base 33: mod_base = OTHER; note = 2'-fluorouridine
  modified_base 35: mod_base = OTHER; note = Cytosine phosphorothiorate
  modified_base 37: mod_base = OTHER; note = Adenosine phosphorothiorate
  modified_base 38: mod_base = OTHER; note = Adenosine phosphorothiorate
  modified_base 41: mod_base = OTHER; note = 2'-fluorocytosine phosphorothiorate
  modified_base 43: mod_base = OTHER; note = 2'-Omethyladenosine
  modified_base 44: mod_base = OTHER; note = 2'-fluoroadenosine
  modified_base 46: mod_base = OTHER; note = Guanosine phosphorothiorate
  modified_base 50: mod_base = OTHER; note = 2'-Omethylcytosine
  modified_base 52: mod_base = OTHER; note = 2'-Omethylguanosine
  modified_base 54: mod_base = OTHER; note = Uridine phosphorothiorate
  modified_base 55: mod_base = OTHER; note = Uridine phosphorothiorate
  modified_base 56: mod_base = OTHER; note = 2'-Omethylcytosine
  modified_base 57: mod_base = OTHER; note = Guanosine phosphorothiorate
  modified_base 62: mod_base = OTHER; note = 2'-Omethylcytosine
  modified_base 63: mod_base = OTHER; note = 2'-fluorocytosine
  modified_base 65: mod_base = OTHER; note = 2'-Omethylguanosine
  modified_base 71: mod_base = OTHER; note = 2'-Omethyluridine
  modified_base 73: mod_base = OTHER; note = 2'-Omethylguanosine

SEQ ID NO: 2819 - RNA, 74 nt, synthetic construct; identical to SEQ ID NO: 766
  source 1..74: mol_type = other RNA
  modified_base 1: mod_base = OTHER; note = 2'-Omethylguanosine phosphorothiorate
  modified_base 2: mod_base = OTHER; note = 2'-Omethylguanosine phosphorothiorate
  modified_base 3: mod_base = OTHER; note = 2'-Omethylcytosine
  modified_base 4: mod_base = OTHER; note = 2'-Omethyluridine
  modified_base 5: mod_base = OTHER; note = 2'-Omethylcytosine
  modified_base 6: mod_base = OTHER; note = 2'-Omethylcytosine
  modified_base 10: mod_base = OTHER; note = 2'-Omethylguanosine
  modified_base 13: mod_base = OTHER; note = 2'-Omethylcytosine
  modified_base 17: mod_base = OTHER; note = Guanosine phosphorothiorate
  modified_base 18: mod_base = OTHER; note = 2'-Omethylguanosine
  modified_base 19: mod_base = OTHER; note = Adenosine phosphorothiorate
  modified_base 20: mod_base = OTHER; note = 2'-Omethyluridine
  modified_base 25: mod_base = OTHER; note = 2'-Omethylcytosine
  modified_base 29: mod_base = OTHER; note = 2'-Omethylguanosine
  modified_base 33: mod_base = OTHER; note = 2'-fluorouridine
  modified_base 35: mod_base = OTHER; note = Cytosine phosphorothiorate
  modified_base 37: mod_base = OTHER; note = Adenosine phosphorothiorate
  modified_base 38: mod_base = OTHER; note = Adenosine phosphorothiorate
  modified_base 41: mod_base = OTHER; note = 2'-fluorocytosine phosphorothiorate
  modified_base 43: mod_base = OTHER; note = 2'-Omethyladenosine
  modified_base 44: mod_base = OTHER; note = 2'-fluoroadenosine
  modified_base 46: mod_base = OTHER; note = Guanosine phosphorothiorate
  modified_base 50: mod_base = OTHER; note = 2'-Omethylcytosine
  modified_base 52: mod_base = OTHER; note = 2'-Omethylguanosine
  modified_base 54: mod_base = OTHER; note = Uridine phosphorothiorate
  modified_base 55: mod_base = OTHER; note = Uridine phosphorothiorate
  modified_base 56: mod_base = OTHER; note = 2'-Omethylcytosine
  modified_base 57: mod_base = OTHER; note = Guanosine phosphorothiorate
  modified_base 62: mod_base = OTHER; note = 2'-Omethylcytosine
  modified_base 63: mod_base = OTHER; note = 2'-fluorocytosine
  modified_base 65: mod_base = OTHER; note = 2'-Omethylguanosine
  modified_base 71: mod_base = OTHER; note = 2'-Omethyluridine
  modified_base 73: mod_base = OTHER; note = 2'-Omethylguanosine

SEQ ID NO: 2820 - RNA, 76 nt, synthetic construct; identical to SEQ ID NO: 625
  source 1..76: mol_type = other RNA
  modified_base 1: mod_base = OTHER; note = 2'-Omethylguanosine
  modified_base 2: mod_base = OTHER; note = 2'-Omethylguanosine
  modified_base 3: mod_base = OTHER; note = 2'-Omethylcytosine
  modified_base 4: mod_base = OTHER; note = 2'-Omethyluridine
  modified_base 5: mod_base = OTHER; note = 2'-Omethylcytosine
  modified_base 6: mod_base = OTHER; note = 2'-Omethylcytosine
  modified_base 17: mod_base = OTHER; note = 2'-Omethylguanosine
  modified_base 18: mod_base = OTHER; note = 2'-Omethylguanosine
  modified_base 50: mod_base = OTHER; note = 2'-Omethylcytosine
  modified_base 52: mod_base = OTHER; note = 2'-Omethylguanosine
  modified_base 73: mod_base = OTHER; note = 2'-Omethylguanosine

SEQ ID NO: 2821 - RNA, 76 nt, synthetic construct; identical to SEQ ID NO: 625
  source 1..76: mol_type = other RNA
  modified_base 1: mod_base = OTHER; note = 2'-Omethylguanosine phosphorothiorate
  modified_base 2: mod_base = OTHER; note = 2'-Omethylguanosine phosphorothiorate
  modified_base 3: mod_base = OTHER; note = 2'-Omethylcytosine
  modified_base 4: mod_base = OTHER; note = 2'-Omethyluridine
  modified_base 5: mod_base = OTHER; note = 2'-Omethylcytosine
  modified_base 6: mod_base = OTHER; note = 2'-Omethylcytosine
  modified_base 17: mod_base = OTHER; note = 2'-Omethylguanosine
  modified_base 18: mod_base = OTHER; note = 2'-Omethylguanosine
  modified_base 50: mod_base = OTHER; note = 2'-Omethylcytosine
  modified_base 52: mod_base = OTHER; note = 2'-Omethylguanosine
  modified_base 73: mod_base = OTHER; note = 2'-Omethylguanosine

SEQ ID NO: 2822 - RNA, 74 nt, synthetic construct; identical to SEQ ID NO: 766
  source 1..74: mol_type = other RNA
  modified_base 1: mod_base = OTHER; note = 2'-Omethylguanosine phosphorothiorate
  modified_base 2: mod_base = OTHER; note = 2'-Omethylguanosine phosphorothiorate
  modified_base 3: mod_base = OTHER; note = 2'-Omethylcytosine
  modified_base 4: mod_base = OTHER; note = 2'-Omethyluridine
  modified_base 5: mod_base = OTHER; note = 2'-Omethylcytosine
  modified_base 6: mod_base = OTHER; note = 2'-Omethylcytosine
  modified_base 17: mod_base = OTHER; note = 2'-Omethylguanosine
  modified_base 18: mod_base = OTHER; note = 2'-Omethylguanosine
  modified_base 50: mod_base = OTHER; note = 2'-Omethylcytosine
  modified_base 52: mod_base = OTHER; note = 2'-Omethylguanosine
  modified_base 73: mod_base = OTHER; note = 2'-Omethylguanosine

SEQ ID NO: 2823 - RNA, 76 nt, synthetic construct; identical to SEQ ID NO: 625
  source 1..76: mol_type = other RNA
  modified_base 1: mod_base = OTHER; note = 2'-Omethylguanosine phosphorothiorate
  modified_base 2: mod_base = OTHER; note = 2'-Omethylguanosine phosphorothiorate
  modified_base 3: mod_base = OTHER; note = 2'-Omethylcytosine
  modified_base 4: mod_base = OTHER; note = 2'-Omethyluridine
  modified_base 5: mod_base = OTHER; note = 2'-Omethylcytosine
  modified_base 6: mod_base = OTHER; note = 2'-Omethylcytosine
  modified_base 49: mod_base = OTHER; note = 2'-Omethylcytosine
  modified_base 50: mod_base = OTHER; note = 2'-Omethylcytosine
  modified_base 51: mod_base = OTHER; note = 2'-Omethylguanosine
  modified_base 52: mod_base = OTHER; note = 2'-Omethylguanosine
  modified_base 53: mod_base = OTHER; note = 2'-Omethylguanosine
  modified_base 54: mod_base = OTHER; note = 2'-Omethyluridine
  modified_base 61: mod_base = OTHER; note = 2'-Omethylcytosine
  modified_base 62: mod_base = OTHER; note = 2'-Omethylcytosine
  modified_base 63: mod_base = OTHER; note = 2'-fluorocytosine
  modified_base 64: mod_base = OTHER; note = 2'-Omethylguanosine
  modified_base 65: mod_base = OTHER; note = 2'-Omethylguanosine
  modified_base 66: mod_base = OTHER; note = 2'-Omethylcytosine
  modified_base 67: mod_base = OTHER; note = 2'-Omethylguanosine
  modified_base 68: mod_base = OTHER; note = 2'-Omethylguanosine
  modified_base 73: mod_base = OTHER; note = 2'-Omethylguanosine

SEQ ID NO: 2824 - RNA, 76 nt, synthetic construct; identical to SEQ ID NO: 625
  source 1..76: mol_type = other RNA
  modified_base 1: mod_base = OTHER; note = 2'-Omethylguanosine phosphorothiorate
  modified_base 2: mod_base = OTHER; note = 2'-Omethylguanosine phosphorothiorate
  modified_base 3: mod_base = OTHER; note = 2'-Omethylcytosine
  modified_base 4: mod_base = OTHER; note = 2'-Omethyluridine
  modified_base 5: mod_base = OTHER; note = 2'-Omethylcytosine
  modified_base 6: mod_base = OTHER; note = 2'-Omethylcytosine
  modified_base 16: mod_base = OTHER; note = 2'-Omethyluridine
  modified_base 17: mod_base = OTHER; note = 2'-Omethylguanosine
  modified_base 18: mod_base = OTHER; note = 2'-Omethylguanosine
  modified_base 33: mod_base = OTHER; note = 2'-fluorouridine
  modified_base 35: mod_base = OTHER; note = Cytosine phosphorothiorate
  modified_base 37: mod_base = OTHER; note = Adenosine phosphorothiorate
  modified_base 38: mod_base = OTHER; note = Adenosine phosphorothiorate
  modified_base 44: mod_base = OTHER; note = 2'-Omethyladenosine
  modified_base 45: mod_base = OTHER; note = 2'-Omethylguanosine
  modified_base 46: mod_base = OTHER; note = 2'-fluoroguanosine
  modified_base 47: mod_base = OTHER; note = 2'-fluorouridine
  modified_base 48: mod_base = OTHER; note = 2'-fluorouridine
  modified_base 49: mod_base = OTHER; note = 2'-Omethylcytosine
  modified_base 50: mod_base = OTHER; note = 2'-Omethylcytosine
  modified_base 51: mod_base = OTHER; note = 2'-Omethylguanosine
  modified_base 52: mod_base = OTHER; note = 2'-Omethylguanosine
  modified_base 53: mod_base = OTHER; note = 2'-Omethylguanosine
  modified_base 54: mod_base = OTHER; note = 2'-Omethyluridine
  modified_base 56: mod_base = OTHER; note = 2'-Omethylcytosine
  modified_base 59: mod_base = OTHER; note = 2'-Omethylguanosine
  modified_base 73: mod_base = OTHER; note = 2'-Omethylguanosine

SEQ ID NO: 2825 - RNA, 76 nt, synthetic construct; identical to SEQ ID NO: 625
  source 1..76: mol_type = other RNA
  modified_base 1: mod_base = OTHER; note = 2'-Omethylguanosine phosphorothiorate
  modified_base 2: mod_base = OTHER; note = 2'-Omethylguanosine phosphorothiorate
  modified_base 3: mod_base = OTHER; note = 2'-Omethylcytosine
  modified_base 4: mod_base = OTHER; note = 2'-Omethyluridine
  modified_base 5: mod_base = OTHER; note = 2'-Omethylcytosine
  modified_base 6: mod_base = OTHER; note = 2'-Omethylcytosine
  modified_base 16: mod_base = OTHER; note = 2'-Omethyluridine
  modified_base 17: mod_base = OTHER; note = 2'-Omethylguanosine
  modified_base 18: mod_base = OTHER; note = 2'-Omethylguanosine
  modified_base 33: mod_base = OTHER; note = 2'-fluorouridine
  modified_base 35: mod_base = OTHER; note = Cytosine phosphorothiorate
  modified_base 37: mod_base = OTHER; note = Adenosine phosphorothiorate
  modified_base 38: mod_base = OTHER; note = Adenosine phosphorothiorate
  modified_base 44: mod_base = OTHER; note = 2'-Omethyladenosine
  modified_base 45: mod_base = OTHER; note = 2'-Omethylguanosine
  modified_base 46: mod_base = OTHER; note = 2'-fluoroguanosine
  modified_base 47: mod_base = OTHER; note = 2'-fluorouridine
  modified_base 48: mod_base = OTHER; note = 2'-fluorouridine
  modified_base 56: mod_base = OTHER; note = 2'-Omethylcytosine
  modified_base 59: mod_base = OTHER; note = 2'-Omethylguanosine
  modified_base 61: mod_base = OTHER; note = 2'-Omethylcytosine
  modified_base 62: mod_base = OTHER; note = 2'-Omethylcytosine
  modified_base 63: mod_base = OTHER; note = 2'-fluorocytosine
  modified_base 64: mod_base = OTHER; note = 2'-Omethylguanosine
  modified_base 65: mod_base = OTHER; note = 2'-Omethylguanosine
  modified_base 66: mod_base = OTHER; note = 2'-Omethylcytosine
  modified_base 67: mod_base = OTHER; note = 2'-Omethylguanosine
  modified_base 68: mod_base = OTHER; note = 2'-Omethylguanosine
  modified_base 73: mod_base = OTHER; note = 2'-Omethylguanosine

SEQ ID NO: 2826 - RNA, 76 nt, synthetic construct; identical to SEQ ID NO: 625
  source 1..76: mol_type = other RNA
  modified_base 1: mod_base = OTHER; note = 2'-Omethylguanosine phosphorothiorate
  modified_base 2: mod_base = OTHER; note = 2'-Omethylguanosine phosphorothiorate
  modified_base 3: mod_base = OTHER; note = 2'-Omethylcytosine
  modified_base 4: mod_base = OTHER; note = 2'-Omethyluridine
  modified_base 5: mod_base = OTHER; note = 2'-Omethylcytosine
  modified_base 6: mod_base = OTHER; note = 2'-Omethylcytosine
  modified_base 16: mod_base = OTHER; note = 2'-Omethyluridine
  modified_base 17: mod_base = OTHER; note = 2'-Omethylguanosine
  modified_base 18: mod_base = OTHER; note = 2'-Omethylguanosine
  modified_base 33: mod_base = OTHER; note = 2'-fluorouridine
  modified_base 35: mod_base = OTHER; note = Cytosine phosphorothiorate
  modified_base 37: mod_base = OTHER; note = Adenosine phosphorothiorate
  modified_base 38: mod_base = OTHER; note = Adenosine phosphorothiorate
  modified_base 44: mod_base = OTHER; note = 2'-Omethyladenosine
  modified_base 45: mod_base = OTHER; note = 2'-Omethylguanosine
  modified_base 46: mod_base = OTHER; note = 2'-fluoroguanosine
  modified_base 47: mod_base = OTHER; note = 2'-fluorouridine
  modified_base 48: mod_base = OTHER; note = 2'-fluorouridine
  modified_base 56: mod_base = OTHER; note = 2'-Omethylcytosine
  modified_base 59: mod_base = OTHER; note = 2'-Omethylguanosine
  modified_base 73: mod_base = OTHER; note = 2'-Omethylguanosine

SEQ ID NO: 2827 - RNA, 76 nt, synthetic construct; identical to SEQ ID NO: 625
  source 1..76: mol_type = other RNA
  modified_base 1: mod_base = OTHER; note = 2'-Omethylguanosine phosphorothiorate
  modified_base 2: mod_base = OTHER; note = 2'-Omethylguanosine phosphorothiorate
  modified_base 3: mod_base = OTHER; note = 2'-Omethylcytosine
  modified_base 4: mod_base = OTHER; note = 2'-Omethyluridine
  modified_base 5: mod_base = OTHER; note = 2'-Omethylcytosine
  modified_base 6: mod_base = OTHER; note = 2'-Omethylcytosine
  modified_base 20: mod_base = OTHER; note = 2'-Omethyluridine
  modified_base 25: mod_base = OTHER; note = 2'-Omethylcytosine
  modified_base 41: mod_base = OTHER; note = 2'-Omethylcytosine
  modified_base 49: mod_base = OTHER; note = 2'-Omethylcytosine
  modified_base 50: mod_base = OTHER; note = 2'-Omethylcytosine
  modified_base 51: mod_base = OTHER; note = 2'-Omethylguanosine
  modified_base 52: mod_base = OTHER; note = 2'-Omethylguanosine
  modified_base 53: mod_base = OTHER; note = 2'-Omethylguanosine
  modified_base 54: mod_base = OTHER; note = 2'-Omethyluridine
  modified_base 61: mod_base = OTHER; note = 2'-Omethylcytosine
  modified_base 62: mod_base = OTHER; note = 2'-Omethylcytosine
  modified_base 63: mod_base = OTHER; note = 2'-fluorocytosine
  modified_base 64: mod_base = OTHER; note = 2'-Omethylguanosine
  modified_base 65: mod_base = OTHER; note = 2'-Omethylguanosine
  modified_base 66: mod_base = OTHER; note = 2'-Omethylcytosine
  modified_base 67: mod_base = OTHER; note = 2'-Omethylguanosine
  modified_base 68: mod_base = OTHER; note = 2'-Omethylguanosine
  modified_base 73: mod_base = OTHER; note = 2'-Omethylguanosine

SEQ ID NO: 2828 - RNA, 76 nt, synthetic construct; identical to SEQ ID NO: 625
  source 1..76: mol_type = other RNA
  modified_base 1: mod_base = OTHER; note = 2'-Omethylguanosine phosphorothiorate
  modified_base 2: mod_base = OTHER; note = 2'-Omethylguanosine phosphorothiorate
  modified_base 3: mod_base = OTHER; note = 2'-Omethylcytosine
  modified_base 4: mod_base = OTHER; note = 2'-Omethyluridine
  modified_base 5: mod_base = OTHER; note = 2'-Omethylcytosine
  modified_base 6: mod_base = OTHER; note = 2'-Omethylcytosine
  modified_base 16: mod_base = OTHER; note = 2'-Omethyluridine
  modified_base 17: mod_base = OTHER; note = 2'-Omethylguanosine
  modified_base 18: mod_base = OTHER; note = 2'-Omethylguanosine
  modified_base 20: mod_base = OTHER; note = 2'-Omethyluridine
  modified_base 25: mod_base = OTHER; note = 2'-Omethylcytosine
  modified_base 33: mod_base = OTHER; note = 2'-fluorouridine
  modified_base 35: mod_base = OTHER; note = Cytosine phosphorothiorate
  modified_base 37: mod_base = OTHER; note = Adenosine phosphorothiorate
  modified_base 38: mod_base = OTHER; note = Adenosine phosphorothiorate
  modified_base 41: mod_base = OTHER; note = 2'-Omethylcytosine
  modified_base 44: mod_base = OTHER; note = 2'-Omethyladenosine
  modified_base 45: mod_base = OTHER; note = 2'-Omethylguanosine
  modified_base 46: mod_base = OTHER; note = 2'-fluoroguanosine
  modified_base 47: mod_base = OTHER; note = 2'-fluorouridine
  modified_base 48: mod_base = OTHER; note = 2'-fluorouridine
  modified_base 49: mod_base = OTHER; note = 2'-Omethylcytosine
  modified_base 50: mod_base = OTHER; note = 2'-Omethylcytosine
  modified_base 51: mod_base = OTHER; note = 2'-Omethylguanosine
  modified_base 52: mod_base = OTHER; note = 2'-Omethylguanosine
  modified_base 53: mod_base = OTHER; note = 2'-Omethylguanosine
  modified_base 54: mod_base = OTHER; note = 2'-Omethyluridine
  modified_base 56: mod_base = OTHER; note = 2'-Omethylcytosine
  modified_base 59: mod_base = OTHER; note = 2'-Omethylguanosine
  modified_base 73: mod_base = OTHER; note = 2'-Omethylguanosine

SEQ ID NO: 2829 - RNA, 76 nt, synthetic construct; identical to SEQ ID NO: 625
  source 1..76: mol_type = other RNA
  modified_base 1: mod_base = OTHER; note = 2'-Omethylguanosine phosphorothiorate
  modified_base 2: mod_base = OTHER; note = 2'-Omethylguanosine phosphorothiorate
  modified_base 3: mod_base = OTHER; note = 2'-Omethylcytosine
  modified_base 4: mod_base = OTHER; note = 2'-Omethyluridine
  modified_base 5: mod_base = OTHER; note = 2'-Omethylcytosine
  modified_base 6: mod_base = OTHER; note = 2'-Omethylcytosine
  modified_base 16: mod_base = OTHER; note = 2'-Omethyluridine
  modified_base 17: mod_base = OTHER; note = 2'-Omethylguanosine
  modified_base 18: mod_base = OTHER; note = 2'-Omethylguanosine
  modified_base 20: mod_base = OTHER; note = 2'-Omethyluridine
  modified_base 25: mod_base = OTHER; note = 2'-Omethylcytosine
  modified_base 33: mod_base = OTHER; note = 2'-fluorouridine
  modified_base 35: mod_base = OTHER; note = Cytosine phosphorothiorate
  modified_base 37: mod_base = OTHER; note = Adenosine phosphorothiorate
  modified_base 38: mod_base = OTHER; note = Adenosine phosphorothiorate
  modified_base 41: mod_base = OTHER; note = 2'-Omethylcytosine
  modified_base 44: mod_base = OTHER; note = 2'-Omethyladenosine
  modified_base 45: mod_base = OTHER; note = 2'-Omethylguanosine
  modified_base 46: mod_base = OTHER; note = 2'-fluoroguanosine
  modified_base 47: mod_base = OTHER; note = 2'-fluorouridine
  modified_base 48: mod_base = OTHER; note = 2'-fluorouridine
  modified_base 56: mod_base = OTHER; note = 2'-Omethylcytosine
  modified_base 59: mod_base = OTHER; note = 2'-Omethylguanosine
  modified_base 61: mod_base = OTHER; note = 2'-Omethylcytosine
  modified_base 62: mod_base = OTHER; note = 2'-Omethylcytosine
  modified_base 63: mod_base = OTHER; note = 2'-fluorocytosine
  modified_base 64: mod_base = OTHER; note = 2'-Omethylguanosine
  modified_base 65: mod_base = OTHER; note = 2'-Omethylguanosine
  modified_base 66: mod_base = OTHER; note = 2'-Omethylcytosine
  modified_base 67: mod_base = OTHER; note = 2'-Omethylguanosine
  modified_base 68: mod_base = OTHER; note = 2'-Omethylguanosine
  modified_base 73: mod_base = OTHER; note = 2'-Omethylguanosine

SEQ ID NO: 2830 - RNA, 76 nt, synthetic construct; identical to SEQ ID NO: 625
  source 1..76: mol_type = other RNA
  modified_base 1: mod_base = OTHER; note = 2'-Omethylguanosine phosphorothiorate
  modified_base 2: mod_base = OTHER; note = 2'-Omethylguanosine phosphorothiorate
  modified_base 3: mod_base = OTHER; note = 2'-Omethylcytosine
  modified_base 4: mod_base = OTHER; note = 2'-Omethyluridine
  modified_base 5: mod_base = OTHER; note = 2'-Omethylcytosine
  modified_base 6: mod_base = OTHER; note = 2'-Omethylcytosine
  modified_base 16: mod_base = OTHER; note = 2'-Omethyluridine
  modified_base 17: mod_base = OTHER; note = 2'-Omethylguanosine
  modified_base 18: mod_base = OTHER; note = 2'-Omethylguanosine
  modified_base 20: mod_base = OTHER; note = 2'-Omethyluridine
  modified_base 25: mod_base = OTHER; note = 2'-Omethylcytosine
  modified_base 33: mod_base = OTHER; note = 2'-fluorouridine
  modified_base 35: mod_base = OTHER; note = Cytosine phosphorothiorate
  modified_base 37: mod_base = OTHER; note = Adenosine phosphorothiorate
  modified_base 38: mod_base = OTHER; note = Adenosine phosphorothiorate
  modified_base 41: mod_base = OTHER; note = 2'-Omethylcytosine
  modified_base 44: mod_base = OTHER; note = 2'-Omethyladenosine
  modified_base 45: mod_base = OTHER; note = 2'-Omethylguanosine
  modified_base 46: mod_base = OTHER; note = 2'-fluoroguanosine
  modified_base 47: mod_base = OTHER; note = 2'-fluorouridine
  modified_base 48: mod_base = OTHER; note = 2'-fluorouridine
  modified_base 56: mod_base = OTHER; note = 2'-Omethylcytosine
  modified_base 59: mod_base = OTHER; note = 2'-Omethylguanosine
  modified_base 73: mod_base = OTHER; note = 2'-Omethylguanosine

SEQ ID NO: 2831 - RNA, 74 nt, synthetic construct; identical to SEQ ID NO: 766
  source 1..74: mol_type = other RNA
  modified_base 1: mod_base = OTHER; note = 2'-Omethylguanosine phosphorothiorate
  modified_base 2: mod_base = OTHER; note = 2'-Omethylguanosine phosphorothiorate
  modified_base 3: mod_base = OTHER; note = 2'-Omethylcytosine
  modified_base 4: mod_base = OTHER; note = 2'-Omethyluridine
  modified_base 5: mod_base = OTHER; note = 2'-Omethylcytosine
  modified_base 6: mod_base = OTHER; note = 2'-Omethylcytosine
  modified_base 16: mod_base = OTHER; note = 2'-Omethyluridine
  modified_base 17: mod_base = OTHER; note = 2'-Omethylguanosine
  modified_base 18: mod_base = OTHER; note = 2'-Omethylguanosine
  modified_base 33: mod_base = OTHER; note = 2'-fluorouridine
  modified_base 35: mod_base = OTHER; note = Cytosine phosphorothiorate
  modified_base 37: mod_base = OTHER; note = Adenosine phosphorothiorate
  modified_base 38: mod_base = OTHER; note = Adenosine phosphorothiorate
  modified_base 44: mod_base = OTHER; note = 2'-Omethyladenosine
  modified_base 45: mod_base = OTHER; note = 2'-Omethylguanosine
  modified_base 46: mod_base = OTHER; note = 2'-fluoroguanosine
  modified_base 47: mod_base = OTHER; note = 2'-fluorouridine
  modified_base 48: mod_base = OTHER; note = 2'-fluorouridine
  modified_base 49: mod_base = OTHER; note = 2'-Omethylcytosine
  modified_base 50: mod_base = OTHER; note = 2'-Omethylcytosine
  modified_base 51: mod_base = OTHER; note = 2'-Omethylguanosine
  modified_base 52: mod_base = OTHER; note = 2'-Omethylguanosine
  modified_base 53: mod_base = OTHER; note = 2'-Omethylguanosine
  modified_base 54: mod_base = OTHER; note = 2'-Omethyluridine
  modified_base 56: mod_base = OTHER; note = 2'-Omethylcytosine
  modified_base 59: mod_base = OTHER; note = 2'-Omethylguanosine
  modified_base 61: mod_base = OTHER; note = 2'-Omethylcytosine
  modified_base 62: mod_base = OTHER; note = 2'-Omethylcytosine
  modified_base 63: mod_base = OTHER; note = 2'-fluorocytosine
  modified_base 64: mod_base = OTHER; note = 2'-Omethylguanosine
  modified_base 65: mod_base = OTHER; note = 2'-Omethylguanosine
  modified_base 66: mod_base = OTHER; note = 2'-Omethylcytosine
  modified_base 67: mod_base = OTHER; note = 2'-Omethylguanosine
  modified_base 68: mod_base = OTHER; note = 2'-Omethylguanosine
  modified_base 73: mod_base = OTHER; note = 2'-Omethylguanosine

SEQ ID NO: 2832 - RNA, 74 nt, synthetic construct; identical to SEQ ID NO: 766
  source 1..74: mol_type = other RNA
  modified_base 1: mod_base = OTHER; note = 2'-Omethylguanosine phosphorothiorate
  modified_base 2: mod_base = OTHER; note = 2'-Omethylguanosine phosphorothiorate
  modified_base 3: mod_base = OTHER; note = 2'-Omethylcytosine
  modified_base 4: mod_base = OTHER; note = 2'-Omethyluridine
  modified_base 5: mod_base = OTHER; note = 2'-Omethylcytosine
  modified_base 6: mod_base = OTHER; note = 2'-Omethylcytosine
  modified_base 49: mod_base = OTHER; note = 2'-Omethylcytosine
  modified_base 50: mod_base = OTHER; note = 2'-Omethylcytosine
  modified_base 51: mod_base = OTHER; note = 2'-Omethylguanosine
  modified_base 52: mod_base = OTHER; note = 2'-Omethylguanosine
  modified_base 53: mod_base = OTHER; note = 2'-Omethylguanosine
  modified_base 54: mod_base = OTHER; note = 2'-Omethyluridine
  modified_base 61: mod_base = OTHER; note = 2'-Omethylcytosine
  modified_base 62: mod_base = OTHER; note = 2'-Omethylcytosine
  modified_base 63: mod_base = OTHER; note = 2'-fluorocytosine
  modified_base 64: mod_base = OTHER; note = 2'-Omethylguanosine
  modified_base 65: mod_base = OTHER; note = 2'-Omethylguanosine
  modified_base 66: mod_base = OTHER; note = 2'-Omethylcytosine
  modified_base 67: mod_base = OTHER; note = 2'-Omethylguanosine
  modified_base 68: mod_base = OTHER; note = 2'-Omethylguanosine
  modified_base 73: mod_base = OTHER; note = 2'-Omethylguanosine

SEQ ID NO: 2833 - RNA, 74 nt, synthetic construct; identical to SEQ ID NO: 766
  source 1..74: mol_type = other RNA
  modified_base 1: mod_base = OTHER; note = 2'-Omethylguanosine phosphorothiorate
  modified_base 2: mod_base = OTHER; note = 2'-Omethylguanosine phosphorothiorate
  modified_base 3: mod_base = OTHER; note = 2'-Omethylcytosine
  modified_base 4: mod_base = OTHER; note = 2'-Omethyluridine
  modified_base 5: mod_base = OTHER; note = 2'-Omethylcytosine
  modified_base 6: mod_base = OTHER; note = 2'-Omethylcytosine
  modified_base 16: mod_base = OTHER; note = 2'-Omethyluridine
  modified_base 17: mod_base = OTHER; note = 2'-Omethylguanosine
  modified_base 18: mod_base = OTHER; note = 2'-Omethylguanosine
  modified_base 33: mod_base = OTHER; note = 2'-fluorouridine
  modified_base 35: mod_base = OTHER; note = Cytosine phosphorothiorate
  modified_base 37: mod_base = OTHER; note = Adenosine phosphorothiorate
  modified_base 38: mod_base = OTHER; note = Adenosine phosphorothiorate
  modified_base 44: mod_base = OTHER; note = 2'-Omethyladenosine
  modified_base 45: mod_base = OTHER; note = 2'-Omethylguanosine
  modified_base 46: mod_base = OTHER; note = 2'-fluoroguanosine
  modified_base 47: mod_base = OTHER; note = 2'-fluorouridine
  modified_base 48: mod_base = OTHER; note = 2'-fluorouridine
  modified_base 49: mod_base = OTHER; note = 2'-Omethylcytosine
  modified_base 50: mod_base = OTHER; note = 2'-Omethylcytosine
  modified_base 51: mod_base = OTHER; note = 2'-Omethylguanosine
  modified_base 52: mod_base = OTHER; note = 2'-Omethylguanosine
  modified_base 53: mod_base = OTHER; note = 2'-Omethylguanosine
  modified_base 54: mod_base = OTHER; note = 2'-Omethyluridine
  modified_base 56: mod_base = OTHER; note = 2'-Omethylcytosine
  modified_base 59: mod_base = OTHER; note = 2'-Omethylguanosine
  modified_base 73: mod_base = OTHER; note = 2'-Omethylguanosine

SEQ ID NO: 2834 - RNA, 74 nt, synthetic construct; identical to SEQ ID NO: 766
  source 1..74: mol_type = other RNA
  modified_base 1: mod_base = OTHER; note = 2'-Omethylguanosine phosphorothiorate
  modified_base 2: mod_base = OTHER; note = 2'-Omethylguanosine phosphorothiorate
  modified_base 3: mod_base = OTHER; note = 2'-Omethylcytosine
  modified_base 4: mod_base = OTHER; note = 2'-Omethyluridine
  modified_base 5: mod_base = OTHER; note = 2'-Omethylcytosine
  modified_base 6: mod_base = OTHER; note = 2'-Omethylcytosine
  modified_base 16: mod_base = OTHER; note = 2'-Omethyluridine
  modified_base 17: mod_base = OTHER; note = 2'-Omethylguanosine
  modified_base 18: mod_base = OTHER; note = 2'-Omethylguanosine
  modified_base 33: mod_base = OTHER; note = 2'-fluorouridine
  modified_base 35: mod_base = OTHER; note = Cytosine phosphorothiorate
  modified_base 37: mod_base = OTHER; note = Adenosine phosphorothiorate
  modified_base 38: mod_base = OTHER; note = Adenosine phosphorothiorate
  modified_base 44: mod_base = OTHER; note = 2'-Omethyladenosine
  modified_base 45: mod_base = OTHER; note = 2'-Omethylguanosine
  modified_base 46: mod_base = OTHER; note = 2'-fluoroguanosine
  modified_base 47: mod_base = OTHER; note = 2'-fluorouridine
  modified_base 48: mod_base = OTHER; note = 2'-fluorouridine
  modified_base 56: mod_base = OTHER; note = 2'-Omethylcytosine
  modified_base 59: mod_base = OTHER; note = 2'-Omethylguanosine
  modified_base 61: mod_base = OTHER; note = 2'-Omethylcytosine
  modified_base 62: mod_base = OTHER; note = 2'-Omethylcytosine
  modified_base 63: mod_base = OTHER; note = 2'-fluorocytosine
  modified_base 64: mod_base = OTHER; note = 2'-Omethylguanosine
  modified_base 65: mod_base = OTHER; note = 2'-Omethylguanosine
  modified_base 66: mod_base = OTHER; note = 2'-Omethylcytosine
  modified_base 67: mod_base = OTHER; note = 2'-Omethylguanosine
  modified_base 68: mod_base = OTHER; note = 2'-Omethylguanosine
  modified_base 73: mod_base = OTHER; note = 2'-Omethylguanosine

SEQ ID NO: 2835 - RNA, 74 nt, synthetic construct; identical to SEQ ID NO: 766
  source 1..74: mol_type = other RNA
  modified_base 1: mod_base = OTHER; note = 2'-Omethylguanosine phosphorothiorate
  modified_base 2: mod_base = OTHER; note = 2'-Omethylguanosine phosphorothiorate
  modified_base 3: mod_base = OTHER; note = 2'-Omethylcytosine
  modified_base 4: mod_base = OTHER; note = 2'-Omethyluridine
  modified_base 5: mod_base = OTHER; note = 2'-Omethylcytosine
  modified_base 6: mod_base = OTHER; note = 2'-Omethylcytosine
  modified_base 16: mod_base = OTHER; note = 2'-Omethyluridine
  modified_base 17: mod_base = OTHER; note = 2'-Omethylguanosine
  modified_base 18: mod_base = OTHER; note = 2'-Omethylguanosine
  modified_base 33: mod_base = OTHER; note = 2'-fluorouridine
  modified_base 35: mod_base = OTHER; note = Cytosine phosphorothiorate
  modified_base 37: mod_base = OTHER; note = Adenosine phosphorothiorate
  modified_base 38: mod_base = OTHER; note = Adenosine phosphorothiorate
  modified_base 44: mod_base = OTHER; note = 2'-Omethyladenosine
  modified_base 45: mod_base = OTHER; note = 2'-Omethylguanosine
  modified_base 46: mod_base = OTHER; note = 2'-fluoroguanosine
  modified_base 47: mod_base = OTHER; note = 2'-fluorouridine
  modified_base 48: mod_base = OTHER; note = 2'-fluorouridine
  modified_base 56: mod_base = OTHER; note = 2'-Omethylcytosine
  modified_base 59: mod_base = OTHER; note = 2'-Omethylguanosine
  modified_base 73: mod_base = OTHER; note = 2'-Omethylguanosine

SEQ ID NO: 2836 - RNA, 74 nt, synthetic construct; identical to SEQ ID NO: 766
  source 1..74: mol_type = other RNA
  modified_base 1: mod_base = OTHER; note = 2'-Omethylguanosine phosphorothiorate
  modified_base 2: mod_base = OTHER; note = 2'-Omethylguanosine phosphorothiorate
  modified_base 3: mod_base = OTHER; note = 2'-Omethylcytosine
  modified_base 4: mod_base = OTHER; note = 2'-Omethyluridine
  modified_base 5: mod_base = OTHER; note = 2'-Omethylcytosine
  modified_base 6: mod_base = OTHER; note = 2'-Omethylcytosine
  modified_base 20: mod_base = OTHER; note = 2'-Omethyluridine
  modified_base 25: mod_base = OTHER; note = 2'-Omethylcytosine
  modified_base 41: mod_base = OTHER; note = 2'-Omethylcytosine
  modified_base 49: mod_base = OTHER; note = 2'-Omethylcytosine
  modified_base 50: mod_base = OTHER; note = 2'-Omethylcytosine
  modified_base 51: mod_base = OTHER; note = 2'-Omethylguanosine
  modified_base 52: mod_base = OTHER; note = 2'-Omethylguanosine
  modified_base 53: mod_base = OTHER; note = 2'-Omethylguanosine
  modified_base 54: mod_base = OTHER; note = 2'-Omethyluridine
  modified_base 61: mod_base = OTHER; note = 2'-Omethylcytosine
  modified_base 62: mod_base = OTHER; note = 2'-Omethylcytosine
  modified_base 63: mod_base = OTHER; note = 2'-fluorocytosine
  modified_base 64: mod_base = OTHER; note = 2'-Omethylguanosine
  modified_base 65: mod_base = OTHER; note = 2'-Omethylguanosine
  modified_base 66: mod_base = OTHER; note = 2'-Omethylcytosine
  modified_base 67: mod_base = OTHER; note = 2'-Omethylguanosine
  modified_base 68: mod_base = OTHER; note = 2'-Omethylguanosine
  modified_base 73: mod_base = OTHER; note = 2'-Omethylguanosine

SEQ ID NO: 2837 - RNA, 74 nt, synthetic construct; identical to SEQ ID NO: 766
  source 1..74: mol_type = other RNA
  modified_base 1: mod_base = OTHER; note = 2'-Omethylguanosine phosphorothiorate
  modified_base 2: mod_base = OTHER; note = 2'-Omethylguanosine phosphorothiorate
  modified_base 3: mod_base = OTHER; note = 2'-Omethylcytosine
  modified_base 4: mod_base = OTHER; note = 2'-Omethyluridine
  modified_base 5: mod_base = OTHER; note = 2'-Omethylcytosine
  modified_base 6: mod_base = OTHER; note = 2'-Omethylcytosine
  modified_base 16: mod_base = OTHER; note = 2'-Omethyluridine
  modified_base 17: mod_base = OTHER; note = 2'-Omethylguanosine
  modified_base 18: mod_base = OTHER; note = 2'-Omethylguanosine
  modified_base 20: mod_base = OTHER; note = 2'-Omethyluridine
  modified_base 25: mod_base = OTHER; note = 2'-Omethylcytosine
  modified_base 33: mod_base = OTHER; note = 2'-fluorouridine
  modified_base 35: mod_base = OTHER; note = Cytosine phosphorothiorate
  modified_base 37: mod_base = OTHER; note = Adenosine phosphorothiorate
  modified_base 38: mod_base = OTHER; note = Adenosine phosphorothiorate
  modified_base 41: mod_base = OTHER; note = 2'-Omethylcytosine
  modified_base 44: mod_base = OTHER; note = 2'-Omethyladenosine
  modified_base 45: mod_base = OTHER; note = 2'-Omethylguanosine
  modified_base 46: mod_base = OTHER; note = 2'-fluoroguanosine
  modified_base 47: mod_base = OTHER; note = 2'-fluorouridine
  modified_base 48: mod_base = OTHER; note = 2'-fluorouridine
  modified_base 49: mod_base = OTHER; note = 2'-Omethylcytosine
  modified_base 50: mod_base = OTHER; note = 2'-Omethylcytosine
  modified_base 51: mod_base = OTHER; note = 2'-Omethylguanosine
  modified_base 52: mod_base = OTHER; note = 2'-Omethylguanosine
  modified_base 53: mod_base = OTHER; note = 2'-Omethylguanosine
  modified_base 54: mod_base = OTHER; note = 2'-Omethyluridine
  modified_base 56: mod_base = OTHER; note = 2'-Omethylcytosine
  modified_base 59: mod_base = OTHER; note = 2'-Omethylguanosine
  modified_base 73: mod_base = OTHER; note = 2'-Omethylguanosine

SEQ ID NO: 2838 - RNA, 74 nt, synthetic construct; identical to SEQ ID NO: 766
  source 1..74: mol_type = other RNA
  modified_base 1: mod_base = OTHER; note = 2'-Omethylguanosine phosphorothiorate
  modified_base 2: mod_base = OTHER; note = 2'-Omethylguanosine phosphorothiorate
  modified_base 3: mod_base = OTHER; note = 2'-Omethylcytosine
  modified_base 4: mod_base = OTHER; note = 2'-Omethyluridine
  modified_base 5: mod_base = OTHER; note = 2'-Omethylcytosine
  modified_base 6: mod_base = OTHER; note = 2'-Omethylcytosine
  modified_base 16: mod_base = OTHER; note = 2'-Omethyluridine
  modified_base 17: mod_base = OTHER; note = 2'-Omethylguanosine
  modified_base 18: mod_base = OTHER; note = 2'-Omethylguanosine
  modified_base 20: mod_base = OTHER; note = 2'-Omethyluridine
  modified_base 25: mod_base = OTHER; note = 2'-Omethylcytosine
  modified_base 33: mod_base = OTHER; note = 2'-fluorouridine
  modified_base 35: mod_base = OTHER; note = Cytosine phosphorothiorate
  modified_base 37: mod_base = OTHER; note = Adenosine phosphorothiorate
  modified_base 38: mod_base = OTHER; note = Adenosine phosphorothiorate
  modified_base 41: mod_base = OTHER; note = 2'-Omethylcytosine
  modified_base 44: mod_base = OTHER; note = 2'-Omethyladenosine
  modified_base 45: mod_base = OTHER; note = 2'-Omethylguanosine
  modified_base 46: mod_base = OTHER; note = 2'-fluoroguanosine
  modified_base 47: mod_base = OTHER; note = 2'-fluorouridine
  modified_base 48: mod_base = OTHER; note = 2'-fluorouridine
  modified_base 56: mod_base = OTHER; note = 2'-Omethylcytosine
  modified_base 59: mod_base = OTHER; note = 2'-Omethylguanosine
  modified_base 61: mod_base = OTHER; note = 2'-Omethylcytosine
  modified_base 62: mod_base = OTHER; note = 2'-Omethylcytosine
  modified_base 63: mod_base = OTHER; note = 2'-fluorocytosine
  modified_base 64: mod_base = OTHER; note = 2'-Omethylguanosine
  modified_base 65: mod_base = OTHER; note = 2'-Omethylguanosine
  modified_base 66: mod_base = OTHER; note = 2'-Omethylcytosine
  modified_base 67: mod_base = OTHER; note = 2'-Omethylguanosine
  modified_base 68: mod_base = OTHER; note = 2'-Omethylguanosine
  modified_base 73: mod_base = OTHER; note = 2'-Omethylguanosine

SEQ ID NO: 2839 - RNA, 74 nt, synthetic construct; identical to SEQ ID NO: 766
  source 1..74: mol_type = other RNA
  modified_base 1: mod_base = OTHER; note = 2'-Omethylguanosine phosphorothiorate
  modified_base 2: mod_base = OTHER; note = 2'-Omethylguanosine phosphorothiorate
  modified_base 3: mod_base = OTHER; note = 2'-Omethylcytosine
  modified_base 4: mod_base = OTHER; note = 2'-Omethyluridine
  modified_base 5: mod_base = OTHER; note = 2'-Omethylcytosine
  modified_base 6: mod_base = OTHER; note = 2'-Omethylcytosine
  modified_base 16: mod_base = OTHER; note = 2'-Omethyluridine
  modified_base 17: mod_base = OTHER; note = 2'-Omethylguanosine
  modified_base 18: mod_base = OTHER; note = 2'-Omethylguanosine
  modified_base 20: mod_base = OTHER; note = 2'-Omethyluridine
  modified_base 25: mod_base = OTHER; note = 2'-Omethylcytosine
  modified_base 33: mod_base = OTHER; note = 2'-fluorouridine
  modified_base 35: mod_base = OTHER; note = Cytosine phosphorothiorate
  modified_base 37: mod_base = OTHER; note = Adenosine phosphorothiorate
  modified_base 38: mod_base = OTHER; note = Adenosine phosphorothiorate
  modified_base 41: mod_base = OTHER; note = 2'-Omethylcytosine
  modified_base 44: mod_base = OTHER; note = 2'-Omethyladenosine
  modified_base 45: mod_base = OTHER; note = 2'-Omethylguanosine
  modified_base 46: mod_base = OTHER; note = 2'-fluoroguanosine
  modified_base 47: mod_base = OTHER; note = 2'-fluorouridine
  modified_base 48: mod_base = OTHER; note = 2'-fluorouridine
  modified_base 56: mod_base = OTHER; note = 2'-Omethylcytosine
  modified_base 59: mod_base = OTHER; note = 2'-Omethylguanosine
  modified_base 73: mod_base = OTHER; note = 2'-Omethylguanosine

SEQ ID NO: 2840 - RNA, 76 nt, synthetic construct; identical to SEQ ID NO: 625
  source 1..76: mol_type = other RNA
  modified_base 1: mod_base = OTHER; note = 2'-Omethylguanosine phosphorothiorate
  modified_base 2: mod_base = OTHER; note = 2'-Omethylguanosine phosphorothiorate
  modified_base 3: mod_base = OTHER; note = 2'-Omethylcytosine
  modified_base 4: mod_base = OTHER; note = 2'-Omethyluridine
  modified_base 5: mod_base = OTHER; note = 2'-Omethylcytosine
  modified_base 6: mod_base = OTHER; note = 2'-Omethylcytosine
  modified_base 10: mod_base = OTHER; note = 2'-Omethylguanosine
  modified_base 11: mod_base = OTHER; note = 2'-Omethylcytosine
  modified_base 12: mod_base = OTHER; note = 2'-Omethylguanosine
  modified_base 13: mod_base = OTHER; note = 2'-Omethylcytosine
  modified_base 17: mod_base = OTHER; note = Guanosine phosphorothiorate
  modified_base 18: mod_base = OTHER; note = 2'-Omethylguanosine
  modified_base 19: mod_base = OTHER; note = Adenosine phosphorothiorate
  modified_base 20: mod_base = OTHER; note = 2'-Omethyluridine
  modified_base 22: mod_base = OTHER; note = 2'-Omethylguanosine
  modified_base 23: mod_base = OTHER; note = 2'-Omethylcytosine
  modified_base 24: mod_base = OTHER; note = 2'-Omethylguanosine
  modified_base 25: mod_base = OTHER; note = 2'-Omethylcytosine
  modified_base 29: mod_base = OTHER; note = 2'-Omethylguanosine
  modified_base 33: mod_base = OTHER; note = 2'-fluorouridine
  modified_base 35: mod_base = OTHER; note = Cytosine phosphorothiorate
  modified_base 37: mod_base = OTHER; note = Adenosine phosphorothiorate
  modified_base 38: mod_base = OTHER; note = Adenosine phosphorothiorate
  modified_base 41: mod_base = OTHER; note = 2'-fluorocytosine phosphorothiorate
  modified_base 43: mod_base = OTHER; note = 2'-Omethyladenosine
  modified_base 44: mod_base = OTHER; note = 2'-fluoroadenosine
  modified_base 46: mod_base = OTHER; note = Guanosine phosphorothiorate
  modified_base 49: mod_base = OTHER; note = 2'-Omethylcytosine
  modified_base 50: mod_base = OTHER; note = 2'-Omethylcytosine
  modified_base 51: mod_base = OTHER; note = 2'-Omethylguanosine
  modified_base 52: mod_base = OTHER; note = 2'-Omethylguanosine
  modified_base 53: mod_base = OTHER; note = 2'-Omethylguanosine
  modified_base 54: mod_base = OTHER; note = Uridine phosphorothiorate
  modified_base 55: mod_base = OTHER; note = Uridine phosphorothiorate
  modified_base 56: mod_base = OTHER; note = 2'-Omethylcytosine
  modified_base 57: mod_base = OTHER; note = Guanosine phosphorothiorate
  modified_base 61: mod_base = OTHER; note = 2'-Omethylcytosine
  modified_base 62: mod_base = OTHER; note = 2'-Omethylcytosine
  modified_base 63: mod_base = OTHER; note = 2'-fluorocytosine
  modified_base 64: mod_base = OTHER; note = 2'-Omethylguanosine
  modified_base 65: mod_base = OTHER; note = 2'-Omethylguanosine
  modified_base 66: mod_base = OTHER; note = 2'-Omethylcytosine
  modified_base 67: mod_base = OTHER; note = 2'-Omethylguanosine
  modified_base 68: mod_base = OTHER; note = 2'-Omethylguanosine
  modified_base 71: mod_base = OTHER; note = 2'-Omethyluridine
  modified_base 73: mod_base = OTHER; note = 2'-Omethylguanosine

SEQ ID NO: 2841 - RNA, 76 nt, synthetic construct; identical to SEQ ID NO: 625
  source 1..76: mol_type = other RNA
  modified_base 1: mod_base = OTHER; note = 2'-Omethylguanosine phosphorothiorate
  modified_base 2: mod_base = OTHER; note = 2'-Omethylguanosine phosphorothiorate
  modified_base 3: mod_base = OTHER; note = 2'-Omethylcytosine
  modified_base 4: mod_base = OTHER; note = 2'-Omethyluridine
  modified_base 5: mod_base = OTHER; note = 2'-Omethylcytosine
  modified_base 6: mod_base = OTHER; note = 2'-Omethylcytosine
  modified_base 10: mod_base = OTHER; note = 2'-Omethylguanosine
  modified_base 11: mod_base = OTHER; note = 2'-Omethylcytosine
  modified_base 12: mod_base = OTHER; note = 2'-Omethylguanosine
  modified_base 13: mod_base = OTHER; note = 2'-Omethylcytosine
  modified_base 17: mod_base = OTHER; note = 2'-Omethylguanosine
  modified_base 18: mod_base = OTHER; note = 2'-Omethylguanosine
  modified_base 22: mod_base = OTHER; note = 2'-Omethylguanosine
  modified_base 23: mod_base = OTHER; note = 2'-Omethylcytosine
  modified_base 24: mod_base = OTHER; note = 2'-Omethylguanosine
  modified_base 25: mod_base = OTHER; note = 2'-Omethylcytosine
  modified_base 33: mod_base = OTHER; note = 2'-fluorouridine
  modified_base 34: mod_base = OTHER; note = 2'-Omethyluridine
  modified_base 35: mod_base = OTHER; note = Cytosine phosphorothiorate
  modified_base 37: mod_base = OTHER; note = Adenosine phosphorothiorate
  modified_base 38: mod_base = OTHER; note = Adenosine phosphorothiorate
  modified_base 41: mod_base = OTHER; note = 2'-fluorocytosine
  modified_base 42: mod_base = OTHER; note = 2'-Omethyladenosine
  modified_base 43: mod_base = OTHER; note = 2'-Omethyladenosine
  modified_base 44: mod_base = OTHER; note = 2'-fluoroadenosine
  modified_base 49: mod_base = OTHER; note = 2'-Omethylcytosine
  modified_base 50: mod_base = OTHER; note = 2'-Omethylcytosine
  modified_base 51: mod_base = OTHER; note = 2'-Omethylguanosine
  modified_base 52: mod_base = OTHER; note = 2'-Omethylguanosine
  modified_base 53: mod_base = OTHER; note = 2'-Omethylguanosine
  modified_base 54: mod_base = OTHER; note = Uridine phosphorothiorate
  modified_base 55: mod_base = OTHER; note = Uridine phosphorothiorate
  modified_base 61: mod_base = OTHER; note = 2'-Omethylcytosine
  modified_base 62: mod_base = OTHER; note = 2'-Omethylcytosine
  modified_base 63: mod_base = OTHER; note = 2'-fluorocytosine
  modified_base 64: mod_base = OTHER; note = 2'-Omethylguanosine
  modified_base 65: mod_base = OTHER; note = 2'-Omethylguanosine
  modified_base 66: mod_base = OTHER; note = 2'-Omethylcytosine
  modified_base 67: mod_base = OTHER; note = 2'-Omethylguanosine
  modified_base 68: mod_base = OTHER; note = 2'-Omethylguanosine
  modified_base 73: mod_base = OTHER; note = 2'-Omethylguanosine

SEQ ID NO: 2842 - RNA, 76 nt, synthetic construct; identical to SEQ ID NO: 625
  source 1..76: mol_type = other RNA
  modified_base 1: mod_base = OTHER; note = 2'-Omethylguanosine phosphorothiorate
  modified_base 2: mod_base = OTHER; note = 2'-Omethylguanosine phosphorothiorate
  modified_base 3: mod_base = OTHER; note = 2'-Omethylcytosine
  modified_base 4: mod_base = OTHER; note = 2'-Omethyluridine
  modified_base 5: mod_base = OTHER; note = 2'-Omethylcytosine
  modified_base 6: mod_base = OTHER; note = 2'-Omethylcytosine
  modified_base 10: mod_base = OTHER; note = 2'-Omethylguanosine
  modified_base 11: mod_base = OTHER; note = 2'-Omethylcytosine
  modified_base 12: mod_base = OTHER; note = 2'-Omethylguanosine
  modified_base 13: mod_base = OTHER; note = 2'-Omethylcytosine
  modified_base 17: mod_base = OTHER; note = 2'-Omethylguanosine
  modified_base 18: mod_base = OTHER; note = 2'-Omethylguanosine
  modified_base 22: mod_base = OTHER; note = 2'-Omethylguanosine
  modified_base 23: mod_base = OTHER; note = 2'-Omethylcytosine
  modified_base 24: mod_base = OTHER; note = 2'-Omethylguanosine
  modified_base 25: mod_base = OTHER; note = 2'-Omethylcytosine
  modified_base 33: mod_base = OTHER; note = 2'-fluorouridine
  modified_base 35: mod_base = OTHER; note = Cytosine phosphorothiorate
  modified_base 37: mod_base = OTHER; note = Adenosine phosphorothiorate
  modified_base 38: mod_base = OTHER; note = Adenosine phosphorothiorate
  modified_base 41: mod_base = OTHER; note = 2'-fluorocytosine
  modified_base 42: mod_base = OTHER; note = 2'-Omethyladenosine
  modified_base 43: mod_base = OTHER; note = 2'-Omethyladenosine
  modified_base 44: mod_base = OTHER; note = 2'-fluoroadenosine
  modified_base 49: mod_base = OTHER; note = 2'-Omethylcytosine
  modified_base 50: mod_base = OTHER; note = 2'-Omethylcytosine
  modified_base 51: mod_base = OTHER; note = 2'-Omethylguanosine
  modified_base 52: mod_base = OTHER; note = 2'-Omethylguanosine
  modified_base 53: mod_base = OTHER; note = 2'-Omethylguanosine
  modified_base 54: mod_base = OTHER; note = Uridine phosphorothiorate
  modified_base 55: mod_base = OTHER; note = Uridine phosphorothiorate
  modified_base 61: mod_base = OTHER; note = 2'-Omethylcytosine
  modified_base 62: mod_base = OTHER; note = 2'-Omethylcytosine
  modified_base 63: mod_base = OTHER; note = 2'-fluorocytosine
  modified_base 64: mod_base = OTHER; note = 2'-Omethylguanosine
  modified_base 65: mod_base = OTHER; note = 2'-Omethylguanosine
  modified_base 66: mod_base = OTHER; note = 2'-Omethylcytosine
  modified_base 67: mod_base = OTHER; note = 2'-Omethylguanosine
  modified_base 68: mod_base = OTHER; note = 2'-Omethylguanosine
  modified_base 73: mod_base = OTHER; note = 2'-Omethylguanosine

SEQ ID NO: 2843-2950 - skipped (108 entries)

SEQ ID NO: 2951 - RNA, 76 nt, synthetic construct; identical to SEQ ID NO: 625
  source 1..76: mol_type = other RNA

SEQ ID NO: 2952-2956 - skipped (5 entries)

SEQ ID NO: 2957 - RNA, 75 nt, synthetic construct; identical to SEQ ID NO: 1045
  source 1..75: mol_type = other RNA

SEQ ID NO: 2958-2960 - skipped (3 entries)

SEQ ID NO: 2961 - RNA, 85 nt, synthetic construct
  source 1..85: mol_type = other RNA
gacgaggtggccgagtggttaaggcgatggactttaaatccattgtgctctgcacgcgtgggttcgaatcccatcctcgtcgcca

SEQ ID NO: 2962-2966 - skipped (5 entries)

SEQ ID NO: 2967 - RNA, 85 nt, synthetic construct; identical to SEQ ID NO: 1132
  source 1..85: mol_type = other RNA

SEQ ID NO: 2968-2980 - skipped (13 entries)

SEQ ID NO: 2981 - RNA, 76 nt, synthetic construct; identical to SEQ ID NO: 625
  source 1..76: mol_type = other RNA
  modified_base 1: mod_base = OTHER; note = 2'-Omethylguanosine

SEQ ID NO: 2982-2987 - skipped (6 entries)

SEQ ID NO: 2988 - RNA, 76 nt, synthetic construct; identical to SEQ ID NO: 625
  source 1..76: mol_type = other RNA
  modified_base 7: mod_base = OTHER; note = 2'-Omethylguanosine

SEQ ID NO: 2989 - skipped

SEQ ID NO: 2990 - RNA, 76 nt, synthetic construct; identical to SEQ ID NO: 625
  source 1..76: mol_type = other RNA
  modified_base 8: mod_base = OTHER; note = 2'-Omethyluridine

SEQ ID NO: 2991 - skipped

SEQ ID NO: 2992 - RNA, 76 nt, synthetic construct; identical to SEQ ID NO: 625
  source 1..76: mol_type = other RNA
  modified_base 9: mod_base = OTHER; note = 2'-Omethylguanosine

SEQ ID NO: 2993-2998 - skipped (6 entries)

SEQ ID NO: 2999 - RNA, 76 nt, synthetic construct; identical to SEQ ID NO: 625
  source 1..76: mol_type = other RNA
  modified_base 15: mod_base = OTHER; note = 2'-Omethyladenosine

SEQ ID NO: 3000-3002 - skipped (3 entries)

SEQ ID NO: 3003 - RNA, 76 nt, synthetic construct; identical to SEQ ID NO: 625
  source 1..76: mol_type = other RNA
  modified_base 19: mod_base = OTHER; note = 2'-Omethyladenosine

SEQ ID NO: 3004-3009 - skipped (6 entries)

SEQ ID NO: 3010 - RNA, 76 nt, synthetic construct; identical to SEQ ID NO: 625
  source 1..76: mol_type = other RNA
  modified_base 25: mod_base = OTHER; note = 2'-Omethylcytosine

SEQ ID NO: 3011 - RNA, 76 nt, synthetic construct; identical to SEQ ID NO: 625
  source 1..76: mol_type = other RNA
  modified_base 26: mod_base = OTHER; note = 2'-Omethyladenosine

SEQ ID NO: 3012-3019 - skipped (8 entries)

SEQ ID NO: 3020 - RNA, 76 nt, synthetic construct; identical to SEQ ID NO: 625
  source 1..76: mol_type = other RNA
  modified_base 34: mod_base = OTHER; note = 2'-Omethyluridine

SEQ ID NO: 3021-3022 - skipped (2 entries)

SEQ ID NO: 3023 - RNA, 76 nt, synthetic construct; identical to SEQ ID NO: 625
  source 1..76: mol_type = other RNA
  modified_base 36: mod_base = OTHER; note = 2'-Omethyladenosine

SEQ ID NO: 3024-3036 - skipped (13 entries)

SEQ ID NO: 3037 - RNA, 76 nt, synthetic construct; identical to SEQ ID NO: 625
  source 1..76: mol_type = other RNA
  modified_base 49: mod_base = OTHER; note = 2'-Omethylcytosine

SEQ ID NO: 3038 - skipped

SEQ ID NO: 3039 - RNA, 76 nt, synthetic construct; identical to SEQ ID NO: 625
  source 1..76: mol_type = other RNA
  modified_base 50: mod_base = OTHER; note = 2'-Omethylcytosine

SEQ ID NO: 3040-3042 - skipped (3 entries)

SEQ ID NO: 3043 - RNA, 76 nt, synthetic construct; identical to SEQ ID NO: 625
  source 1..76: mol_type = other RNA
  modified_base 52: mod_base = OTHER; note = 2'-Omethylguanosine

SEQ ID NO: 3044-3046 - skipped (3 entries)

SEQ ID NO: 3047 - RNA, 76 nt, synthetic construct; identical to SEQ ID NO: 625
  source 1..76: mol_type = other RNA
  modified_base 55: mod_base = OTHER; note = 2'-Omethyluridine

SEQ ID NO: 3048-3062 - skipped (15 entries)

SEQ ID NO: 3063 - RNA, 76 nt, synthetic construct; identical to SEQ ID NO: 625
  source 1..76: mol_type = other RNA
  modified_base 70: mod_base = OTHER; note = 2'-Omethylguanosine

SEQ ID NO: 3064-3066 - skipped (3 entries)

SEQ ID NO: 3067 - RNA, 76 nt, synthetic construct; identical to SEQ ID NO: 625
  source 1..76: mol_type = other RNA
  modified_base 73: mod_base = OTHER; note = 2'-Omethylguanosine

SEQ ID NO: 3068-3084 - skipped (17 entries)

SEQ ID NO: 3085 - RNA, 76 nt, synthetic construct; identical to SEQ ID NO: 625
  source 1..76: mol_type = other RNA
  modified_base 19: mod_base = OTHER; note = Adenosine phosphorothiorate

SEQ ID NO: 3086 - skipped

SEQ ID NO: 3087 - RNA, 76 nt, synthetic construct; identical to SEQ ID NO: 625
  source 1..76: mol_type = other RNA
  modified_base 42: mod_base = OTHER; note = Adenosine phosphorothiorate

SEQ ID NO: 3088-3092 - skipped (5 entries)

SEQ ID NO: 3093 - RNA, 76 nt, synthetic construct; identical to SEQ ID NO: 625
  source 1..76: mol_type = other RNA
  modified_base 49: mod_base = OTHER; note = 2'-Omethylcytosine
  modified_base 50: mod_base = OTHER; note = 2'-Omethylcytosine
  modified_base 51: mod_base = OTHER; note = 2'-Omethylguanosine
  modified_base 52: mod_base = OTHER; note = 2'-Omethylguanosine
  modified_base 53: mod_base = OTHER; note = 2'-Omethylguanosine
  modified_base 61: mod_base = OTHER; note = 2'-Omethylcytosine
  modified_base 62: mod_base = OTHER; note = 2'-Omethylcytosine
  modified_base 63: mod_base = OTHER; note = 2'-Omethylcytosine
  modified_base 64: mod_base = OTHER; note = 2'-Omethylguanosine
  modified_base 65: mod_base = OTHER; note = 2'-Omethylguanosine

SEQ ID NO: 3094-3095 - skipped (2 entries)

SEQ ID NO: 3096 - RNA, 76 nt, synthetic construct; identical to SEQ ID NO: 625
  source 1..76: mol_type = other RNA
  modified_base 10: mod_base = OTHER; note = 2'-Omethylguanosine
  modified_base 11: mod_base = OTHER; note = 2'-Omethylcytosine
  modified_base 12: mod_base = OTHER; note = 2'-Omethylguanosine
  modified_base 13: mod_base = OTHER; note = 2'-Omethylcytosine
  modified_base 22: mod_base = OTHER; note = 2'-Omethylguanosine
  modified_base 23: mod_base = OTHER; note = 2'-Omethylcytosine
  modified_base 24: mod_base = OTHER; note = 2'-Omethylguanosine
  modified_base 25: mod_base = OTHER; note = 2'-Omethylcytosine

SEQ ID NO: 3097 - skipped

SEQ ID NO: 3098 - RNA, 73 nt, synthetic construct; identical to SEQ ID NO: 935
  source 1..73: mol_type = other RNA

SEQ ID NO: 3099 - RNA, 76 nt, synthetic construct
  source 1..76: mol_type = other RNA
ggctccgtggcgctatggatagcgcattggacttcaaattcaaaggttccgggttcgagtcccggcggagtcgcca

SEQ ID NO: 3100 - RNA, 76 nt, synthetic construct
  source 1..76: mol_type = other RNA
ggctccgtggcgcattggatagcgcattggacttcaaattcaaaggttccgggttcgagtcccggcggagtcgcca

SEQ ID NO: 3101 - RNA, 76 nt, synthetic construct
  source 1..76: mol_type = other RNA
ggctccgtggcgcaattgatagcgcattggacttcaaattcaaaggttccgggttcgagtcccggcggagtcgcca

SEQ ID NO: 3102 - RNA, 76 nt, synthetic construct
  source 1..76: mol_type = other RNA
ggctccgtggcgcaatgtatagcgcattggacttcaaattcaaaggttccgggttcgagtcccggcggagtcgcca

SEQ ID NO: 3103 - RNA, 76 nt, synthetic construct
  source 1..76: mol_type = other RNA
ggctccgtggcgcaatggttagcgcattggacttcaaattcaaaggttccgggttcgagtcccggcggagtcgcca

SEQ ID NO: 3104 - skipped

SEQ ID NO: 3105 - RNA, 76 nt, synthetic construct
  source 1..76: mol_type = other RNA
ggctccgtggcgcaatggattgcgcattggacttcaaattcaaaggttccgggttcgagtcccggcggagtcgcca

SEQ ID NO: 3106 - RNA, 76 nt, synthetic construct
  source 1..76: mol_type = other RNA
ggctccgtggcgcaatggatagcgctttggacttcaaattcaaaggttccgggttcgagtcccggcggagtcgcca

SEQ ID NO: 3107 - RNA, 76 nt, synthetic construct
  source 1..76: mol_type = other RNA
ggctccgtggcgcaatggatagcgcattggatttcaaattcaaaggttccgggttcgagtcccggcggagtcgcca

SEQ ID NO: 3108 - RNA, 76 nt, synthetic construct
  source 1..76: mol_type = other RNA
ggctccgtggcgcaatggatagcgcattggacttctaattcaaaggttccgggttcgagtcccggcggagtcgcca

SEQ ID NO: 3109 - RNA, 76 nt, synthetic construct
  source 1..76: mol_type = other RNA
ggctccgtggcgcaatggatagcgcattggacttcatattcaaaggttccgggttcgagtcccggcggagtcgcca

SEQ ID NO: 3110 - RNA, 76 nt, synthetic construct
  source 1..76: mol_type = other RNA
ggctccgtggcgcaatggatagcgcattggacttcaatttcaaaggttccgggttcgagtcccggcggagtcgcca

SEQ ID NO: 3111 - RNA, 76 nt, synthetic construct
  source 1..76: mol_type = other RNA
ggctccgtggcgcaatggatagcgcattggacttcaaattcaatggttccgggttcgagtcccggcggagtcgcca

SEQ ID NO: 3112 - RNA, 76 nt, synthetic construct
  source 1..76: mol_type = other RNA
ggctccgtggcgcaatggatagcgcattggacttcaaattcaaatgttccgggttcgagtcccggcggagtcgcca

SEQ ID NO: 3113 - RNA, 76 nt, synthetic construct
  source 1..76: mol_type = other RNA
ggctccgtggcgcaatggatagcgcattggacttcaaattcaaagtttccgggttcgagtcccggcggagtcgcca

SEQ ID NO: 3114 - RNA, 76 nt, synthetic construct
  source 1..76: mol_type = other RNA
ggctccgtggcgcaatggatagcgcattggacttcaaattcaaaggttccgggtttgagtcccggcggagtcgcca

SEQ ID NO: 3115 - RNA, 76 nt, synthetic construct
  source 1..76: mol_type = other RNA
ggctccgtggcgcaatggatagcgcattggacttcaaattcaaaggttccgggttctagtcccggcggagtcgcca

SEQ ID NO: 3116 - RNA, 76 nt, synthetic construct
  source 1..76: mol_type = other RNA
ggctccgtggcgcaatggatagcgcattggacttcaaattcaaaggttccgggttcgtgtcccggcggagtcgcca

SEQ ID NO: 3117 - RNA, 76 nt, synthetic construct
  source 1..76: mol_type = other RNA
ggctccgtggcgcaatggatagcgcattggacttcaaattcaaaggttccgggttcgattcccggcggagtcgcca

SEQ ID NO: 3118 - RNA, 76 nt, synthetic construct; identical to SEQ ID NO: 625
  source 1..76: mol_type = other RNA
  modified_base 1: mod_base = OTHER; note = 2'-Omethylguanosine
  modified_base 2: mod_base = OTHER; note = 2'-Omethylguanosine
  modified_base 3: mod_base = OTHER; note = 2'-Omethylcytosine
  modified_base 4: mod_base = OTHER; note = 2'-Omethyluridine
  modified_base 5: mod_base = OTHER; note = 2'-Omethylcytosine
  modified_base 6: mod_base = OTHER; note = 2'-Omethylcytosine
  modified_base 7: mod_base = OTHER; note = 2'-Omethylguanosine

SEQ ID NO: 3119 - RNA, 76 nt, synthetic construct; identical to SEQ ID NO: 625
  source 1..76: mol_type = other RNA
  modified_base 1: mod_base = OTHER; note = 2'-Omethylguanosine
  modified_base 2: mod_base = OTHER; note = 2'-Omethylguanosine
  modified_base 3: mod_base = OTHER; note = 2'-Omethylcytosine

SEQ ID NO: 3120 - RNA, 76 nt, synthetic construct; identical to SEQ ID NO: 625
  source 1..76: mol_type = other RNA
  modified_base 4: mod_base = OTHER; note = 2'-Omethyluridine
  modified_base 5: mod_base = OTHER; note = 2'-Omethylcytosine
  modified_base 6: mod_base = OTHER; note = 2'-Omethylcytosine
  modified_base 7: mod_base = OTHER; note = 2'-Omethylguanosine

SEQ ID NO: 3121 - RNA, 76 nt, synthetic construct; identical to SEQ ID NO: 625
  source 1..76: mol_type = other RNA
  modified_base 66: mod_base = OTHER; note = 2'-Omethylcytosine
  modified_base 67: mod_base = OTHER; note = 2'-Omethylguanosine
  modified_base 68: mod_base = OTHER; note = 2'-Omethylguanosine
  modified_base 69: mod_base = OTHER; note = 2'-Omethyladenosine
  modified_base 70: mod_base = OTHER; note = 2'-Omethylguanosine
  modified_base 71: mod_base = OTHER; note = 2'-Omethyluridine
  modified_base 72: mod_base = OTHER; note = 2'-Omethylcytosine

SEQ ID NO: 3122 - RNA, 76 nt, synthetic construct; identical to SEQ ID NO: 625
  source 1..76: mol_type = other RNA
  modified_base 66: mod_base = OTHER; note = 2'-Omethylcytosine
  modified_base 67: mod_base = OTHER; note = 2'-Omethylguanosine
  modified_base 68: mod_base = OTHER; note = 2'-Omethylguanosine

SEQ ID NO: 3123 - RNA, 76 nt, synthetic construct; identical to SEQ ID NO: 625
  source 1..76: mol_type = other RNA
  modified_base 68: mod_base = OTHER; note = 2'-Omethylguanosine
  modified_base 69: mod_base = OTHER; note = 2'-Omethyladenosine
  modified_base 70: mod_base = OTHER; note = 2'-Omethylguanosine

SEQ ID NO: 3124 - RNA, 76 nt, synthetic construct; identical to SEQ ID NO: 625
  source 1..76: mol_type = other RNA
  modified_base 70: mod_base = OTHER; note = 2'-Omethylguanosine
  modified_base 71: mod_base = OTHER; note = 2'-Omethyluridine
  modified_base 72: mod_base = OTHER; note = 2'-Omethylcytosine

SEQ ID NO: 3125 - RNA, 76 nt, synthetic construct; identical to SEQ ID NO: 625
  source 1..76: mol_type = other RNA
  modified_base 10: mod_base = OTHER; note = 2'-Omethylguanosine
  modified_base 11: mod_base = OTHER; note = 2'-Omethylcytosine
  modified_base 12: mod_base = OTHER; note = 2'-Omethylguanosine
  modified_base 13: mod_base = OTHER; note = 2'-Omethylcytosine

SEQ ID NO: 3126 - RNA, 76 nt, synthetic construct; identical to SEQ ID NO: 625
  source 1..76: mol_type = other RNA
  modified_base 22: mod_base = OTHER; note = 2'-Omethylguanosine
  modified_base 23: mod_base = OTHER; note = 2'-Omethylcytosine
  modified_base 24: mod_base = OTHER; note = 2'-Omethylguanosine
  modified_base 25: mod_base = OTHER; note = 2'-Omethylcytosine

SEQ ID NO: 3127 - RNA, 76 nt, synthetic construct; identical to SEQ ID NO: 625
  source 1..76: mol_type = other RNA
  modified_base 14: mod_base = OTHER; note = 2'-Omethyladenosine
  modified_base 15: mod_base = OTHER; note = 2'-Omethyladenosine
  modified_base 16: mod_base = OTHER; note = 2'-Omethyluridine
  modified_base 17: mod_base = OTHER; note = 2'-Omethylguanosine
  modified_base 18: mod_base = OTHER; note = 2'-Omethylguanosine
  modified_base 19: mod_base = OTHER; note = 2'-Omethyladenosine
  modified_base 20: mod_base = OTHER; note = 2'-Omethyluridine
  modified_base 21: mod_base = OTHER; note = 2'-Omethyladenosine

SEQ ID NO: 3128 - RNA, 76 nt, synthetic construct; identical to SEQ ID NO: 625
  source 1..76: mol_type = other RNA
  modified_base 14: mod_base = OTHER; note = 2'-Omethyladenosine
  modified_base 15: mod_base = OTHER; note = 2'-Omethyladenosine
  modified_base 16: mod_base = OTHER; note = 2'-Omethyluridine

SEQ ID NO: 3129 - RNA, 76 nt, synthetic construct; identical to SEQ ID NO: 625
  source 1..76: mol_type = other RNA
  modified_base 17: mod_base = OTHER; note = 2'-Omethylguanosine
  modified_base 18: mod_base = OTHER; note = 2'-Omethylguanosine
  modified_base 19: mod_base = OTHER; note = 2'-Omethyladenosine

SEQ ID NO: 3130 - RNA, 76 nt, synthetic construct; identical to SEQ ID NO: 625
  source 1..76: mol_type = other RNA
  modified_base 19: mod_base = OTHER; note = 2'-Omethyladenosine
  modified_base 20: mod_base = OTHER; note = 2'-Omethyluridine
  modified_base 21: mod_base = OTHER; note = 2'-Omethyladenosine

SEQ ID NO: 3131 - RNA, 76 nt, synthetic construct; identical to SEQ ID NO: 625
  source 1..76: mol_type = other RNA
  modified_base 14: mod_base = OTHER; note = 2'-O-(2-Methoxyethyl) adenosine

SEQ ID NO: 3132 - RNA, 76 nt, synthetic construct; identical to SEQ ID NO: 625
  source 1..76: mol_type = other RNA
  modified_base 15: mod_base = OTHER; note = 2'-O-(2-Methoxyethyl) adenosine

SEQ ID NO: 3133 - RNA, 76 nt, synthetic construct; identical to SEQ ID NO: 625
  source 1..76: mol_type = other RNA
  modified_base 16: mod_base = OTHER; note = 2'-O-(2-Methoxyethyl) thymine

SEQ ID NO: 3134 - RNA, 76 nt, synthetic construct; identical to SEQ ID NO: 625
  source 1..76: mol_type = other RNA
  modified_base 17: mod_base = OTHER; note = 2'-O-(2-Methoxyethyl) guanosine

SEQ ID NO: 3135 - RNA, 76 nt, synthetic construct; identical to SEQ ID NO: 625
  source 1..76: mol_type = other RNA
  modified_base 18: mod_base = OTHER; note = 2'-O-(2-Methoxyethyl) guanosine

SEQ ID NO: 3136 - RNA, 76 nt, synthetic construct; identical to SEQ ID NO: 625
  source 1..76: mol_type = other RNA
  modified_base 19: mod_base = OTHER; note = 2'-O-(2-Methoxyethyl) adenosine

SEQ ID NO: 3137 - RNA, 76 nt, synthetic construct; identical to SEQ ID NO: 625
  source 1..76: mol_type = other RNA
  modified_base 20: mod_base = OTHER; note = 2'-O-(2-Methoxyethyl) thymine

SEQ ID NO: 3138 - RNA, 76 nt, synthetic construct; identical to SEQ ID NO: 625
  source 1..76: mol_type = other RNA
  modified_base 21: mod_base = OTHER; note = 2'-O-(2-Methoxyethyl) adenosine

SEQ ID NO: 3139 - RNA, 76 nt, synthetic construct; identical to SEQ ID NO: 625
  source 1..76: mol_type = other RNA
  modified_base 14: mod_base = OTHER; note = Adenosine phosphorothiorate

SEQ ID NO: 3140 - RNA, 76 nt, synthetic construct; identical to SEQ ID NO: 625
  source 1..76: mol_type = other RNA
  modified_base 15: mod_base = OTHER; note = Adenosine phosphorothiorate

SEQ ID NO: 3141 - RNA, 76 nt, synthetic construct; identical to SEQ ID NO: 625
  source 1..76: mol_type = other RNA
  modified_base 16: mod_base = OTHER; note = Uridine phosphorothiorate

SEQ ID NO: 3142 - RNA, 76 nt, synthetic construct; identical to SEQ ID NO: 625
  source 1..76: mol_type = other RNA
  modified_base 17: mod_base = OTHER; note = Guanosine phosphorothiorate

SEQ ID NO: 3143 - RNA, 76 nt, synthetic construct; identical to SEQ ID NO: 625
  source 1..76: mol_type = other RNA
  modified_base 18: mod_base = OTHER; note = Guanosine phosphorothiorate

SEQ ID NO: 3144 - RNA, 76 nt, synthetic construct; identical to SEQ ID NO: 625
  source 1..76: mol_type = other RNA
  modified_base 20: mod_base = OTHER; note = Uridine phosphorothiorate

SEQ ID NO: 3145 - RNA, 76 nt, synthetic construct; identical to SEQ ID NO: 625
  source 1..76: mol_type = other RNA
  modified_base 21: mod_base = OTHER; note = Adenosine phosphorothiorate

SEQ ID NO: 3146 - RNA, 76 nt, synthetic construct; identical to SEQ ID NO: 625
  source 1..76: mol_type = other RNA
  modified_base 32: mod_base = OTHER; note = 2'-Omethylcytosine
  modified_base 33: mod_base = OTHER; note = 2'-Omethyluridine
  modified_base 34: mod_base = OTHER; note = 2'-Omethyluridine
  modified_base 35: mod_base = OTHER; note = 2'-Omethylcytosine
  modified_base 36: mod_base = OTHER; note = 2'-Omethyladenosine
  modified_base 37: mod_base = OTHER; note = 2'-Omethyladenosine
  modified_base 38: mod_base = OTHER; note = 2'-Omethyladenosine

SEQ ID NO: 3147 - RNA, 76 nt, synthetic construct; identical to SEQ ID NO: 625
  source 1..76: mol_type = other RNA
  modified_base 32: mod_base = OTHER; note = 2'-Omethylcytosine
  modified_base 33: mod_base = OTHER; note = 2'-Omethyluridine
  modified_base 34: mod_base = OTHER; note = 2'-Omethyluridine

SEQ ID NO: 3148 - RNA, 76 nt, synthetic construct; identical to SEQ ID NO: 625
  source 1..76: mol_type = other RNA
  modified_base 35: mod_base = OTHER; note = 2'-Omethylcytosine
  modified_base 36: mod_base = OTHER; note = 2'-Omethyladenosine
  modified_base 37: mod_base = OTHER; note = 2'-Omethyladenosine
  modified_base 38: mod_base = OTHER; note = 2'-Omethyladenosine

SEQ ID NO: 3149 - skipped

SEQ ID NO: 3150 - RNA, 76 nt, synthetic construct; identical to SEQ ID NO: 625
  source 1..76: mol_type = other RNA
  modified_base 33: mod_base = OTHER; note = 2'-O-(2-Methoxyethyl) thymine

SEQ ID NO: 3151 - RNA, 76 nt, synthetic construct; identical to SEQ ID NO: 625
  source 1..76: mol_type = other RNA
  modified_base 34: mod_base = OTHER; note = 2'-O-(2-Methoxyethyl) thymine

SEQ ID NO: 3152 - skipped

SEQ ID NO: 3153 - RNA, 76 nt, synthetic construct; identical to SEQ ID NO: 625
  source 1..76: mol_type = other RNA
  modified_base 36: mod_base = OTHER; note = 2'-O-(2-Methoxyethyl) adenosine

SEQ ID NO: 3154 - RNA, 76 nt, synthetic construct; identical to SEQ ID NO: 625
  source 1..76: mol_type = other RNA
  modified_base 37: mod_base = OTHER; note = 2'-O-(2-Methoxyethyl) adenosine

SEQ ID NO: 3155 - RNA, 76 nt, synthetic construct; identical to SEQ ID NO: 625
  source 1..76: mol_type = other RNA
  modified_base 38: mod_base = OTHER; note = 2'-O-(2-Methoxyethyl) adenosine

SEQ ID NO: 3156 - RNA, 76 nt, synthetic construct; identical to SEQ ID NO: 625
  source 1..76: mol_type = other RNA
  modified_base 32: mod_base = OTHER; note = Cytosine phosphorothiorate

SEQ ID NO: 3157 - RNA, 76 nt, synthetic construct; identical to SEQ ID NO: 625
  source 1..76: mol_type = other RNA
  modified_base 33: mod_base = OTHER; note = Uridine phosphorothiorate

SEQ ID NO: 3158 - RNA, 76 nt, synthetic construct; identical to SEQ ID NO: 625
  source 1..76: mol_type = other RNA
  modified_base 34: mod_base = OTHER; note = Uridine phosphorothiorate

SEQ ID NO: 3159 - RNA, 76 nt, synthetic construct; identical to SEQ ID NO: 625
  source 1..76: mol_type = other RNA
  modified_base 35: mod_base = OTHER; note = Cytosine phosphorothiorate

SEQ ID NO: 3160 - RNA, 76 nt, synthetic construct; identical to SEQ ID NO: 625
  source 1..76: mol_type = other RNA
  modified_base 36: mod_base = OTHER; note = Adenosine phosphorothiorate

SEQ ID NO: 3161 - RNA, 76 nt, synthetic construct; identical to SEQ ID NO: 625
  source 1..76: mol_type = other RNA
  modified_base 37: mod_base = OTHER; note = Adenosine phosphorothiorate

SEQ ID NO: 3162 - RNA, 76 nt, synthetic construct; identical to SEQ ID NO: 625
  source 1..76: mol_type = other RNA
  modified_base 38: mod_base = OTHER; note = Adenosine phosphorothiorate

SEQ ID NO: 3163 - RNA, 76 nt, synthetic construct; identical to SEQ ID NO: 625
  source 1..76: mol_type = other RNA
  modified_base 44: mod_base = OTHER; note = 2'-O-(2-Methoxyethyl) adenosine

SEQ ID NO: 3164 - RNA, 76 nt, synthetic construct; identical to SEQ ID NO: 625
  source 1..76: mol_type = other RNA
  modified_base 45: mod_base = OTHER; note = 2'-O-(2-Methoxyethyl) guanosine

SEQ ID NO: 3165 - RNA, 76 nt, synthetic construct; identical to SEQ ID NO: 625
  source 1..76: mol_type = other RNA
  modified_base 46: mod_base = OTHER; note = 2'-O-(2-Methoxyethyl) guanosine

SEQ ID NO: 3166 - RNA, 76 nt, synthetic construct; identical to SEQ ID NO: 625
  source 1..76: mol_type = other RNA
  modified_base 47: mod_base = OTHER; note = 2'-O-(2-Methoxyethyl) thymine

SEQ ID NO: 3167 - RNA, 76 nt, synthetic construct; identical to SEQ ID NO: 625
  source 1..76: mol_type = other RNA
  modified_base 48: mod_base = OTHER; note = 2'-O-(2-Methoxyethyl) thymine

SEQ ID NO: 3168 - RNA, 76 nt, synthetic construct; identical to SEQ ID NO: 625
  source 1..76: mol_type = other RNA
  modified_base 44: mod_base = OTHER; note = Adenosine phosphorothiorate

SEQ ID NO: 3169 - RNA, 76 nt, synthetic construct; identical to SEQ ID NO: 625
  source 1..76: mol_type = other RNA
  modified_base 45: mod_base = OTHER; note = Guanosine phosphorothiorate

SEQ ID NO: 3170 - RNA, 76 nt, synthetic construct; identical to SEQ ID NO: 625
  source 1..76: mol_type = other RNA
  modified_base 46: mod_base = OTHER; note = Guanosine phosphorothiorate

SEQ ID NO: 3171 - RNA, 76 nt, synthetic construct; identical to SEQ ID NO: 625
  source 1..76: mol_type = other RNA
  modified_base 47: mod_base = OTHER; note = Uridine phosphorothiorate

SEQ ID NO: 3172 - RNA, 76 nt, synthetic construct; identical to SEQ ID NO: 625
  source 1..76: mol_type = other RNA
  modified_base 48: mod_base = OTHER; note = Uridine phosphorothiorate

SEQ ID NO: 3173 - RNA, 76 nt, synthetic construct; identical to SEQ ID NO: 625
  source 1..76: mol_type = other RNA
  modified_base 44: mod_base = OTHER; note = 2'-Omethyladenosine
  modified_base 45: mod_base = OTHER; note = 2'-Omethylguanosine
  modified_base 46: mod_base = OTHER; note = 2'-Omethylguanosine
  modified_base 47: mod_base = OTHER; note = 2'-Omethyluridine
  modified_base 48: mod_base = OTHER; note = 2'-Omethyluridine

SEQ ID NO: 3174 - RNA, 76 nt, synthetic construct; identical to SEQ ID NO: 625
  source 1..76: mol_type = other RNA
  modified_base 44: mod_base = OTHER; note = 2'-Omethyladenosine
  modified_base 45: mod_base = OTHER; note = 2'-Omethylguanosine
  modified_base 46: mod_base = OTHER; note = 2'-Omethylguanosine

SEQ ID NO: 3175 - RNA, 76 nt, synthetic construct; identical to SEQ ID NO: 625
  source 1..76: mol_type = other RNA
  modified_base 46: mod_base = OTHER; note = 2'-Omethylguanosine
  modified_base 47: mod_base = OTHER; note = 2'-Omethyluridine
  modified_base 48: mod_base = OTHER; note = 2'-Omethyluridine

SEQ ID NO: 3176 - RNA, 76 nt, synthetic construct; identical to SEQ ID NO: 625
  source 1..76: mol_type = other RNA
  modified_base 54: mod_base = OTHER; note = 2'-Omethyluridine
  modified_base 55: mod_base = OTHER; note = 2'-Omethyluridine
  modified_base 56: mod_base = OTHER; note = 2'-Omethylcytosine
  modified_base 57: mod_base = OTHER; note = 2'-Omethylguanosine
  modified_base 58: mod_base = OTHER; note = 2'-Omethyladenosine
  modified_base 59: mod_base = OTHER; note = 2'-Omethylguanosine
  modified_base 60: mod_base = OTHER; note = 2'-Omethyluridine

SEQ ID NO: 3177-3185 - skipped (9 entries)

SEQ ID NO: 3186 - RNA, 76 nt, synthetic construct; identical to SEQ ID NO: 625
  source 1..76: mol_type = other RNA
  modified_base 54: mod_base = OTHER; note = Uridine phosphorothiorate

SEQ ID NO: 3187 - RNA, 76 nt, synthetic construct; identical to SEQ ID NO: 625
  source 1..76: mol_type = other RNA
  modified_base 55: mod_base = OTHER; note = Uridine phosphorothiorate

SEQ ID NO: 3188-3199 - skipped (12 entries)

SEQ ID NO: 3200 - RNA, 76 nt, synthetic construct; identical to SEQ ID NO: 625
  source 1..76: mol_type = other RNA
  modified_base 27: mod_base = OTHER; note = 2'-Omethyluridine
  modified_base 28: mod_base = OTHER; note = 2'-Omethyluridine
  modified_base 29: mod_base = OTHER; note = 2'-Omethylguanosine
  modified_base 30: mod_base = OTHER; note = 2'-Omethylguanosine
  modified_base 31: mod_base = OTHER; note = 2'-Omethyladenosine

SEQ ID NO: 3201 - RNA, 76 nt, synthetic construct; identical to SEQ ID NO: 625
  source 1..76: mol_type = other RNA
  modified_base 39: mod_base = OTHER; note = 2'-Omethyluridine
  modified_base 40: mod_base = OTHER; note = 2'-Omethyluridine
  modified_base 41: mod_base = OTHER; note = 2'-Omethylcytosine
  modified_base 42: mod_base = OTHER; note = 2'-Omethyladenosine
  modified_base 43: mod_base = OTHER; note = 2'-Omethyladenosine

SEQ ID NO: 3202 - RNA, 76 nt, synthetic construct; identical to SEQ ID NO: 625
  source 1..76: mol_type = other RNA
  modified_base 61: mod_base = OTHER; note = 2'-Omethylcytosine
  modified_base 62: mod_base = OTHER; note = 2'-Omethylcytosine
  modified_base 63: mod_base = OTHER; note = 2'-Omethylcytosine
  modified_base 64: mod_base = OTHER; note = 2'-Omethylguanosine
  modified_base 65: mod_base = OTHER; note = 2'-Omethylguanosine

SEQ ID NO: 3203 - RNA, 76 nt, synthetic construct; identical to SEQ ID NO: 625
  source 1..76: mol_type = other RNA
  modified_base 49: mod_base = OTHER; note = 2'-Omethylcytosine
  modified_base 50: mod_base = OTHER; note = 2'-Omethylcytosine
  modified_base 51: mod_base = OTHER; note = 2'-Omethylguanosine
  modified_base 52: mod_base = OTHER; note = 2'-Omethylguanosine
  modified_base 53: mod_base = OTHER; note = 2'-Omethylguanosine

SEQ ID NO: 3204-3206 - skipped (3 entries)

SEQ ID NO: 3207 - RNA, 76 nt, synthetic construct; identical to SEQ ID NO: 625
  source 1..76: mol_type = other RNA
  modified_base 1: mod_base = OTHER; note = 2'-fluoroguanosine

SEQ ID NO: 3208 - RNA, 76 nt, synthetic construct; identical to SEQ ID NO: 625
  source 1..76: mol_type = other RNA
  modified_base 2: mod_base = OTHER; note = 2'-fluoroguanosine

SEQ ID NO: 3209 - RNA, 76 nt, synthetic construct; identical to SEQ ID NO: 625
  source 1..76: mol_type = other RNA
  modified_base 3: mod_base = OTHER; note = 2'-fluorocytosine

SEQ ID NO: 3210 - RNA, 76 nt, synthetic construct; identical to SEQ ID NO: 625
  source 1..76: mol_type = other RNA
  modified_base 4: mod_base = OTHER; note = 2'-fluorouridine

SEQ ID NO: 3211 - RNA, 76 nt, synthetic construct; identical to SEQ ID NO: 625
  source 1..76: mol_type = other RNA
  modified_base 5: mod_base = OTHER; note = 2'-fluorocytosine

SEQ ID NO: 3212 - RNA, 76 nt, synthetic construct; identical to SEQ ID NO: 625
  source 1..76: mol_type = other RNA
  modified_base 6: mod_base = OTHER; note = 2'-fluorocytosine

SEQ ID NO: 3213 - skipped

SEQ ID NO: 3214 - RNA, 76 nt, synthetic construct; identical to SEQ ID NO: 625
  source 1..76: mol_type = other RNA
  modified_base 7: mod_base = OTHER; note = 2'-fluoroguanosine

SEQ ID NO: 3215 - skipped

SEQ ID NO: 3216 - RNA, 76 nt, synthetic construct; identical to SEQ ID NO: 625
  source 1..76: mol_type = other RNA
  modified_base 8: mod_base = OTHER; note = 2'-fluorouridine

SEQ ID NO: 3217 - skipped

SEQ ID NO: 3218 - RNA, 76 nt, synthetic construct; identical to SEQ ID NO: 625
  source 1..76: mol_type = other RNA
  modified_base 9: mod_base = OTHER; note = 2'-fluoroguanosine

SEQ ID NO: 3219 - RNA, 76 nt, synthetic construct; identical to SEQ ID NO: 625
  source 1..76: mol_type = other RNA
  modified_base 10: mod_base = OTHER; note = 2'-fluoroguanosine

SEQ ID NO: 3220 - RNA, 76 nt, synthetic construct; identical to SEQ ID NO: 625
  source 1..76: mol_type = other RNA
  modified_base 11: mod_base = OTHER; note = 2'-fluorocytosine

SEQ ID NO: 3221 - RNA, 76 nt, synthetic construct; identical to SEQ ID NO: 625
  source 1..76: mol_type = other RNA
  modified_base 12: mod_base = OTHER; note = 2'-fluoroguanosine

SEQ ID NO: 3222 - RNA, 76 nt, synthetic construct; identical to SEQ ID NO: 625
  source 1..76: mol_type = other RNA
  modified_base 13: mod_base = OTHER; note = 2'-fluorocytosine

SEQ ID NO: 3223 - RNA, 76 nt, synthetic construct; identical to SEQ ID NO: 625
  source 1..76: mol_type = other RNA
  modified_base 14: mod_base = OTHER; note = 2'-fluoroadenosine

SEQ ID NO: 3224 - RNA, 76 nt, synthetic construct; identical to SEQ ID NO: 625
  source 1..76: mol_type = other RNA
  modified_base 15: mod_base = OTHER; note = 2'-fluoroadenosine

SEQ ID NO: 3225 - RNA, 76 nt, synthetic construct; identical to SEQ ID NO: 625
  source 1..76: mol_type = other RNA
  modified_base 16: mod_base = OTHER; note = 2'-fluorouridine

SEQ ID NO: 3226 - RNA, 76 nt, synthetic construct; identical to SEQ ID NO: 625
  source 1..76: mol_type = other RNA
  modified_base 17: mod_base = OTHER; note = 2'-fluoroguanosine

SEQ ID NO: 3227 - RNA, 76 nt, synthetic construct; identical to SEQ ID NO: 625
  source 1..76: mol_type = other RNA
  modified_base 18: mod_base = OTHER; note = 2'-fluoroguanosine

SEQ ID NO: 3228 - RNA, 76 nt, synthetic construct; identical to SEQ ID NO: 625
  source 1..76: mol_type = other RNA
  modified_base 19: mod_base = OTHER; note = 2'-fluoroadenosine

SEQ ID NO: 3229 - RNA, 76 nt, synthetic construct; identical to SEQ ID NO: 625
  source 1..76: mol_type = other RNA
  modified_base 20: mod_base = OTHER; note = 2'-fluorouridine

SEQ ID NO: 3230 - RNA, 76 nt, synthetic construct; identical to SEQ ID NO: 625
  source 1..76: mol_type = other RNA
  modified_base 21: mod_base = OTHER; note = 2'-fluoroadenosine

SEQ ID NO: 3231 - RNA, 76 nt, synthetic construct; identical to SEQ ID NO: 625
  source 1..76: mol_type = other RNA
  modified_base 22: mod_base = OTHER; note = 2'-fluoroguanosine

SEQ ID NO: 3232 - RNA, 76 nt, synthetic construct; identical to SEQ ID NO: 625
  source 1..76: mol_type = other RNA
  modified_base 23: mod_base = OTHER; note = 2'-fluorocytosine

SEQ ID NO: 3233 - RNA, 76 nt, synthetic construct; identical to SEQ ID NO: 625
  source 1..76: mol_type = other RNA
  modified_base 24: mod_base = OTHER; note = 2'-fluoroguanosine

SEQ ID NO: 3234 - RNA, 76 nt, synthetic construct; identical to SEQ ID NO: 625
  source 1..76: mol_type = other RNA
  modified_base 25: mod_base = OTHER; note = 2'-fluorocytosine

SEQ ID NO: 3235 - RNA, 76 nt, synthetic construct; identical to SEQ ID NO: 625
  source 1..76: mol_type = other RNA
  modified_base 26: mod_base = OTHER; note = 2'-fluoroadenosine

SEQ ID NO: 3236 - RNA, 76 nt, synthetic construct; identical to SEQ ID NO: 625
  source 1..76: mol_type = other RNA
  modified_base 27: mod_base = OTHER; note = 2'-fluorouridine

SEQ ID NO: 3237 - RNA, 76 nt, synthetic construct; identical to SEQ ID NO: 625
  source 1..76: mol_type = other RNA
  modified_base 28: mod_base = OTHER; note = 2'-fluorouridine

SEQ ID NO: 3238 - RNA, 76 nt, synthetic construct; identical to SEQ ID NO: 625
  source 1..76: mol_type = other RNA
  modified_base 29: mod_base = OTHER; note = 2'-fluoroguanosine

SEQ ID NO: 3239 - RNA, 76 nt, synthetic construct; identical to SEQ ID NO: 625
  source 1..76: mol_type = other RNA
  modified_base 30: mod_base = OTHER; note = 2'-fluoroguanosine

SEQ ID NO: 3240 - RNA, 76 nt, synthetic construct; identical to SEQ ID NO: 625
  source 1..76: mol_type = other RNA
  modified_base 31: mod_base = OTHER; note = 2'-fluoroadenosine

SEQ ID NO: 3241 - RNA, 76 nt, synthetic construct; identical to SEQ ID NO: 625
  source 1..76: mol_type = other RNA
  modified_base 32: mod_base = OTHER; note = 2'-fluorocytosine

SEQ ID NO: 3242-3243 - skipped (2 entries)

SEQ ID NO: 3244 - RNA, 76 nt, synthetic construct; identical to SEQ ID NO: 625
  source 1..76: mol_type = other RNA
  modified_base 33: mod_base = OTHER; note = 2'-fluorouridine

SEQ ID NO: 3245 - RNA, 76 nt, synthetic construct; identical to SEQ ID NO: 625
  source 1..76: mol_type = other RNA
  modified_base 34: mod_base = OTHER; note = 2'-fluorouridine

SEQ ID NO: 3246 - RNA, 76 nt, synthetic construct; identical to SEQ ID NO: 625
  source 1..76: mol_type = other RNA
  modified_base 35: mod_base = OTHER; note = 2'-fluorocytosine

SEQ ID NO: 3247 - RNA, 76 nt, synthetic construct; identical to SEQ ID NO: 625
  source 1..76: mol_type = other RNA
  modified_base 36: mod_base = OTHER; note = 2'-fluoroadenosine

SEQ ID NO: 3248 - RNA, 76 nt, synthetic construct; identical to SEQ ID NO: 625
  source 1..76: mol_type = other RNA
  modified_base 37: mod_base = OTHER; note = 2'-fluoroadenosine

SEQ ID NO: 3249 - RNA, 76 nt, synthetic construct; identical to SEQ ID NO: 625
  source 1..76: mol_type = other RNA
  modified_base 38: mod_base = OTHER; note = 2'-fluoroadenosine

SEQ ID NO: 3250 - RNA, 76 nt, synthetic construct; identical to SEQ ID NO: 625
  source 1..76: mol_type = other RNA
  modified_base 39: mod_base = OTHER; note = 2'-fluorouridine

SEQ ID NO: 3251 - skipped

SEQ ID NO: 3252 - RNA, 76 nt, synthetic construct; identical to SEQ ID NO: 625
  source 1..76: mol_type = other RNA
  modified_base 40: mod_base = OTHER; note = 2'-fluorouridine

SEQ ID NO: 3253 - RNA, 76 nt, synthetic construct; identical to SEQ ID NO: 625
  source 1..76: mol_type = other RNA
  modified_base 41: mod_base = OTHER; note = 2'-fluorocytosine

SEQ ID NO: 3254 - RNA, 76 nt, synthetic construct; identical to SEQ ID NO: 625
  source 1..76: mol_type = other RNA
  modified_base 42: mod_base = OTHER; note = 2'-fluoroadenosine

SEQ ID NO: 3255 - RNA, 76 nt, synthetic construct; identical to SEQ ID NO: 625
  source 1..76: mol_type = other RNA
  modified_base 43: mod_base = OTHER; note = 2'-fluoroadenosine

SEQ ID NO: 3256 - RNA, 76 nt, synthetic construct; identical to SEQ ID NO: 625
  source 1..76: mol_type = other RNA
  modified_base 44: mod_base = OTHER; note = 2'-fluoroadenosine

SEQ ID NO: 3257 - RNA, 76 nt, synthetic construct; identical to SEQ ID NO: 625
  source 1..76: mol_type = other RNA
  modified_base 45: mod_base = OTHER; note = 2'-fluoroguanosine

SEQ ID NO: 3258 - RNA, 76 nt, synthetic construct; identical to SEQ ID NO: 625
  source 1..76: mol_type = other RNA
  modified_base 46: mod_base = OTHER; note = 2'-fluoroguanosine

SEQ ID NO: 3259 - RNA, 76 nt, synthetic construct; identical to SEQ ID NO: 625
  source 1..76: mol_type = other RNA
  modified_base 47: mod_base = OTHER; note = 2'-fluorouridine

SEQ ID NO: 3260 - RNA, 76 nt, synthetic construct; identical to SEQ ID NO: 625
  source 1..76: mol_type = other RNA
  modified_base 48: mod_base = OTHER; note = 2'-fluorouridine

SEQ ID NO: 3261 - RNA, 76 nt, synthetic construct; identical to SEQ ID NO: 625
  source 1..76: mol_type = other RNA
  modified_base 49: mod_base = OTHER; note = 2'-fluorocytosine

SEQ ID NO: 3262 - RNA, 76 nt, synthetic construct; identical to SEQ ID NO: 625
  source 1..76: mol_type = other RNA
  modified_base 50: mod_base = OTHER; note = 2'-fluorocytosine

SEQ ID NO: 3263 - skipped

SEQ ID NO: 3264 - RNA, 76 nt, synthetic construct; identical to SEQ ID NO: 625
  source 1..76: mol_type = other RNA
  modified_base 51: mod_base = OTHER; note = 2'-fluoroguanosine

SEQ ID NO: 3265 - RNA, 76 nt, synthetic construct; identical to SEQ ID NO: 625
  source 1..76: mol_type = other RNA
  modified_base 52: mod_base = OTHER; note = 2'-fluoroguanosine

SEQ ID NO: 3266 - RNA, 76 nt, synthetic construct; identical to SEQ ID NO: 625
  source 1..76: mol_type = other RNA
  modified_base 53: mod_base = OTHER; note = 2'-fluoroguanosine

SEQ ID NO: 3267 - RNA, 76 nt, synthetic construct; identical to SEQ ID NO: 625
  source 1..76: mol_type = other RNA
  modified_base 54: mod_base = OTHER; note = 2'-fluorouridine

SEQ ID NO: 3268 - RNA, 76 nt, synthetic construct; identical to SEQ ID NO: 625
  source 1..76: mol_type = other RNA
  modified_base 55: mod_base = OTHER; note = 2'-fluorouridine

SEQ ID NO: 3269 - RNA, 76 nt, synthetic construct; identical to SEQ ID NO: 625
  source 1..76: mol_type = other RNA
  modified_base 56: mod_base = OTHER; note = 2'-fluorocytosine

SEQ ID NO: 3270 - RNA, 76 nt, synthetic construct; identical to SEQ ID NO: 625
  source 1..76: mol_type = other RNA
  modified_base 57: mod_base = OTHER; note = 2'-fluoroguanosine

SEQ ID NO: 3271 - skipped

SEQ ID NO: 3272 - RNA, 76 nt, synthetic construct; identical to SEQ ID NO: 625
  source 1..76: mol_type = other RNA
  modified_base 58: mod_base = OTHER; note = 2'-fluoroadenosine

SEQ ID NO: 3273 - RNA, 76 nt, synthetic construct; identical to SEQ ID NO: 625
  source 1..76: mol_type = other RNA
  modified_base 59: mod_base = OTHER; note = 2'-fluoroguanosine

SEQ ID NO: 3274 - RNA, 76 nt, synthetic construct; identical to SEQ ID NO: 625
  source 1..76: mol_type = other RNA
  modified_base 60: mod_base = OTHER; note = 2'-fluorouridine

SEQ ID NO: 3275 - RNA, 76 nt, synthetic construct; identical to SEQ ID NO: 625
  source 1..76: mol_type = other RNA
  modified_base 61: mod_base = OTHER; note = 2'-fluorocytosine

SEQ ID NO: 3276 - RNA, 76 nt, synthetic construct; identical to SEQ ID NO: 625
  source 1..76: mol_type = other RNA
  modified_base 62: mod_base = OTHER; note = 2'-fluorocytosine

SEQ ID NO: 3277 - skipped

SEQ ID NO: 3278 - RNA, 76 nt, synthetic construct; identical to SEQ ID NO: 625
  source 1..76: mol_type = other RNA
  modified_base 63: mod_base = OTHER; note = 2'-fluorocytosine

SEQ ID NO: 3279 - RNA, 76 nt, synthetic construct; identical to SEQ ID NO: 625
  source 1..76: mol_type = other RNA
  modified_base 64: mod_base = OTHER; note = 2'-fluoroguanosine

SEQ ID NO: 3280 - RNA, 76 nt, synthetic construct; identical to SEQ ID NO: 625
  source 1..76: mol_type = other RNA
  modified_base 65: mod_base = OTHER; note = 2'-fluoroguanosine

SEQ ID NO: 3281 - RNA, 76 nt, synthetic construct; identical to SEQ ID NO: 625
  source 1..76: mol_type = other RNA
  modified_base 66: mod_base = OTHER; note = 2'-fluorocytosine

SEQ ID NO: 3282 - RNA, 76 nt, synthetic construct; identical to SEQ ID NO: 625
  source 1..76: mol_type = other RNA
  modified_base 67: mod_base = OTHER; note = 2'-fluoroguanosine

SEQ ID NO: 3283 - RNA, 76 nt, synthetic construct; identical to SEQ ID NO: 625
  source 1..76: mol_type = other RNA
  modified_base 68: mod_base = OTHER; note = 2'-fluoroguanosine

SEQ ID NO: 3284 - RNA, 76 nt, synthetic construct; identical to SEQ ID NO: 625
  source 1..76: mol_type = other RNA
  modified_base 69: mod_base = OTHER; note = 2'-fluoroadenosine

SEQ ID NO: 3285 - skipped

SEQ ID NO: 3286 - RNA, 85 nt, synthetic construct
  source 1..85: mol_type = other RNA
  modified_base 1: mod_base = OTHER; note = 2'-Omethylcytosine phosphorothiorate
  modified_base 11: mod_base = OTHER; note = Cytosine phosphorothiorate
  modified_base 28: mod_base = OTHER; note = 2'-fluoroguanosine
  modified_base 30: mod_base = OTHER; note = 2'-fluoroadenosine
  modified_base 36: mod_base = OTHER; note = Guanosine phosphorothiorate
  modified_base 46: mod_base = OTHER; note = 2'-Omethyladenosine
  modified_base 49: mod_base = OTHER; note = Uridine phosphorothiorate
  modified_base 64: mod_base = OTHER; note = Uridine phosphorothiorate
  modified_base 84: mod_base = OTHER; note = 2'-Omethylcytosine
ccaggatggccgagtggttaaggcgttggactttagatccaatggacatatgtccgcgtgggttcgaaccccactcctggtacca

SEQ ID NO: 3287 - RNA, 76 nt, synthetic construct; identical to SEQ ID NO: 625
  source 1..76: mol_type = other RNA
  modified_base 1: mod_base = OTHER; note = 2'-Omethylguanosine
  modified_base 2: mod_base = OTHER; note = 2'-Omethylguanosine
  modified_base 3: mod_base = OTHER; note = 2'-Omethylcytosine
  modified_base 4: mod_base = OTHER; note = 2'-Omethyluridine
  modified_base 5: mod_base = OTHER; note = 2'-Omethylcytosine
  modified_base 6: mod_base = OTHER; note = 2'-Omethylcytosine
  modified_base 10: mod_base = OTHER; note = 2'-Omethylguanosine
  modified_base 11: mod_base = OTHER; note = 2'-Omethylcytosine
  modified_base 12: mod_base = OTHER; note = 2'-Omethylguanosine
  modified_base 13: mod_base = OTHER; note = 2'-Omethylcytosine
  modified_base 14: mod_base = OTHER; note = 2'-Omethyladenosine
  modified_base 15: mod_base = OTHER; note = 2'-fluoroadenosine
  modified_base 16: mod_base = OTHER; note = 2'-Omethyluridine
  modified_base 17: mod_base = OTHER; note = 2'-Omethylguanosine
  modified_base 18: mod_base = OTHER; note = 2'-Omethylguanosine
  modified_base 19: mod_base = OTHER; note = 2'-fluoroadenosine
  modified_base 20: mod_base = OTHER; note = 2'-Omethyluridine
  modified_base 21: mod_base = OTHER; note = 2'-fluoroadenosine
  modified_base 22: mod_base = OTHER; note = 2'-Omethylguanosine
  modified_base 23: mod_base = OTHER; note = 2'-Omethylcytosine
  modified_base 24: mod_base = OTHER; note = 2'-Omethylguanosine
  modified_base 25: mod_base = OTHER; note = 2'-Omethylcytosine
  modified_base 38: mod_base = OTHER; note = Adenosine phosphorothiorate
  modified_base 39: mod_base = OTHER; note = Uridine phosphorothiorate
  modified_base 40: mod_base = OTHER; note = 2'-fluorouridine
  modified_base 43: mod_base = OTHER; note = 2'-Omethyladenosine
  modified_base 44: mod_base = OTHER; note = 2'-Omethyladenosine
  modified_base 45: mod_base = OTHER; note = 2'-Omethylguanosine
  modified_base 46: mod_base = OTHER; note = 2'-fluoroguanosine
  modified_base 48: mod_base = OTHER; note = 2'-fluorouridine
  modified_base 49: mod_base = OTHER; note = 2'-Omethylcytosine
  modified_base 50: mod_base = OTHER; note = 2'-Omethylcytosine
  modified_base 54: mod_base = OTHER; note = 2'-Omethyluridine phosphorothiorate
  modified_base 55: mod_base = OTHER; note = Uridine phosphorothiorate
  modified_base 56: mod_base = OTHER; note = 2'-Omethylcytosine
  modified_base 57: mod_base = OTHER; note = 2'-fluoroguanosine
  modified_base 61: mod_base = OTHER; note = 2'-Omethylcytosine
  modified_base 62: mod_base = OTHER; note = 2'-Omethylcytosine
  modified_base 63: mod_base = OTHER; note = 2'-fluorocytosine
  modified_base 64: mod_base = OTHER; note = 2'-Omethylguanosine
  modified_base 65: mod_base = OTHER; note = 2'-Omethylguanosine
  modified_base 66: mod_base = OTHER; note = 2'-Omethylcytosine
  modified_base 67: mod_base = OTHER; note = 2'-Omethylguanosine
  modified_base 68: mod_base = OTHER; note = 2'-Omethylguanosine
  modified_base 69: mod_base = OTHER; note = 2'-Omethyladenosine

SEQ ID NO: 3288 - RNA, 85 nt, synthetic construct
  source 1..85: mol_type = other RNA
  modified_base 1: mod_base = OTHER; note = 2'-Omethylcytosine phosphorothiorate
  modified_base 2: mod_base = OTHER; note = 2'-Omethylcytosine phosphorothiorate
  modified_base 3: mod_base = OTHER; note = 2'-Omethyladenosine
  modified_base 29: mod_base = OTHER; note = 2'-fluoroguanosine
  modified_base 44: mod_base = OTHER; note = 2'-Omethylguanosine
  modified_base 50: mod_base = OTHER; note = Adenosine phosphorothiorate
  modified_base 57: mod_base = OTHER; note = 2'-Omethylcytosine
  modified_base 73: mod_base = OTHER; note = 2'-fluoroadenosine
  modified_base 84: mod_base = OTHER; note = 2'-Omethylcytosine phosphorothiorate
ccaggatggccgagtggttaaggcgttggacttcagatccaatggacatatgtccgcgtgggttcgaaccccactcctggtacca

SEQ ID NO: 3289 - RNA, 76 nt, synthetic construct
  source 1..76: mol_type = other RNA
  modified_base 1: mod_base = OTHER; note = 2'-Omethylguanosine phosphorothiorate
  modified_base 75: mod_base = OTHER; note = 2'-Omethylcytosine phosphorothiorate
gcctgggtagctcagtcggtagagcatcagactttaaatctgagggtccagggttcaagtccctgtccaggcgcca

SEQ ID NO: 3290 - RNA, 86 nt, synthetic construct
  source 1..86: mol_type = other RNA
  modified_base 79: mod_base = OTHER; note = Uridine phosphorothiorate
accaggatggccgagtggttaaggcgttggacttcagatccaatggacatatgtccgcgtgggttcgaaccccactcctggtacca

SEQ ID NO: 3291 - RNA, 76 nt, synthetic construct; identical to SEQ ID NO: 3289
  source 1..76: mol_type = other RNA
  modified_base 1: mod_base = OTHER; note = 2'-Omethylguanosine phosphorothiorate
  modified_base 2: mod_base = OTHER; note = 2'-Omethylcytosine phosphorothiorate
  modified_base 52: mod_base = OTHER; note = Guanosine phosphorothiorate
  modified_base 74: mod_base = OTHER; note = Cytosine phosphorothiorate
  modified_base 75: mod_base = OTHER; note = 2'-Omethylcytosine

SEQ ID NO: 3292 - RNA, 76 nt, synthetic construct; identical to SEQ ID NO: 625
  source 1..76: mol_type = other RNA
  modified_base 1: mod_base = OTHER; note = 2'-Omethylguanosine
  modified_base 10: mod_base = OTHER; note = 2'-Omethylguanosine
  modified_base 13: mod_base = OTHER; note = 2'-Omethylcytosine
  modified_base 17: mod_base = OTHER; note = Guanosine phosphorothiorate
  modified_base 18: mod_base = OTHER; note = 2'-Omethylguanosine
  modified_base 19: mod_base = OTHER; note = Adenosine phosphorothiorate
  modified_base 20: mod_base = OTHER; note = 2'-Omethyluridine
  modified_base 25: mod_base = OTHER; note = 2'-Omethylcytosine
  modified_base 29: mod_base = OTHER; note = 2'-Omethylguanosine
  modified_base 33: mod_base = OTHER; note = 2'-fluorouridine
  modified_base 35: mod_base = OTHER; note = Cytosine phosphorothiorate
  modified_base 37: mod_base = OTHER; note = Adenosine phosphorothiorate
  modified_base 38: mod_base = OTHER; note = Adenosine phosphorothiorate
  modified_base 41: mod_base = OTHER; note = 2'-fluorocytosine
  modified_base 43: mod_base = OTHER; note = 2'-Omethyladenosine
  modified_base 44: mod_base = OTHER; note = 2'-fluoroadenosine
  modified_base 50: mod_base = OTHER; note = 2'-Omethylcytosine
  modified_base 52: mod_base = OTHER; note = 2'-Omethylguanosine
  modified_base 54: mod_base = OTHER; note = Uridine phosphorothiorate
  modified_base 55: mod_base = OTHER; note = Uridine phosphorothiorate
  modified_base 56: mod_base = OTHER; note = 2'-Omethylcytosine
  modified_base 57: mod_base = OTHER; note = Guanosine phosphorothiorate
  modified_base 62: mod_base = OTHER; note = 2'-Omethylcytosine
  modified_base 63: mod_base = OTHER; note = 2'-fluorocytosine
  modified_base 65: mod_base = OTHER; note = 2'-Omethylguanosine
  modified_base 71: mod_base = OTHER; note = 2'-Omethyluridine
  modified_base 73: mod_base = OTHER; note = 2'-Omethylguanosine

SEQ ID NO: 3293 - RNA, 74 nt, synthetic construct
  source 1..74: mol_type = other RNA
  modified_base 1: mod_base = OTHER; note = Adenosine phosphorothiorate
  modified_base 2: mod_base = OTHER; note = Cytosine phosphorothiorate
  modified_base 3: mod_base = OTHER; note = Cytosine phosphorothiorate
  modified_base 4: mod_base = OTHER; note = Uridine phosphorothiorate
  modified_base 6: mod_base = OTHER; note = Guanosine phosphorothiorate
  modified_base 8: mod_base = OTHER; note = Guanosine phosphorothiorate
  modified_base 9: mod_base = OTHER; note = 2'-fluoroguanosine
  modified_base 10: mod_base = OTHER; note = Cytosine phosphorothiorate
  modified_base 11: mod_base = OTHER; note = 2'-fluoroguanosine
  modified_base 12: mod_base = OTHER; note = 2'-Omethylcytosine phosphorothiorate
  modified_base 24: mod_base = OTHER; note = Guanosine phosphorothiorate
  modified_base 25: mod_base = OTHER; note = Uridine phosphorothiorate
  modified_base 27: mod_base = OTHER; note = 2'-Omethyluridine
  modified_base 35: mod_base = OTHER; note = 2'-fluoroguanosine phosphorothiorate
  modified_base 43: mod_base = OTHER; note = 2'-fluoroguanosine
  modified_base 48: mod_base = OTHER; note = 2'-fluorocytosine
  modified_base 51: mod_base = OTHER; note = 2'-fluoroguanosine
  modified_base 62: mod_base = OTHER; note = Guanosine phosphorothiorate
  modified_base 73: mod_base = OTHER; note = 2'-Omethylcytosine phosphorothiorate
  modified_base 74: mod_base = OTHER; note = 2'-fluoroadenosine
acctcgtggcgcaacggtagcgcgtctgactctagatcagaaggttgcgtgttcaaatcacgtcggggtcacca

SEQ ID NO: 3294 - RNA, 76 nt, synthetic construct; identical to SEQ ID NO: 625
  source 1..76: mol_type = other RNA
  modified_base 1: mod_base = OTHER; note = 2'-Omethylguanosine
  modified_base 10: mod_base = OTHER; note = 2'-Omethylguanosine
  modified_base 13: mod_base = OTHER; note = 2'-Omethylcytosine
  modified_base 17: mod_base = OTHER; note = Guanosine phosphorothiorate
  modified_base 18: mod_base = OTHER; note = 2'-Omethylguanosine
  modified_base 19: mod_base = OTHER; note = Adenosine phosphorothiorate
  modified_base 20: mod_base = OTHER; note = 2'-Omethyluridine
  modified_base 25: mod_base = OTHER; note = 2'-Omethylcytosine
  modified_base 29: mod_base = OTHER; note = 2'-Omethylguanosine
  modified_base 33: mod_base = OTHER; note = 2'-fluorouridine
  modified_base 35: mod_base = OTHER; note = Cytosine phosphorothiorate
  modified_base 37: mod_base = OTHER; note = Adenosine phosphorothiorate
  modified_base 38: mod_base = OTHER; note = Adenosine phosphorothiorate
  modified_base 41: mod_base = OTHER; note = 2'-Omethylcytosine
  modified_base 43: mod_base = OTHER; note = 2'-Omethyladenosine
  modified_base 44: mod_base = OTHER; note = 2'-fluoroadenosine
  modified_base 46: mod_base = OTHER; note = 2'-fluoroguanosine phosphorothiorate
  modified_base 50: mod_base = OTHER; note = 2'-Omethylcytosine
  modified_base 52: mod_base = OTHER; note = 2'-Omethylguanosine
  modified_base 54: mod_base = OTHER; note = Uridine phosphorothiorate
  modified_base 55: mod_base = OTHER; note = Uridine phosphorothiorate
  modified_base 56: mod_base = OTHER; note = 2'-Omethylcytosine
  modified_base 57: mod_base = OTHER; note = Guanosine phosphorothiorate
  modified_base 62: mod_base = OTHER; note = 2'-Omethylcytosine
  modified_base 63: mod_base = OTHER; note = 2'-fluorocytosine
  modified_base 65: mod_base = OTHER; note = 2'-Omethylguanosine
  modified_base 71: mod_base = OTHER; note = 2'-Omethyluridine
  modified_base 73: mod_base = OTHER; note = 2'-Omethylguanosine

SEQ ID NO: 3295 - RNA, 76 nt, synthetic construct
  source 1..76: mol_type = other RNA
  modified_base 1: mod_base = OTHER; note = 2'-Omethylcytosine phosphorothiorate
  modified_base 2: mod_base = OTHER; note = 2'-Omethylcytosine phosphorothiorate
  modified_base 3: mod_base = OTHER; note = 2'-fluorouridine
  modified_base 6: mod_base = OTHER; note = 2'-fluoroguanosine phosphorothiorate
  modified_base 8: mod_base = OTHER; note = 2'-fluorouridine
  modified_base 9: mod_base = OTHER; note = Adenosine phosphorothiorate
  modified_base 17: mod_base = OTHER; note = 2'-fluorouridine phosphorothiorate
  modified_base 21: mod_base = OTHER; note = 2'-Omethyladenosine
  modified_base 26: mod_base = OTHER; note = 2'-fluoroguanosine
  modified_base 27: mod_base = OTHER; note = 2'-Omethylguanosine phosphorothiorate
  modified_base 28: mod_base = OTHER; note = 2'-fluoroadenosine phosphorothiorate
  modified_base 29: mod_base = OTHER; note = 2'-fluoroguanosine phosphorothiorate
  modified_base 30: mod_base = OTHER; note = 2'-fluoroguanosine phosphorothiorate
  modified_base 31: mod_base = OTHER; note = 2'-Omethyladenosine phosphorothiorate
  modified_base 35: mod_base = OTHER; note = 2'-fluorouridine
  modified_base 39: mod_base = OTHER; note = 2'-fluorouridine
  modified_base 45: mod_base = OTHER; note = Guanosine phosphorothiorate
  modified_base 49: mod_base = OTHER; note = 2'-Omethylguanosine
  modified_base 52: mod_base = OTHER; note = 2'-Omethylguanosine
  modified_base 54: mod_base = OTHER; note = Uridine phosphorothiorate
  modified_base 74: mod_base = OTHER; note = 2'-fluorocytosine
  modified_base 75: mod_base = OTHER; note = Cytosine phosphorothiorate
  modified_base 76: mod_base = OTHER; note = 2'-Omethyladenosine
ccttcgatagctcagttggtagagcggaggactttagatccttaggtcgctggttcgaatccggctcgaaggacca

SEQ ID NO: 3296 - RNA, 76 nt, synthetic construct
  source 1..76: mol_type = other RNA
ggctctgtggcgcaatggatagcgcattggacttcaaattcaaaggttgtgggttcgagtccctccagagtcgcca

SEQ ID NO: 3297 - RNA, 85 nt, synthetic construct
  source 1..85: mol_type = other RNA
  modified_base 1: mod_base = OTHER; note = 2'-Omethylguanosine
  modified_base 28: mod_base = OTHER; note = 2'-Omethyluridine
  modified_base 29: mod_base = OTHER; note = 2'-Omethylguanosine
  modified_base 30: mod_base = OTHER; note = 2'-Omethylguanosine
  modified_base 40: mod_base = OTHER; note = 2'-fluorocytosine
  modified_base 41: mod_base = OTHER; note = 2'-fluorocytosine
  modified_base 42: mod_base = OTHER; note = 2'-Omethyladenosine phosphorothiorate
  modified_base 43: mod_base = OTHER; note = 2'-Omethyladenosine
  modified_base 82: mod_base = OTHER; note = 2'-Omethylguanosine
gctgtgatggccgagtggttaaggcgttggacttcaaatccaatggggtctccccgcgcaggttcgaatcctgctcacagcgcca

SEQ ID NO: 3298 - RNA, 76 nt, synthetic construct; identical to SEQ ID NO: 625
  source 1..76: mol_type = other RNA
  modified_base 1: mod_base = OTHER; note = 2'-Omethylguanosine
  modified_base 2: mod_base = OTHER; note = 2'-Omethylguanosine
  modified_base 3: mod_base = OTHER; note = 2'-Omethylcytosine
  modified_base 4: mod_base = OTHER; note = 2'-Omethyluridine
  modified_base 5: mod_base = OTHER; note = 2'-Omethylcytosine
  modified_base 6: mod_base = OTHER; note = 2'-Omethylcytosine
  modified_base 10: mod_base = OTHER; note = 2'-Omethylguanosine
  modified_base 11: mod_base = OTHER; note = 2'-Omethylcytosine
  modified_base 12: mod_base = OTHER; note = 2'-Omethylguanosine
  modified_base 13: mod_base = OTHER; note = 2'-Omethylcytosine
  modified_base 14: mod_base = OTHER; note = 2'-Omethyladenosine
  modified_base 15: mod_base = OTHER; note = 2'-fluoroadenosine
  modified_base 16: mod_base = OTHER; note = 2'-Omethyluridine
  modified_base 17: mod_base = OTHER; note = 2'-Omethylguanosine
  modified_base 18: mod_base = OTHER; note = 2'-Omethylguanosine
  modified_base 19: mod_base = OTHER; note = 2'-fluoroadenosine
  modified_base 20: mod_base = OTHER; note = 2'-Omethyluridine
  modified_base 21: mod_base = OTHER; note = 2'-fluoroadenosine
  modified_base 22: mod_base = OTHER; note = 2'-Omethylguanosine
  modified_base 23: mod_base = OTHER; note = 2'-Omethylcytosine
  modified_base 24: mod_base = OTHER; note = 2'-Omethylguanosine
  modified_base 25: mod_base = OTHER; note = 2'-Omethylcytosine
  modified_base 38: mod_base = OTHER; note = Adenosine phosphorothiorate
  modified_base 39: mod_base = OTHER; note = Uridine phosphorothiorate
  modified_base 40: mod_base = OTHER; note = 2'-fluorouridine
  modified_base 43: mod_base = OTHER; note = 2'-Omethyladenosine
  modified_base 44: mod_base = OTHER; note = 2'-Omethyladenosine
  modified_base 45: mod_base = OTHER; note = 2'-Omethylguanosine
  modified_base 46: mod_base = OTHER; note = 2'-fluoroguanosine
  modified_base 48: mod_base = OTHER; note = 2'-fluorouridine
  modified_base 49: mod_base = OTHER; note = 2'-Omethylcytosine
  modified_base 50: mod_base = OTHER; note = 2'-Omethylcytosine
  modified_base 51: mod_base = OTHER; note = 2'-Omethylguanosine
  modified_base 52: mod_base = OTHER; note = 2'-Omethylguanosine
  modified_base 53: mod_base = OTHER; note = 2'-Omethylguanosine
  modified_base 54: mod_base = OTHER; note = 2'-Omethyluridine
  modified_base 61: mod_base = OTHER; note = 2'-Omethylcytosine
  modified_base 62: mod_base = OTHER; note = 2'-Omethylcytosine
  modified_base 63: mod_base = OTHER; note = 2'-fluorocytosine
  modified_base 64: mod_base = OTHER; note = 2'-Omethylguanosine
  modified_base 65: mod_base = OTHER; note = 2'-Omethylguanosine
  modified_base 66: mod_base = OTHER; note = 2'-Omethylcytosine
  modified_base 67: mod_base = OTHER; note = 2'-Omethylguanosine
  modified_base 68: mod_base = OTHER; note = 2'-Omethylguanosine
  modified_base 69: mod_base = OTHER; note = 2'-fluoroadenosine

SEQ ID NO: 3299 - RNA, 75 nt, synthetic construct
  source 1..75: mol_type = other RNA
  modified_base 1: mod_base = OTHER; note = 2'-Omethylcytosine
  modified_base 3: mod_base = OTHER; note = 2'-Omethyluridine phosphorothiorate
  modified_base 4: mod_base = OTHER; note = Guanosine phosphorothiorate
  modified_base 7: mod_base = OTHER; note = Uridine phosphorothiorate
  modified_base 13: mod_base = OTHER; note = 2'-fluoroadenosine
  modified_base 20: mod_base = OTHER; note = 2'-fluoroadenosine
  modified_base 26: mod_base = OTHER; note = 2'-fluorouridine
  modified_base 27: mod_base = OTHER; note = 2'-fluorocytosine phosphorothiorate
  modified_base 36: mod_base = OTHER; note = 2'-fluoroadenosine phosphorothiorate
  modified_base 40: mod_base = OTHER; note = 2'-Omethyluridine
  modified_base 41: mod_base = OTHER; note = 2'-Omethylguanosine phosphorothiorate
  modified_base 46: mod_base = OTHER; note = 2'-fluorouridine
  modified_base 47: mod_base = OTHER; note = 2'-fluorocytosine
  modified_base 48: mod_base = OTHER; note = 2'-Omethylcytosine phosphorothiorate
  modified_base 49: mod_base = OTHER; note = 2'-fluoroadenosine
  modified_base 53: mod_base = OTHER; note = 2'-fluorouridine
  modified_base 60: mod_base = OTHER; note = 2'-fluorocytosine phosphorothiorate
  modified_base 63: mod_base = OTHER; note = 2'-Omethyluridine phosphorothiorate
  modified_base 70: mod_base = OTHER; note = Guanosine phosphorothiorate
  modified_base 73: mod_base = OTHER; note = Cytosine phosphorothiorate
  modified_base 74: mod_base = OTHER; note = 2'-Omethylcytosine
cctgggtagctcagtcggtagagcatcagactttaaatctgagggtccagggttcaagtccctgtccaggcgcca

SEQ ID NO: 3300 - RNA, 76 nt, synthetic construct; identical to SEQ ID NO: 625
  source 1..76: mol_type = other RNA
  modified_base 1: mod_base = OTHER; note = 2'-Omethylguanosine
  modified_base 2: mod_base = OTHER; note = 2'-fluoroguanosine
  modified_base 3: mod_base = OTHER; note = 2'-Omethylcytosine
  modified_base 4: mod_base = OTHER; note = 2'-fluorouridine
  modified_base 6: mod_base = OTHER; note = 2'-Omethylcytosine
  modified_base 10: mod_base = OTHER; note = 2'-Omethylguanosine
  modified_base 11: mod_base = OTHER; note = 2'-Omethylcytosine
  modified_base 13: mod_base = OTHER; note = 2'-Omethylcytosine
  modified_base 14: mod_base = OTHER; note = 2'-Omethyladenosine
  modified_base 18: mod_base = OTHER; note = 2'-Omethylguanosine
  modified_base 24: mod_base = OTHER; note = 2'-Omethylguanosine phosphorothiorate
  modified_base 25: mod_base = OTHER; note = 2'-Omethylcytosine phosphorothiorate
  modified_base 26: mod_base = OTHER; note = 2'-fluoroadenosine
  modified_base 27: mod_base = OTHER; note = Uridine phosphorothiorate
  modified_base 28: mod_base = OTHER; note = 2'-Omethyluridine
  modified_base 34: mod_base = OTHER; note = 2'-Omethyluridine
  modified_base 40: mod_base = OTHER; note = 2'-Omethyluridine
  modified_base 42: mod_base = OTHER; note = 2'-fluoroadenosine
  modified_base 44: mod_base = OTHER; note = Adenosine phosphorothiorate
  modified_base 45: mod_base = OTHER; note = 2'-fluoroguanosine
  modified_base 49: mod_base = OTHER; note = 2'-Omethylcytosine
  modified_base 50: mod_base = OTHER; note = 2'-Omethylcytosine
  modified_base 56: mod_base = OTHER; note = 2'-fluorocytosine
  modified_base 57: mod_base = OTHER; note = 2'-Omethylguanosine
  modified_base 59: mod_base = OTHER; note = Guanosine phosphorothiorate
  modified_base 60: mod_base = OTHER; note = 2'-fluorouridine phosphorothiorate
  modified_base 61: mod_base = OTHER; note = 2'-fluorocytosine
  modified_base 62: mod_base = OTHER; note = 2'-Omethylcytosine
  modified_base 63: mod_base = OTHER; note = 2'-Omethylcytosine
  modified_base 65: mod_base = OTHER; note = 2'-Omethylguanosine
  modified_base 69: mod_base = OTHER; note = 2'-Omethyladenosine
  modified_base 71: mod_base = OTHER; note = Uridine phosphorothiorate
  modified_base 72: mod_base = OTHER; note = 2'-fluorocytosine
  modified_base 73: mod_base = OTHER; note = Guanosine phosphorothiorate
  modified_base 74: mod_base = OTHER; note = 2'-Omethylcytosine
  modified_base 76: mod_base = OTHER; note = 2'-Omethyladenosine

SEQ ID NO: 3301 - RNA, 85 nt, synthetic construct
  source 1..85: mol_type = other RNA
  modified_base 1: mod_base = OTHER; note = 2'-Omethylguanosine phosphorothiorate
  modified_base 2: mod_base = OTHER; note = 2'-Omethylcytosine
  modified_base 5: mod_base = OTHER; note = 2'-Omethyluridine phosphorothiorate
  modified_base 13: mod_base = OTHER; note = 2'-fluoroguanosine
  modified_base 18: mod_base = OTHER; note = 2'-Omethylguanosine phosphorothiorate
  modified_base 23: mod_base = OTHER; note = Guanosine phosphorothiorate
  modified_base 24: mod_base = OTHER; note = 2'-fluoroguanosine
  modified_base 25: mod_base = OTHER; note = 2'-Omethylcytosine
  modified_base 36: mod_base = OTHER; note = Adenosine phosphorothiorate
  modified_base 40: mod_base = OTHER; note = Cytosine phosphorothiorate
  modified_base 42: mod_base = OTHER; note = 2'-fluoroadenosine
  modified_base 47: mod_base = OTHER; note = 2'-Omethylguanosine
  modified_base 48: mod_base = OTHER; note = 2'-fluoroguanosine
  modified_base 54: mod_base = OTHER; note = 2'-Omethylcytosine phosphorothiorate
  modified_base 56: mod_base = OTHER; note = Guanosine phosphorothiorate
  modified_base 57: mod_base = OTHER; note = Cytosine phosphorothiorate
  modified_base 59: mod_base = OTHER; note = 2'-Omethylcytosine
  modified_base 81: mod_base = OTHER; note = 2'-Omethylcytosine phosphorothiorate
gctgtgatggccgagtggttaaggcgttggactttaaatccaatggggtctccccgcgcaggttcgaatcctgctcacagcgcca

SEQ ID NO: 3302 - RNA, 76 nt, synthetic construct; identical to SEQ ID NO: 625
  source 1..76: mol_type = other RNA
  modified_base 1: mod_base = OTHER; note = 2'-Omethylguanosine
  modified_base 2: mod_base = OTHER; note = 2'-Omethylguanosine
  modified_base 3: mod_base = OTHER; note = 2'-Omethylcytosine
  modified_base 4: mod_base = OTHER; note = 2'-Omethyluridine
  modified_base 5: mod_base = OTHER; note = 2'-Omethylcytosine
  modified_base 6: mod_base = OTHER; note = 2'-Omethylcytosine
  modified_base 10: mod_base = OTHER; note = 2'-Omethylguanosine
  modified_base 11: mod_base = OTHER; note = 2'-Omethylcytosine
  modified_base 12: mod_base = OTHER; note = 2'-Omethylguanosine
  modified_base 13: mod_base = OTHER; note = 2'-Omethylcytosine
  modified_base 14: mod_base = OTHER; note = 2'-Omethyladenosine
  modified_base 15: mod_base = OTHER; note = 2'-fluoroadenosine
  modified_base 16: mod_base = OTHER; note = 2'-Omethyluridine
  modified_base 17: mod_base = OTHER; note = 2'-Omethylguanosine
  modified_base 18: mod_base = OTHER; note = 2'-Omethylguanosine
  modified_base 19: mod_base = OTHER; note = 2'-fluoroadenosine
  modified_base 22: mod_base = OTHER; note = 2'-Omethylguanosine
  modified_base 23: mod_base = OTHER; note = 2'-Omethylcytosine
  modified_base 24: mod_base = OTHER; note = 2'-Omethylguanosine
  modified_base 25: mod_base = OTHER; note = 2'-Omethylcytosine
  modified_base 28: mod_base = OTHER; note = 2'-Omethyluridine
  modified_base 30: mod_base = OTHER; note = 2'-Omethylguanosine
  modified_base 33: mod_base = OTHER; note = 2'-fluorouridine
  modified_base 35: mod_base = OTHER; note = Cytosine phosphorothiorate
  modified_base 37: mod_base = OTHER; note = Adenosine phosphorothiorate
  modified_base 38: mod_base = OTHER; note = Adenosine phosphorothiorate
  modified_base 41: mod_base = OTHER; note = 2'-Omethylcytosine
  modified_base 43: mod_base = OTHER; note = 2'-Omethyladenosine
  modified_base 44: mod_base = OTHER; note = 2'-fluoroadenosine
  modified_base 49: mod_base = OTHER; note = 2'-Omethylcytosine
  modified_base 50: mod_base = OTHER; note = 2'-Omethylcytosine
  modified_base 52: mod_base = OTHER; note = 2'-Omethylguanosine
  modified_base 53: mod_base = OTHER; note = 2'-Omethylguanosine
  modified_base 54: mod_base = OTHER; note = 2'-Omethyluridine
  modified_base 55: mod_base = OTHER; note = Uridine phosphorothiorate
  modified_base 56: mod_base = OTHER; note = 2'-Omethylcytosine
  modified_base 57: mod_base = OTHER; note = 2'-Omethylguanosine
  modified_base 59: mod_base = OTHER; note = 2'-Omethylguanosine
  modified_base 61: mod_base = OTHER; note = 2'-Omethylcytosine
  modified_base 62: mod_base = OTHER; note = 2'-Omethylcytosine
  modified_base 63: mod_base = OTHER; note = 2'-fluorocytosine
  modified_base 64: mod_base = OTHER; note = 2'-Omethylguanosine
  modified_base 65: mod_base = OTHER; note = 2'-Omethylguanosine
  modified_base 66: mod_base = OTHER; note = 2'-Omethylcytosine
  modified_base 67: mod_base = OTHER; note = 2'-Omethylguanosine
  modified_base 68: mod_base = OTHER; note = 2'-fluoroguanosine
  modified_base 73: mod_base = OTHER; note = 2'-Omethylguanosine
  modified_base 74: mod_base = OTHER; note = 2'-fluorocytosine phosphorothiorate
  modified_base 75: mod_base = OTHER; note = 2'-fluorocytosine phosphorothiorate

SEQ ID NO: 3303 - RNA, 75 nt, synthetic construct; identical to SEQ ID NO: 1045
  source 1..75: mol_type = other RNA
  modified_base 1: mod_base = OTHER; note = 2'-Omethylguanosine phosphorothiorate
  modified_base 2: mod_base = OTHER; note = 2'-Omethylguanosine phosphorothiorate
  modified_base 12: mod_base = OTHER; note = 2'-fluoroguanosine
  modified_base 19: mod_base = OTHER; note = 2'-Omethyluridine
  modified_base 20: mod_base = OTHER; note = 2'-fluoroadenosine
  modified_base 21: mod_base = OTHER; note = 2'-Omethyladenosine
  modified_base 22: mod_base = OTHER; note = Guanosine phosphorothiorate
  modified_base 42: mod_base = OTHER; note = 2'-fluoroadenosine
  modified_base 48: mod_base = OTHER; note = 2'-fluorocytosine
  modified_base 56: mod_base = OTHER; note = 2'-Omethylguanosine
  modified_base 65: mod_base = OTHER; note = Uridine phosphorothiorate
  modified_base 66: mod_base = OTHER; note = 2'-fluoroguanosine
  modified_base 73: mod_base = OTHER; note = 2'-fluorocytosine phosphorothiorate

SEQ ID NO: 3304 - RNA, 76 nt, synthetic construct; identical to SEQ ID NO: 625
  source 1..76: mol_type = other RNA
  modified_base 4: mod_base = OTHER; note = 2'-fluorouridine phosphorothiorate
  modified_base 5: mod_base = OTHER; note = 2'-Omethylcytosine
  modified_base 10: mod_base = OTHER; note = 2'-Omethylguanosine
  modified_base 11: mod_base = OTHER; note = 2'-fluorocytosine phosphorothiorate
  modified_base 12: mod_base = OTHER; note = 2'-fluoroguanosine
  modified_base 13: mod_base = OTHER; note = 2'-fluorocytosine
  modified_base 14: mod_base = OTHER; note = 2'-fluoroadenosine
  modified_base 16: mod_base = OTHER; note = 2'-Omethyluridine
  modified_base 18: mod_base = OTHER; note = 2'-fluoroguanosine phosphorothiorate
  modified_base 21: mod_base = OTHER; note = Adenosine phosphorothiorate
  modified_base 22: mod_base = OTHER; note = 2'-Omethylguanosine
  modified_base 24: mod_base = OTHER; note = 2'-fluoroguanosine phosphorothiorate
  modified_base 25: mod_base = OTHER; note = 2'-Omethylcytosine
  modified_base 27: mod_base = OTHER; note = 2'-Omethyluridine phosphorothiorate
  modified_base 29: mod_base = OTHER; note = 2'-fluoroguanosine phosphorothiorate
  modified_base 30: mod_base = OTHER; note = 2'-Omethylguanosine
  modified_base 33: mod_base = OTHER; note = Uridine phosphorothiorate
  modified_base 34: mod_base = OTHER; note = 2'-Omethyluridine
  modified_base 39: mod_base = OTHER; note = Uridine phosphorothiorate
  modified_base 41: mod_base = OTHER; note = Cytosine phosphorothiorate
  modified_base 42: mod_base = OTHER; note = 2'-fluoroadenosine
  modified_base 49: mod_base = OTHER; note = 2'-Omethylcytosine
  modified_base 50: mod_base = OTHER; note = 2'-Omethylcytosine
  modified_base 51: mod_base = OTHER; note = Guanosine phosphorothiorate
  modified_base 52: mod_base = OTHER; note = 2'-Omethylguanosine
  modified_base 53: mod_base = OTHER; note = Guanosine phosphorothiorate
  modified_base 54: mod_base = OTHER; note = 2'-Omethyluridine
  modified_base 56: mod_base = OTHER; note = 2'-fluorocytosine
  modified_base 60: mod_base = OTHER; note = 2'-fluorouridine
  modified_base 64: mod_base = OTHER; note = 2'-fluoroguanosine
  modified_base 65: mod_base = OTHER; note = Guanosine phosphorothiorate
  modified_base 70: mod_base = OTHER; note = Guanosine phosphorothiorate
  modified_base 72: mod_base = OTHER; note = 2'-Omethylcytosine
  modified_base 73: mod_base = OTHER; note = 2'-fluoroguanosine

SEQ ID NO: 3305 - RNA, 74 nt, synthetic construct; identical to SEQ ID NO: 766
  source 1..74: mol_type = other RNA
  modified_base 1: mod_base = OTHER; note = 2'-Omethylguanosine phosphorothiorate
  modified_base 2: mod_base = OTHER; note = 2'-Omethylguanosine
  modified_base 3: mod_base = OTHER; note = 2'-Omethylcytosine
  modified_base 4: mod_base = OTHER; note = 2'-Omethyluridine
  modified_base 5: mod_base = OTHER; note = 2'-Omethylcytosine
  modified_base 6: mod_base = OTHER; note = 2'-Omethylcytosine
  modified_base 49: mod_base = OTHER; note = 2'-Omethylcytosine
  modified_base 50: mod_base = OTHER; note = 2'-Omethylcytosine
  modified_base 51: mod_base = OTHER; note = 2'-Omethylguanosine
  modified_base 52: mod_base = OTHER; note = 2'-Omethylguanosine
  modified_base 53: mod_base = OTHER; note = 2'-Omethylguanosine
  modified_base 61: mod_base = OTHER; note = 2'-Omethylcytosine
  modified_base 62: mod_base = OTHER; note = 2'-Omethylcytosine
  modified_base 63: mod_base = OTHER; note = 2'-fluorocytosine
  modified_base 64: mod_base = OTHER; note = 2'-Omethylguanosine
  modified_base 65: mod_base = OTHER; note = 2'-Omethylguanosine
  modified_base 66: mod_base = OTHER; note = 2'-Omethylcytosine
  modified_base 67: mod_base = OTHER; note = 2'-Omethylguanosine
  modified_base 68: mod_base = OTHER; note = 2'-Omethylguanosine
  modified_base 69: mod_base = OTHER; note = 2'-fluoroadenosine
  modified_base 71: mod_base = OTHER; note = 2'-Omethyluridine
  modified_base 72: mod_base = OTHER; note = 2'-Omethylcytosine
  modified_base 73: mod_base = OTHER; note = 2'-Omethylguanosine phosphorothiorate

SEQ ID NO: 3306 - RNA, 75 nt, synthetic construct
  source 1..75: mol_type = other RNA
  modified_base 1: mod_base = OTHER; note = 2'-Omethylguanosine phosphorothiorate
  modified_base 2: mod_base = OTHER; note = 2'-Omethyladenosine
  modified_base 3: mod_base = OTHER; note = 2'-Omethylcytosine
  modified_base 4: mod_base = OTHER; note = 2'-Omethylcytosine
  modified_base 5: mod_base = OTHER; note = 2'-Omethyluridine
  modified_base 6: mod_base = OTHER; note = 2'-Omethylcytosine
  modified_base 16: mod_base = OTHER; note = 2'-Omethylcytosine
  modified_base 17: mod_base = OTHER; note = 2'-Omethylguanosine
  modified_base 18: mod_base = OTHER; note = 2'-Omethylguanosine
  modified_base 53: mod_base = OTHER; note = 2'-Omethyluridine phosphorothiorate
  modified_base 54: mod_base = OTHER; note = Uridine phosphorothiorate
  modified_base 55: mod_base = OTHER; note = 2'-Omethylcytosine
  modified_base 56: mod_base = OTHER; note = 2'-fluoroadenosine
  modified_base 58: mod_base = OTHER; note = 2'-Omethyladenosine
  modified_base 72: mod_base = OTHER; note = 2'-Omethyladenosine
gacctcgtggcgcaacggtagcgcgtctgactctagatcagaaggttgcgtgttcaaatcacgtcggggtcacca

SEQ ID NO: 3307 - RNA, 85 nt, synthetic construct; identical to SEQ ID NO: 3301
  source 1..85: mol_type = other RNA
  modified_base 1: mod_base = OTHER; note = 2'-Omethylguanosine phosphorothiorate
  modified_base 2: mod_base = OTHER; note = 2'-Omethylcytosine
  modified_base 3: mod_base = OTHER; note = 2'-Omethyluridine
  modified_base 5: mod_base = OTHER; note = 2'-Omethyluridine phosphorothiorate
  modified_base 13: mod_base = OTHER; note = 2'-fluoroguanosine
  modified_base 14: mod_base = OTHER; note = 2'-fluoroadenosine phosphorothiorate
  modified_base 18: mod_base = OTHER; note = 2'-Omethylguanosine phosphorothiorate
  modified_base 27: mod_base = OTHER; note = Uridine phosphorothiorate
  modified_base 34: mod_base = OTHER; note = 2'-fluorouridine
  modified_base 35: mod_base = OTHER; note = 2'-fluorouridine
  modified_base 36: mod_base = OTHER; note = 2'-Omethyladenosine
  modified_base 44: mod_base = OTHER; note = 2'-Omethyluridine
  modified_base 46: mod_base = OTHER; note = 2'-Omethylguanosine
  modified_base 56: mod_base = OTHER; note = 2'-fluoroguanosine
  modified_base 57: mod_base = OTHER; note = 2'-fluorocytosine
  modified_base 61: mod_base = OTHER; note = 2'-Omethylguanosine
  modified_base 62: mod_base = OTHER; note = Guanosine phosphorothiorate
  modified_base 79: mod_base = OTHER; note = 2'-fluoroadenosine
  modified_base 82: mod_base = OTHER; note = Guanosine phosphorothiorate
  modified_base 83: mod_base = OTHER; note = 2'-fluorocytosine phosphorothiorate

SEQ ID NO: 3308 - RNA, 75 nt, synthetic construct; identical to SEQ ID NO: 3299
  source 1..75: mol_type = other RNA
  modified_base 10: mod_base = OTHER; note = 2'-Omethylcytosine phosphorothiorate
  modified_base 14: mod_base = OTHER; note = 2'-fluoroguanosine
  modified_base 16: mod_base = OTHER; note = 2'-fluorocytosine
  modified_base 20: mod_base = OTHER; note = 2'-fluoroadenosine
  modified_base 21: mod_base = OTHER; note = 2'-Omethylguanosine
  modified_base 22: mod_base = OTHER; note = 2'-fluoroadenosine phosphorothiorate
  modified_base 30: mod_base = OTHER; note = Adenosine phosphorothiorate
  modified_base 34: mod_base = OTHER; note = 2'-fluorouridine
  modified_base 37: mod_base = OTHER; note = 2'-Omethyladenosine
  modified_base 38: mod_base = OTHER; note = 2'-Omethyluridine phosphorothiorate
  modified_base 39: mod_base = OTHER; note = 2'-Omethylcytosine
  modified_base 46: mod_base = OTHER; note = 2'-fluorouridine
  modified_base 54: mod_base = OTHER; note = 2'-fluorouridine
  modified_base 56: mod_base = OTHER; note = 2'-fluoroadenosine
  modified_base 71: mod_base = OTHER; note = 2'-Omethylcytosine
  modified_base 74: mod_base = OTHER; note = Cytosine phosphorothiorate

SEQ ID NO: 3309 - RNA, 76 nt, synthetic construct; identical to SEQ ID NO: 3295
  source 1..76: mol_type = other RNA
  modified_base 1: mod_base = OTHER; note = 2'-Omethylcytosine
  modified_base 2: mod_base = OTHER; note = 2'-Omethylcytosine
  modified_base 9: mod_base = OTHER; note = 2'-fluoroadenosine phosphorothiorate
  modified_base 10: mod_base = OTHER; note = 2'-fluoroguanosine phosphorothiorate
  modified_base 11: mod_base = OTHER; note = Cytosine phosphorothiorate
  modified_base 28: mod_base = OTHER; note = 2'-Omethyladenosine
  modified_base 34: mod_base = OTHER; note = 2'-Omethyluridine phosphorothiorate
  modified_base 74: mod_base = OTHER; note = Cytosine phosphorothiorate
  modified_base 76: mod_base = OTHER; note = 2'-Omethyladenosine

SEQ ID NO: 3310 - RNA, 85 nt, synthetic construct
  source 1..85: mol_type = other RNA
  modified_base 1: mod_base = OTHER; note = 2'-fluorocytosine phosphorothiorate
  modified_base 11: mod_base = OTHER; note = Cytosine phosphorothiorate
  modified_base 22: mod_base = OTHER; note = 2'-fluoroguanosine
  modified_base 42: mod_base = OTHER; note = 2'-Omethyladenosine
  modified_base 50: mod_base = OTHER; note = Adenosine phosphorothiorate
  modified_base 55: mod_base = OTHER; note = 2'-Omethylcytosine
  modified_base 58: mod_base = OTHER; note = Guanosine phosphorothiorate
  modified_base 84: mod_base = OTHER; note = 2'-fluorocytosine
ccaggatggccgagtggttaaggcgttggactctagatccaatggacatatgtccgcgtgggttcgaaccccactcctggtacca

SEQ ID NO: 3311 - RNA, 75 nt, synthetic construct
  source 1..75: mol_type = other RNA
  modified_base 1: mod_base = OTHER; note = Guanosine phosphorothiorate
  modified_base 2: mod_base = OTHER; note = 2'-Omethylguanosine phosphorothiorate
  modified_base 13: mod_base = OTHER; note = Uridine phosphorothiorate
  modified_base 19: mod_base = OTHER; note = Uridine phosphorothiorate
  modified_base 20: mod_base = OTHER; note = 2'-fluoroadenosine
  modified_base 36: mod_base = OTHER; note = 2'-fluoroadenosine
  modified_base 42: mod_base = OTHER; note = 2'-fluoroadenosine
  modified_base 45: mod_base = OTHER; note = 2'-fluoroguanosine
  modified_base 51: mod_base = OTHER; note = Adenosine phosphorothiorate
  modified_base 59: mod_base = OTHER; note = 2'-fluorouridine
  modified_base 65: mod_base = OTHER; note = Uridine phosphorothiorate
  modified_base 66: mod_base = OTHER; note = 2'-fluoroguanosine
  modified_base 74: mod_base = OTHER; note = Cytosine phosphorothiorate
  modified_base 75: mod_base = OTHER; note = 2'-Omethyladenosine
ggttccatggtgtaatggtaagcactctggactctaaatccagcgatccgagttcgagtctcggtggaacctcca

SEQ ID NO: 3312 - RNA, 76 nt, synthetic construct; identical to SEQ ID NO: 625
  source 1..76: mol_type = other RNA
  modified_base 27: mod_base = OTHER; note = Thymine

SEQ ID NO: 3313 - RNA, 76 nt, synthetic construct; identical to SEQ ID NO: 625
  source 1..76: mol_type = other RNA
  modified_base 1: mod_base = OTHER; note = 2'-fluoroguanosine
  modified_base 2: mod_base = OTHER; note = Guanosine phosphorothiorate
  modified_base 3: mod_base = OTHER; note = 2'-Omethylcytosine
  modified_base 8: mod_base = OTHER; note = Uridine phosphorothiorate
  modified_base 9: mod_base = OTHER; note = Guanosine phosphorothiorate
  modified_base 10: mod_base = OTHER; note = 2'-Omethylguanosine
  modified_base 18: mod_base = OTHER; note = Guanosine phosphorothiorate
  modified_base 22: mod_base = OTHER; note = 2'-fluoroguanosine
  modified_base 27: mod_base = OTHER; note = 2'-fluorouridine
  modified_base 28: mod_base = OTHER; note = 2'-Omethyluridine
  modified_base 33: mod_base = OTHER; note = 2'-fluorouridine phosphorothiorate
  modified_base 38: mod_base = OTHER; note = 2'-fluoroadenosine
  modified_base 39: mod_base = OTHER; note = 2'-fluorouridine
  modified_base 43: mod_base = OTHER; note = 2'-Omethyladenosine
  modified_base 45: mod_base = OTHER; note = 2'-fluoroguanosine
  modified_base 46: mod_base = OTHER; note = 2'-fluoroguanosine
  modified_base 47: mod_base = OTHER; note = 2'-fluorouridine phosphorothiorate
  modified_base 48: mod_base = OTHER; note = 2'-fluorouridine
  modified_base 49: mod_base = OTHER; note = 2'-fluorocytosine
  modified_base 59: mod_base = OTHER; note = 2'-fluoroguanosine phosphorothiorate
  modified_base 60: mod_base = OTHER; note = 2'-Omethyluridine
  modified_base 64: mod_base = OTHER; note = 2'-Omethylguanosine phosphorothiorate
  modified_base 65: mod_base = OTHER; note = 2'-Omethylguanosine
  modified_base 67: mod_base = OTHER; note = 2'-fluoroguanosine phosphorothiorate
  modified_base 68: mod_base = OTHER; note = 2'-fluoroguanosine phosphorothiorate
  modified_base 69: mod_base = OTHER; note = 2'-fluoroadenosine
  modified_base 71: mod_base = OTHER; note = Uridine phosphorothiorate
  modified_base 72: mod_base = OTHER; note = Cytosine phosphorothiorate
  modified_base 73: mod_base = OTHER; note = 2'-Omethylguanosine
  modified_base 74: mod_base = OTHER; note = 2'-Omethylcytosine
  modified_base 75: mod_base = OTHER; note = 2'-Omethylcytosine
  modified_base 76: mod_base = OTHER; note = 2'-Omethyladenosine

SEQ ID NO: 3314 - RNA, 74 nt, synthetic construct; identical to SEQ ID NO: 3293
  source 1..74: mol_type = other RNA
  modified_base 6: mod_base = OTHER; note = 2'-fluoroguanosine
  modified_base 12: mod_base = OTHER; note = 2'-fluorocytosine
  modified_base 27: mod_base = OTHER; note = 2'-Omethyluridine
  modified_base 43: mod_base = OTHER; note = 2'-fluoroguanosine
  modified_base 46: mod_base = OTHER; note = 2'-fluorouridine
  modified_base 73: mod_base = OTHER; note = Cytosine phosphorothiorate

SEQ ID NO: 3315 - RNA, 85 nt, synthetic construct; identical to SEQ ID NO: 3301
  source 1..85: mol_type = other RNA
  modified_base 1: mod_base = OTHER; note = 2'-Omethylguanosine phosphorothiorate
  modified_base 2: mod_base = OTHER; note = Cytosine phosphorothiorate
  modified_base 3: mod_base = OTHER; note = 2'-Omethyluridine phosphorothiorate
  modified_base 4: mod_base = OTHER; note = 2'-Omethylguanosine phosphorothiorate
  modified_base 7: mod_base = OTHER; note = 2'-fluoroadenosine
  modified_base 15: mod_base = OTHER; note = 2'-Omethylguanosine phosphorothiorate
  modified_base 18: mod_base = OTHER; note = 2'-Omethylguanosine phosphorothiorate
  modified_base 20: mod_base = OTHER; note = 2'-Omethyluridine phosphorothiorate
  modified_base 24: mod_base = OTHER; note = 2'-Omethylguanosine phosphorothiorate
  modified_base 26: mod_base = OTHER; note = 2'-fluoroguanosine phosphorothiorate
  modified_base 27: mod_base = OTHER; note = 2'-Omethyluridine
  modified_base 33: mod_base = OTHER; note = 2'-fluorouridine phosphorothiorate
  modified_base 34: mod_base = OTHER; note = 2'-fluorouridine
  modified_base 44: mod_base = OTHER; note = 2'-Omethyluridine
  modified_base 46: mod_base = OTHER; note = 2'-Omethylguanosine
  modified_base 52: mod_base = OTHER; note = 2'-fluorocytosine
  modified_base 56: mod_base = OTHER; note = Guanosine phosphorothiorate
  modified_base 58: mod_base = OTHER; note = Guanosine phosphorothiorate
  modified_base 59: mod_base = OTHER; note = 2'-Omethylcytosine phosphorothiorate
  modified_base 61: mod_base = OTHER; note = 2'-Omethylguanosine
  modified_base 71: mod_base = OTHER; note = 2'-fluorocytosine
  modified_base 74: mod_base = OTHER; note = 2'-Omethylcytosine phosphorothiorate
  modified_base 84: mod_base = OTHER; note = 2'-Omethylcytosine phosphorothiorate

SEQ ID NO: 3316 - RNA, 76 nt, synthetic construct
  source 1..76: mol_type = other RNA
  modified_base 1: mod_base = OTHER; note = 2'-Omethyladenosine
  modified_base 61: mod_base = OTHER; note = 2'-Omethylcytosine
  modified_base 62: mod_base = OTHER; note = 2'-Omethylcytosine
  modified_base 64: mod_base = OTHER; note = 2'-Omethylguanosine
  modified_base 65: mod_base = OTHER; note = 2'-Omethylguanosine
  modified_base 66: mod_base = OTHER; note = 2'-Omethylcytosine
  modified_base 67: mod_base = OTHER; note = 2'-Omethylguanosine
  modified_base 68: mod_base = OTHER; note = 2'-Omethyluridine
  modified_base 69: mod_base = OTHER; note = 2'-Omethyluridine
  modified_base 70: mod_base = OTHER; note = 2'-fluoroguanosine
  modified_base 71: mod_base = OTHER; note = 2'-Omethylguanosine
  modified_base 72: mod_base = OTHER; note = 2'-Omethyluridine
  modified_base 73: mod_base = OTHER; note = 2'-Omethylguanosine
accaacgtggcgcaatggatagcgcattggacttcaaattcaaaggttccgggttcgagtcccggcgttggtgcca

SEQ ID NO: 3317 - RNA, 85 nt, synthetic construct
  source 1..85: mol_type = other RNA
  modified_base 1: mod_base = OTHER; note = 2'-Omethylguanosine phosphorothiorate
  modified_base 2: mod_base = OTHER; note = 2'-Omethylcytosine phosphorothiorate
  modified_base 19: mod_base = OTHER; note = 2'-Omethyluridine
  modified_base 26: mod_base = OTHER; note = 2'-Omethylguanosine phosphorothiorate
  modified_base 44: mod_base = OTHER; note = 2'-fluorouridine
  modified_base 45: mod_base = OTHER; note = 2'-Omethylguanosine
  modified_base 48: mod_base = OTHER; note = 2'-Omethylguanosine phosphorothiorate
  modified_base 61: mod_base = OTHER; note = Guanosine phosphorothiorate
  modified_base 80: mod_base = OTHER; note = 2'-Omethylguanosine
gctgtgatggccgagtggttaaggcgttggactctaaatccaatggggtctccccgcgcaggttcgaatcctgctcacagcgcca

SEQ ID NO: 3318 - RNA, 76 nt, synthetic construct
  source 1..76: mol_type = other RNA
  modified_base 1: mod_base = OTHER; note = 2'-Omethylcytosine phosphorothiorate
  modified_base 75: mod_base = OTHER; note = 2'-Omethylcytosine phosphorothiorate
ccttcgatagctcagttggtagagcggaggactctagatccttaggtcgctggttcgaatccggctcgaaggacca

SEQ ID NO: 3319 - RNA, 73 nt, synthetic construct; identical to SEQ ID NO: 935
  source 1..73: mol_type = other RNA
  modified_base 1: mod_base = OTHER; note = 2'-Omethylguanosine phosphorothiorate
  modified_base 2: mod_base = OTHER; note = 2'-Omethylguanosine
  modified_base 14: mod_base = OTHER; note = 2'-fluoroadenosine
  modified_base 20: mod_base = OTHER; note = 2'-fluorouridine
  modified_base 26: mod_base = OTHER; note = Adenosine phosphorothiorate
  modified_base 27: mod_base = OTHER; note = 2'-O-(2-Methoxyethyl) thymine
  modified_base 62: mod_base = OTHER; note = 2'-fluorocytosine
  modified_base 73: mod_base = OTHER; note = 2'-Omethylguanosine

SEQ ID NO: 3320 - RNA, 76 nt, synthetic construct; identical to SEQ ID NO: 625
  source 1..76: mol_type = other RNA
  modified_base 40: mod_base = OTHER; note = 2'-fluorouridine
  modified_base 41: mod_base = OTHER; note = 2'-fluorocytosine
  modified_base 42: mod_base = OTHER; note = 2'-fluoroadenosine
  modified_base 43: mod_base = OTHER; note = 2'-fluoroadenosine

SEQ ID NO: 3321 - RNA, 76 nt, synthetic construct
  source 1..76: mol_type = other RNA
ggctcccctgagcaatggatagctcattggacttcaaattcaaaggttccgggttcgagtcccgggggagtcgcca

SEQ ID NO: 3322 - RNA, 76 nt, synthetic construct; identical to SEQ ID NO: 625
  source 1..76: mol_type = other RNA
  modified_base 1: mod_base = OTHER; note = 2'-fluoroguanosine
  modified_base 3: mod_base = OTHER; note = Cytosine phosphorothiorate
  modified_base 4: mod_base = OTHER; note = 2'-fluorouridine
  modified_base 5: mod_base = OTHER; note = 2'-fluorocytosine
  modified_base 10: mod_base = OTHER; note = 2'-fluoroguanosine
  modified_base 11: mod_base = OTHER; note = Cytosine phosphorothiorate
  modified_base 12: mod_base = OTHER; note = Guanosine phosphorothiorate
  modified_base 15: mod_base = OTHER; note = 2'-Omethyladenosine
  modified_base 20: mod_base = OTHER; note = 2'-Omethyluridine
  modified_base 22: mod_base = OTHER; note = 2'-Omethylguanosine
  modified_base 23: mod_base = OTHER; note = Cytosine phosphorothiorate
  modified_base 24: mod_base = OTHER; note = 2'-fluoroguanosine phosphorothiorate
  modified_base 25: mod_base = OTHER; note = 2'-fluorocytosine phosphorothiorate
  modified_base 26: mod_base = OTHER; note = Adenosine phosphorothiorate
  modified_base 27: mod_base = OTHER; note = 2'-Omethyluridine phosphorothiorate
  modified_base 28: mod_base = OTHER; note = 2'-Omethyluridine
  modified_base 29: mod_base = OTHER; note = 2'-Omethylguanosine
  modified_base 34: mod_base = OTHER; note = 2'-fluorouridine
  modified_base 41: mod_base = OTHER; note = 2'-fluorocytosine
  modified_base 44: mod_base = OTHER; note = Adenosine phosphorothiorate
  modified_base 45: mod_base = OTHER; note = 2'-Omethylguanosine
  modified_base 48: mod_base = OTHER; note = 2'-Omethyluridine
  modified_base 49: mod_base = OTHER; note = Cytosine phosphorothiorate
  modified_base 50: mod_base = OTHER; note = 2'-fluorocytosine
  modified_base 53: mod_base = OTHER; note = 2'-fluoroguanosine
  modified_base 54: mod_base = OTHER; note = 2'-Omethyluridine phosphorothiorate
  modified_base 59: mod_base = OTHER; note = 2'-fluoroguanosine
  modified_base 61: mod_base = OTHER; note = Cytosine phosphorothiorate
  modified_base 62: mod_base = OTHER; note = 2'-fluorocytosine
  modified_base 66: mod_base = OTHER; note = 2'-fluorocytosine
  modified_base 70: mod_base = OTHER; note = 2'-Omethylguanosine
  modified_base 72: mod_base = OTHER; note = 2'-fluorocytosine phosphorothiorate
  modified_base 74: mod_base = OTHER; note = 2'-fluorocytosine
  modified_base 75: mod_base = OTHER; note = Cytosine phosphorothiorate

SEQ ID NO: 3323 - RNA, 76 nt, synthetic construct; identical to SEQ ID NO: 625
  source 1..76: mol_type = other RNA
  modified_base 1: mod_base = OTHER; note = 2'-Omethylguanosine
  modified_base 2: mod_base = OTHER; note = 2'-Omethylguanosine
  modified_base 3: mod_base = OTHER; note = 2'-Omethylcytosine
  modified_base 4: mod_base = OTHER; note = 2'-Omethyluridine
  modified_base 5: mod_base = OTHER; note = 2'-Omethylcytosine
  modified_base 6: mod_base = OTHER; note = 2'-Omethylcytosine
  modified_base 13: mod_base = OTHER; note = 2'-Omethylcytosine
  modified_base 14: mod_base = OTHER; note = 2'-Omethyladenosine
  modified_base 15: mod_base = OTHER; note = 2'-fluoroadenosine
  modified_base 16: mod_base = OTHER; note = 2'-Omethyluridine
  modified_base 17: mod_base = OTHER; note = 2'-Omethylguanosine
  modified_base 18: mod_base = OTHER; note = 2'-Omethylguanosine
  modified_base 19: mod_base = OTHER; note = 2'-fluoroadenosine
  modified_base 20: mod_base = OTHER; note = 2'-Omethyluridine
  modified_base 22: mod_base = OTHER; note = 2'-Omethylguanosine
  modified_base 23: mod_base = OTHER; note = 2'-Omethylcytosine
  modified_base 24: mod_base = OTHER; note = 2'-Omethylguanosine
  modified_base 25: mod_base = OTHER; note = 2'-Omethylcytosine
  modified_base 33: mod_base = OTHER; note = 2'-fluorouridine
  modified_base 35: mod_base = OTHER; note = Cytosine phosphorothiorate
  modified_base 37: mod_base = OTHER; note = Adenosine phosphorothiorate
  modified_base 38: mod_base = OTHER; note = Adenosine phosphorothiorate
  modified_base 52: mod_base = OTHER; note = 2'-Omethylguanosine
  modified_base 54: mod_base = OTHER; note = 2'-Omethyluridine
  modified_base 56: mod_base = OTHER; note = 2'-Omethylcytosine
  modified_base 57: mod_base = OTHER; note = 2'-Omethylguanosine
  modified_base 59: mod_base = OTHER; note = 2'-Omethylguanosine
  modified_base 62: mod_base = OTHER; note = 2'-Omethylcytosine
  modified_base 73: mod_base = OTHER; note = 2'-Omethylguanosine
  modified_base 75: mod_base = OTHER; note = 2'-fluorocytosine phosphorothiorate

SEQ ID NO: 3324 - RNA, 76 nt, synthetic construct; identical to SEQ ID NO: 625
  source 1..76: mol_type = other RNA
  modified_base 2: mod_base = OTHER; note = Guanosine phosphorothiorate
  modified_base 3: mod_base = OTHER; note = 2'-fluorocytosine
  modified_base 6: mod_base = OTHER; note = 2'-Omethylcytosine
  modified_base 10: mod_base = OTHER; note = 2'-fluoroguanosine
  modified_base 18: mod_base = OTHER; note = 2'-Omethylguanosine
  modified_base 24: mod_base = OTHER; note = 2'-fluoroguanosine
  modified_base 25: mod_base = OTHER; note = Cytosine phosphorothiorate
  modified_base 26: mod_base = OTHER; note = 2'-Omethyladenosine
  modified_base 31: mod_base = OTHER; note = 2'-Omethyladenosine
  modified_base 33: mod_base = OTHER; note = Uridine phosphorothiorate
  modified_base 34: mod_base = OTHER; note = Uridine phosphorothiorate
  modified_base 38: mod_base = OTHER; note = 2'-fluoroadenosine
  modified_base 39: mod_base = OTHER; note = 2'-fluorouridine phosphorothiorate
  modified_base 40: mod_base = OTHER; note = Uridine phosphorothiorate
  modified_base 41: mod_base = OTHER; note = 2'-Omethylcytosine phosphorothiorate
  modified_base 42: mod_base = OTHER; note = 2'-Omethyladenosine phosphorothiorate
  modified_base 43: mod_base = OTHER; note = 2'-Omethyladenosine
  modified_base 44: mod_base = OTHER; note = 2'-fluoroadenosine
  modified_base 45: mod_base = OTHER; note = Guanosine phosphorothiorate
  modified_base 48: mod_base = OTHER; note = 2'-fluorouridine
  modified_base 49: mod_base = OTHER; note = 2'-Omethylcytosine phosphorothiorate
  modified_base 50: mod_base = OTHER; note = 2'-Omethylcytosine
  modified_base 52: mod_base = OTHER; note = Guanosine phosphorothiorate
  modified_base 54: mod_base = OTHER; note = 2'-Omethyluridine phosphorothiorate
  modified_base 56: mod_base = OTHER; note = Cytosine phosphorothiorate
  modified_base 57: mod_base = OTHER; note = 2'-Omethylguanosine
  modified_base 58: mod_base = OTHER; note = 2'-fluoroadenosine
  modified_base 60: mod_base = OTHER; note = 2'-fluorouridine
  modified_base 63: mod_base = OTHER; note = 2'-Omethylcytosine
  modified_base 68: mod_base = OTHER; note = 2'-fluoroguanosine
  modified_base 69: mod_base = OTHER; note = Adenosine phosphorothiorate
  modified_base 70: mod_base = OTHER; note = 2'-Omethylguanosine
  modified_base 71: mod_base = OTHER; note = 2'-Omethyluridine
  modified_base 74: mod_base = OTHER; note = Cytosine phosphorothiorate
  modified_base 75: mod_base = OTHER; note = 2'-Omethylcytosine

SEQ ID NO: 3325 - RNA, 76 nt, synthetic construct
  source 1..76: mol_type = other RNA
  modified_base 1: mod_base = OTHER; note = 2'-Omethyluridine
  modified_base 2: mod_base = OTHER; note = 2'-Omethyladenosine
  modified_base 3: mod_base = OTHER; note = 2'-Omethylcytosine
  modified_base 4: mod_base = OTHER; note = 2'-Omethyladenosine
  modified_base 5: mod_base = OTHER; note = 2'-Omethylcytosine
  modified_base 6: mod_base = OTHER; note = 2'-Omethylcytosine
  modified_base 14: mod_base = OTHER; note = 2'-Omethyladenosine
  modified_base 17: mod_base = OTHER; note = 2'-Omethylguanosine
  modified_base 18: mod_base = OTHER; note = 2'-Omethylguanosine
  modified_base 20: mod_base = OTHER; note = 2'-Omethyluridine
  modified_base 22: mod_base = OTHER; note = 2'-Omethylguanosine
  modified_base 25: mod_base = OTHER; note = 2'-Omethylcytosine
  modified_base 27: mod_base = OTHER; note = 2'-Omethyluridine
  modified_base 33: mod_base = OTHER; note = 2'-fluorouridine
  modified_base 71: mod_base = OTHER; note = 2'-Omethyluridine
  modified_base 73: mod_base = OTHER; note = 2'-Omethylguanosine
tacaccgtggcgcaatggatagcgcattggacttcaaattcaaaggttccgggttcgagtcccggcggtgtagcca

SEQ ID NO: 3326 - RNA, 76 nt, synthetic construct; identical to SEQ ID NO: 625
  source 1..76: mol_type = other RNA
  modified_base 1: mod_base = OTHER; note = 2'-Omethylguanosine
  modified_base 3: mod_base = OTHER; note = 2'-fluorocytosine phosphorothiorate
  modified_base 5: mod_base = OTHER; note = 2'-Omethylcytosine
  modified_base 8: mod_base = OTHER; note = Uridine phosphorothiorate
  modified_base 10: mod_base = OTHER; note = 2'-fluoroguanosine
  modified_base 11: mod_base = OTHER; note = 2'-fluorocytosine
  modified_base 15: mod_base = OTHER; note = 2'-Omethyladenosine
  modified_base 16: mod_base = OTHER; note = 2'-fluorouridine
  modified_base 19: mod_base = OTHER; note = Adenosine phosphorothiorate
  modified_base 20: mod_base = OTHER; note = 2'-Omethyluridine
  modified_base 22: mod_base = OTHER; note = 2'-Omethylguanosine
  modified_base 23: mod_base = OTHER; note = 2'-fluorocytosine
  modified_base 25: mod_base = OTHER; note = Cytosine phosphorothiorate
  modified_base 26: mod_base = OTHER; note = 2'-fluoroadenosine
  modified_base 27: mod_base = OTHER; note = 2'-fluorouridine
  modified_base 28: mod_base = OTHER; note = 2'-fluorouridine phosphorothiorate
  modified_base 30: mod_base = OTHER; note = 2'-fluoroguanosine phosphorothiorate
  modified_base 31: mod_base = OTHER; note = 2'-fluoroadenosine
  modified_base 33: mod_base = OTHER; note = 2'-fluorouridine
  modified_base 34: mod_base = OTHER; note = 2'-Omethyluridine
  modified_base 37: mod_base = OTHER; note = Adenosine phosphorothiorate
  modified_base 38: mod_base = OTHER; note = Adenosine phosphorothiorate
  modified_base 39: mod_base = OTHER; note = 2'-fluorouridine
  modified_base 41: mod_base = OTHER; note = 2'-Omethylcytosine
  modified_base 48: mod_base = OTHER; note = 2'-Omethyluridine
  modified_base 49: mod_base = OTHER; note = 2'-Omethylcytosine
  modified_base 50: mod_base = OTHER; note = 2'-fluorocytosine
  modified_base 52: mod_base = OTHER; note = 2'-fluoroguanosine
  modified_base 53: mod_base = OTHER; note = 2'-Omethylguanosine phosphorothiorate
  modified_base 54: mod_base = OTHER; note = Uridine phosphorothiorate
  modified_base 56: mod_base = OTHER; note = 2'-Omethylcytosine
  modified_base 59: mod_base = OTHER; note = 2'-Omethylguanosine
  modified_base 64: mod_base = OTHER; note = 2'-Omethylguanosine
  modified_base 65: mod_base = OTHER; note = 2'-fluoroguanosine
  modified_base 66: mod_base = OTHER; note = 2'-Omethylcytosine
  modified_base 69: mod_base = OTHER; note = 2'-Omethyladenosine
  modified_base 74: mod_base = OTHER; note = 2'-Omethylcytosine
  modified_base 75: mod_base = OTHER; note = Cytosine phosphorothiorate
  modified_base 76: mod_base = OTHER; note = 2'-Omethyladenosine

SEQ ID NO: 3327 - RNA, 75 nt, synthetic construct; identical to SEQ ID NO: 3299
  source 1..75: mol_type = other RNA
  modified_base 10: mod_base = OTHER; note = 2'-fluorocytosine phosphorothiorate
  modified_base 15: mod_base = OTHER; note = Uridine phosphorothiorate
  modified_base 18: mod_base = OTHER; note = 2'-Omethylguanosine phosphorothiorate
  modified_base 19: mod_base = OTHER; note = 2'-fluorouridine
  modified_base 22: mod_base = OTHER; note = 2'-fluoroadenosine phosphorothiorate
  modified_base 25: mod_base = OTHER; note = Adenosine phosphorothiorate
  modified_base 27: mod_base = OTHER; note = 2'-fluorocytosine phosphorothiorate
  modified_base 29: mod_base = OTHER; note = 2'-Omethylguanosine phosphorothiorate
  modified_base 37: mod_base = OTHER; note = 2'-Omethyladenosine
  modified_base 39: mod_base = OTHER; note = 2'-fluorocytosine
  modified_base 42: mod_base = OTHER; note = Adenosine phosphorothiorate
  modified_base 47: mod_base = OTHER; note = 2'-fluorocytosine
  modified_base 48: mod_base = OTHER; note = 2'-Omethylcytosine phosphorothiorate
  modified_base 50: mod_base = OTHER; note = 2'-fluoroguanosine
  modified_base 52: mod_base = OTHER; note = 2'-fluoroguanosine phosphorothiorate
  modified_base 64: mod_base = OTHER; note = 2'-fluoroguanosine
  modified_base 71: mod_base = OTHER; note = Cytosine phosphorothiorate
  modified_base 73: mod_base = OTHER; note = Cytosine phosphorothiorate
  modified_base 74: mod_base = OTHER; note = 2'-Omethylcytosine

SEQ ID NO: 3328 - RNA, 76 nt, synthetic construct; identical to SEQ ID NO: 3295
  source 1..76: mol_type = other RNA
  modified_base 1: mod_base = OTHER; note = 2'-Omethylcytosine
  modified_base 2: mod_base = OTHER; note = 2'-Omethylcytosine
  modified_base 9: mod_base = OTHER; note = 2'-fluoroadenosine
  modified_base 15: mod_base = OTHER; note = 2'-Omethylguanosine
  modified_base 23: mod_base = OTHER; note = 2'-fluoroadenosine phosphorothiorate
  modified_base 27: mod_base = OTHER; note = 2'-fluoroguanosine phosphorothiorate
  modified_base 43: mod_base = OTHER; note = 2'-Omethyluridine
  modified_base 52: mod_base = OTHER; note = 2'-fluoroguanosine phosphorothiorate
  modified_base 75: mod_base = OTHER; note = 2'-Omethylcytosine phosphorothiorate
  modified_base 76: mod_base = OTHER; note = 2'-fluoroadenosine

SEQ ID NO: 3329 - RNA, 76 nt, synthetic construct
  source 1..76: mol_type = other RNA
  modified_base 1: mod_base = OTHER; note = 2'-Omethylguanosine
  modified_base 2: mod_base = OTHER; note = 2'-Omethylguanosine
  modified_base 3: mod_base = OTHER; note = 2'-Omethylcytosine
  modified_base 4: mod_base = OTHER; note = 2'-Omethylcytosine
  modified_base 5: mod_base = OTHER; note = 2'-Omethylcytosine
  modified_base 6: mod_base = OTHER; note = 2'-Omethylcytosine
  modified_base 14: mod_base = OTHER; note = 2'-Omethyladenosine
  modified_base 15: mod_base = OTHER; note = 2'-Omethyladenosine
  modified_base 16: mod_base = OTHER; note = 2'-Omethyluridine
  modified_base 17: mod_base = OTHER; note = 2'-Omethylguanosine
  modified_base 18: mod_base = OTHER; note = 2'-Omethylguanosine
  modified_base 20: mod_base = OTHER; note = 2'-Omethyluridine
  modified_base 25: mod_base = OTHER; note = 2'-Omethylcytosine
  modified_base 41: mod_base = OTHER; note = 2'-Omethylcytosine
  modified_base 42: mod_base = OTHER; note = 2'-Omethyladenosine
  modified_base 43: mod_base = OTHER; note = 2'-Omethyladenosine
  modified_base 44: mod_base = OTHER; note = 2'-Omethyladenosine
  modified_base 49: mod_base = OTHER; note = 2'-Omethylcytosine
  modified_base 50: mod_base = OTHER; note = 2'-Omethylcytosine
  modified_base 52: mod_base = OTHER; note = 2'-Omethylguanosine
  modified_base 54: mod_base = OTHER; note = 2'-Omethyluridine
  modified_base 55: mod_base = OTHER; note = Uridine phosphorothiorate
  modified_base 56: mod_base = OTHER; note = 2'-Omethylcytosine
  modified_base 57: mod_base = OTHER; note = 2'-fluoroguanosine
  modified_base 59: mod_base = OTHER; note = 2'-Omethylguanosine
  modified_base 61: mod_base = OTHER; note = 2'-Omethylcytosine
  modified_base 62: mod_base = OTHER; note = 2'-Omethylcytosine
  modified_base 63: mod_base = OTHER; note = 2'-fluorocytosine
  modified_base 64: mod_base = OTHER; note = 2'-Omethylguanosine
  modified_base 65: mod_base = OTHER; note = 2'-Omethylguanosine
  modified_base 73: mod_base = OTHER; note = 2'-Omethylguanosine
ggccccatggcgcaatggatagcgcattggacttcaaattcaaaggttccgggttcgagtcccggtggggtcgcca

SEQ ID NO: 3330 - RNA, 74 nt, synthetic construct; identical to SEQ ID NO: 766
  source 1..74: mol_type = other RNA
  modified_base 1: mod_base = OTHER; note = 2'-Omethylguanosine phosphorothiorate
  modified_base 2: mod_base = OTHER; note = 2'-Omethylguanosine
  modified_base 3: mod_base = OTHER; note = 2'-Omethylcytosine
  modified_base 4: mod_base = OTHER; note = 2'-Omethyluridine
  modified_base 5: mod_base = OTHER; note = 2'-Omethylcytosine
  modified_base 6: mod_base = OTHER; note = 2'-Omethylcytosine
  modified_base 14: mod_base = OTHER; note = 2'-Omethyladenosine
  modified_base 15: mod_base = OTHER; note = 2'-Omethyladenosine
  modified_base 16: mod_base = OTHER; note = 2'-Omethyluridine
  modified_base 17: mod_base = OTHER; note = 2'-Omethylguanosine
  modified_base 18: mod_base = OTHER; note = 2'-Omethylguanosine
  modified_base 20: mod_base = OTHER; note = 2'-Omethyluridine
  modified_base 25: mod_base = OTHER; note = 2'-Omethylcytosine
  modified_base 33: mod_base = OTHER; note = 2'-fluorouridine
  modified_base 35: mod_base = OTHER; note = Cytosine phosphorothiorate
  modified_base 37: mod_base = OTHER; note = Adenosine phosphorothiorate
  modified_base 38: mod_base = OTHER; note = Adenosine phosphorothiorate
  modified_base 41: mod_base = OTHER; note = 2'-fluorocytosine
  modified_base 42: mod_base = OTHER; note = 2'-Omethyladenosine
  modified_base 43: mod_base = OTHER; note = 2'-Omethyladenosine
  modified_base 44: mod_base = OTHER; note = 2'-fluoroadenosine
  modified_base 49: mod_base = OTHER; note = 2'-Omethylcytosine
  modified_base 50: mod_base = OTHER; note = 2'-Omethylcytosine
  modified_base 52: mod_base = OTHER; note = 2'-Omethylguanosine
  modified_base 54: mod_base = OTHER; note = 2'-Omethyluridine
  modified_base 55: mod_base = OTHER; note = Uridine phosphorothiorate
  modified_base 56: mod_base = OTHER; note = 2'-Omethylcytosine
  modified_base 57: mod_base = OTHER; note = 2'-fluoroguanosine
  modified_base 59: mod_base = OTHER; note = 2'-Omethylguanosine
  modified_base 61: mod_base = OTHER; note = 2'-Omethylcytosine
  modified_base 62: mod_base = OTHER; note = 2'-Omethylcytosine
  modified_base 63: mod_base = OTHER; note = 2'-fluorocytosine
  modified_base 64: mod_base = OTHER; note = 2'-Omethylguanosine
  modified_base 65: mod_base = OTHER; note = 2'-Omethylguanosine
  modified_base 73: mod_base = OTHER; note = 2'-Omethylguanosine

SEQ ID NO: 3331 - RNA, 76 nt, synthetic construct; identical to SEQ ID NO: 625
  source 1..76: mol_type = other RNA
  modified_base 2: mod_base = OTHER; note = Guanosine phosphorothiorate
  modified_base 3: mod_base = OTHER; note = 2'-Omethylcytosine
  modified_base 4: mod_base = OTHER; note = 2'-Omethyluridine
  modified_base 5: mod_base = OTHER; note = 2'-fluorocytosine
  modified_base 6: mod_base = OTHER; note = 2'-fluorocytosine
  modified_base 8: mod_base = OTHER; note = Uridine phosphorothiorate
  modified_base 13: mod_base = OTHER; note = 2'-fluorocytosine
  modified_base 14: mod_base = OTHER; note = 2'-fluoroadenosine
  modified_base 19: mod_base = OTHER; note = Adenosine phosphorothiorate
  modified_base 20: mod_base = OTHER; note = 2'-Omethyluridine
  modified_base 25: mod_base = OTHER; note = 2'-fluorocytosine
  modified_base 26: mod_base = OTHER; note = Adenosine phosphorothiorate
  modified_base 27: mod_base = OTHER; note = 2'-Omethyluridine
  modified_base 29: mod_base = OTHER; note = 2'-Omethylguanosine
  modified_base 32: mod_base = OTHER; note = 2'-fluorocytosine
  modified_base 33: mod_base = OTHER; note = 2'-fluorouridine phosphorothiorate
  modified_base 34: mod_base = OTHER; note = Uridine phosphorothiorate
  modified_base 36: mod_base = OTHER; note = Adenosine phosphorothiorate
  modified_base 40: mod_base = OTHER; note = Uridine phosphorothiorate
  modified_base 44: mod_base = OTHER; note = 2'-fluoroadenosine
  modified_base 45: mod_base = OTHER; note = Guanosine phosphorothiorate
  modified_base 46: mod_base = OTHER; note = 2'-fluoroguanosine phosphorothiorate
  modified_base 48: mod_base = OTHER; note = Uridine phosphorothiorate
  modified_base 49: mod_base = OTHER; note = 2'-fluorocytosine phosphorothiorate
  modified_base 50: mod_base = OTHER; note = 2'-fluorocytosine
  modified_base 51: mod_base = OTHER; note = 2'-Omethylguanosine
  modified_base 52: mod_base = OTHER; note = 2'-Omethylguanosine
  modified_base 54: mod_base = OTHER; note = Uridine phosphorothiorate
  modified_base 57: mod_base = OTHER; note = 2'-fluoroguanosine
  modified_base 59: mod_base = OTHER; note = 2'-fluoroguanosine
  modified_base 60: mod_base = OTHER; note = 2'-Omethyluridine
  modified_base 62: mod_base = OTHER; note = 2'-Omethylcytosine
  modified_base 63: mod_base = OTHER; note = 2'-Omethylcytosine
  modified_base 64: mod_base = OTHER; note = 2'-Omethylguanosine
  modified_base 67: mod_base = OTHER; note = Guanosine phosphorothiorate
  modified_base 68: mod_base = OTHER; note = 2'-fluoroguanosine
  modified_base 69: mod_base = OTHER; note = Adenosine phosphorothiorate
  modified_base 71: mod_base = OTHER; note = 2'-Omethyluridine
  modified_base 73: mod_base = OTHER; note = Guanosine phosphorothiorate
  modified_base 74: mod_base = OTHER; note = Cytosine phosphorothiorate

SEQ ID NO: 3332 - RNA, 76 nt, synthetic construct
  source 1..76: mol_type = other RNA
  modified_base 1: mod_base = OTHER; note = 2'-Omethylguanosine phosphorothiorate
  modified_base 2: mod_base = OTHER; note = 2'-Omethylguanosine phosphorothiorate
  modified_base 74: mod_base = OTHER; note = Cytosine phosphorothiorate
  modified_base 75: mod_base = OTHER; note = 2'-Omethylcytosine
ggccccgtggcgcaatggatagcgcgttggacttcaaattcaaaggttgcgggttcgagtcccgccggggtcgcca

SEQ ID NO: 3333 - RNA, 85 nt, synthetic construct; identical to SEQ ID NO: 3286
  source 1..85: mol_type = other RNA
  modified_base 1: mod_base = OTHER; note = 2'-fluorocytosine phosphorothiorate
  modified_base 32: mod_base = OTHER; note = 2'-fluorouridine
  modified_base 44: mod_base = OTHER; note = Guanosine phosphorothiorate
  modified_base 48: mod_base = OTHER; note = 2'-fluoroadenosine
  modified_base 57: mod_base = OTHER; note = 2'-fluorocytosine
  modified_base 60: mod_base = OTHER; note = Guanosine phosphorothiorate

SEQ ID NO: 3334 - RNA, 75 nt, synthetic construct; identical to SEQ ID NO: 3306
  source 1..75: mol_type = other RNA
  modified_base 1: mod_base = OTHER; note = 2'-Omethylguanosine
  modified_base 14: mod_base = OTHER; note = 2'-Omethyladenosine
  modified_base 15: mod_base = OTHER; note = 2'-Omethyladenosine
  modified_base 16: mod_base = OTHER; note = 2'-Omethylcytosine
  modified_base 17: mod_base = OTHER; note = 2'-Omethylguanosine
  modified_base 18: mod_base = OTHER; note = 2'-Omethylguanosine
  modified_base 19: mod_base = OTHER; note = Uridine phosphorothiorate
  modified_base 20: mod_base = OTHER; note = Adenosine phosphorothiorate
  modified_base 32: mod_base = OTHER; note = Uridine phosphorothiorate
  modified_base 33: mod_base = OTHER; note = 2'-Omethylcytosine
  modified_base 34: mod_base = OTHER; note = Uridine phosphorothiorate
  modified_base 36: mod_base = OTHER; note = Guanosine phosphorothiorate
  modified_base 37: mod_base = OTHER; note = Adenosine phosphorothiorate
  modified_base 40: mod_base = OTHER; note = 2'-fluoroadenosine
  modified_base 41: mod_base = OTHER; note = 2'-Omethylguanosine
  modified_base 42: mod_base = OTHER; note = 2'-Omethyladenosine
  modified_base 43: mod_base = OTHER; note = 2'-fluoroadenosine
  modified_base 49: mod_base = OTHER; note = 2'-Omethylcytosine
  modified_base 51: mod_base = OTHER; note = 2'-Omethyluridine
  modified_base 72: mod_base = OTHER; note = 2'-Omethyladenosine

SEQ ID NO: 3335 - RNA, 85 nt, synthetic construct; identical to SEQ ID NO: 3288
  source 1..85: mol_type = other RNA
  modified_base 1: mod_base = OTHER; note = 2'-Omethylcytosine
  modified_base 11: mod_base = OTHER; note = Cytosine phosphorothiorate
  modified_base 27: mod_base = OTHER; note = 2'-fluorouridine
  modified_base 34: mod_base = OTHER; note = 2'-fluorocytosine
  modified_base 50: mod_base = OTHER; note = Adenosine phosphorothiorate
  modified_base 59: mod_base = OTHER; note = 2'-Omethyluridine
  modified_base 84: mod_base = OTHER; note = 2'-Omethylcytosine

SEQ ID NO: 3336 - RNA, 75 nt, synthetic construct
  source 1..75: mol_type = other RNA
  modified_base 1: mod_base = OTHER; note = 2'-Omethylcytosine phosphorothiorate
  modified_base 3: mod_base = OTHER; note = 2'-fluorouridine phosphorothiorate
  modified_base 8: mod_base = OTHER; note = Adenosine phosphorothiorate
  modified_base 11: mod_base = OTHER; note = Uridine phosphorothiorate
  modified_base 16: mod_base = OTHER; note = Cytosine phosphorothiorate
  modified_base 21: mod_base = OTHER; note = 2'-Omethylguanosine phosphorothiorate
  modified_base 22: mod_base = OTHER; note = 2'-Omethyladenosine phosphorothiorate
  modified_base 23: mod_base = OTHER; note = 2'-fluoroguanosine
  modified_base 25: mod_base = OTHER; note = Adenosine phosphorothiorate
  modified_base 26: mod_base = OTHER; note = Uridine phosphorothiorate
  modified_base 28: mod_base = OTHER; note = 2'-fluoroadenosine
  modified_base 29: mod_base = OTHER; note = 2'-Omethylguanosine phosphorothiorate
  modified_base 38: mod_base = OTHER; note = 2'-fluorouridine
  modified_base 40: mod_base = OTHER; note = 2'-fluorouridine
  modified_base 41: mod_base = OTHER; note = 2'-fluoroguanosine
  modified_base 46: mod_base = OTHER; note = 2'-fluorouridine phosphorothiorate
  modified_base 52: mod_base = OTHER; note = 2'-fluoroguanosine phosphorothiorate
  modified_base 53: mod_base = OTHER; note = 2'-fluorouridine
  modified_base 59: mod_base = OTHER; note = Uridine phosphorothiorate
  modified_base 62: mod_base = OTHER; note = 2'-Omethylcytosine phosphorothiorate
  modified_base 72: mod_base = OTHER; note = Guanosine phosphorothiorate
  modified_base 73: mod_base = OTHER; note = Cytosine phosphorothiorate
  modified_base 74: mod_base = OTHER; note = 2'-Omethylcytosine
cctgggtagctcagtcggtagagcatcagactctaaatctgagggtccagggttcaagtccctgtccaggcgcca

SEQ ID NO: 3337 - RNA, 76 nt, synthetic construct; identical to SEQ ID NO: 625
  source 1..76: mol_type = other RNA
  modified_base 1: mod_base = OTHER; note = 2'-Omethylguanosine phosphorothiorate
  modified_base 2: mod_base = OTHER; note = 2'-Omethylguanosine
  modified_base 3: mod_base = OTHER; note = 2'-Omethylcytosine
  modified_base 4: mod_base = OTHER; note = 2'-Omethyluridine
  modified_base 5: mod_base = OTHER; note = 2'-Omethylcytosine
  modified_base 6: mod_base = OTHER; note = 2'-Omethylcytosine
  modified_base 10: mod_base = OTHER; note = 2'-Omethylguanosine
  modified_base 11: mod_base = OTHER; note = 2'-Omethylcytosine
  modified_base 12: mod_base = OTHER; note = 2'-Omethylguanosine
  modified_base 13: mod_base = OTHER; note = 2'-Omethylcytosine
  modified_base 14: mod_base = OTHER; note = 2'-Omethyladenosine
  modified_base 15: mod_base = OTHER; note = 2'-fluoroadenosine
  modified_base 16: mod_base = OTHER; note = 2'-Omethyluridine
  modified_base 17: mod_base = OTHER; note = 2'-Omethylguanosine
  modified_base 18: mod_base = OTHER; note = 2'-Omethylguanosine
  modified_base 19: mod_base = OTHER; note = 2'-fluoroadenosine
  modified_base 20: mod_base = OTHER; note = 2'-Omethyluridine
  modified_base 22: mod_base = OTHER; note = 2'-Omethylguanosine
  modified_base 23: mod_base = OTHER; note = 2'-Omethylcytosine
  modified_base 24: mod_base = OTHER; note = 2'-Omethylguanosine
  modified_base 25: mod_base = OTHER; note = 2'-Omethylcytosine
  modified_base 33: mod_base = OTHER; note = 2'-fluorouridine
  modified_base 35: mod_base = OTHER; note = Cytosine phosphorothiorate
  modified_base 37: mod_base = OTHER; note = Adenosine phosphorothiorate
  modified_base 38: mod_base = OTHER; note = Adenosine phosphorothiorate
  modified_base 52: mod_base = OTHER; note = 2'-fluoroguanosine
  modified_base 54: mod_base = OTHER; note = 2'-Omethyluridine
  modified_base 56: mod_base = OTHER; note = 2'-Omethylcytosine
  modified_base 57: mod_base = OTHER; note = 2'-fluoroguanosine
  modified_base 59: mod_base = OTHER; note = 2'-Omethylguanosine
  modified_base 62: mod_base = OTHER; note = 2'-Omethylcytosine
  modified_base 63: mod_base = OTHER; note = 2'-fluorocytosine
  modified_base 65: mod_base = OTHER; note = 2'-Omethylguanosine
  modified_base 73: mod_base = OTHER; note = 2'-Omethylguanosine
  modified_base 75: mod_base = OTHER; note = 2'-fluorocytosine phosphorothiorate

SEQ ID NO: 3338 - RNA, 86 nt, synthetic construct; identical to SEQ ID NO: 3290
  source 1..86: mol_type = other RNA
  modified_base 54: mod_base = OTHER; note = 2'-Omethyluridine

SEQ ID NO: 3339 - RNA, 74 nt, synthetic construct; identical to SEQ ID NO: 766
  source 1..74: mol_type = other RNA
  modified_base 1: mod_base = OTHER; note = 2'-Omethylguanosine phosphorothiorate
  modified_base 2: mod_base = OTHER; note = 2'-Omethylguanosine
  modified_base 3: mod_base = OTHER; note = 2'-Omethylcytosine
  modified_base 4: mod_base = OTHER; note = 2'-Omethyluridine
  modified_base 5: mod_base = OTHER; note = 2'-Omethylcytosine
  modified_base 6: mod_base = OTHER; note = 2'-Omethylcytosine
  modified_base 49: mod_base = OTHER; note = 2'-Omethylcytosine
  modified_base 50: mod_base = OTHER; note = 2'-Omethylcytosine
  modified_base 51: mod_base = OTHER; note = 2'-Omethylguanosine
  modified_base 52: mod_base = OTHER; note = 2'-Omethylguanosine
  modified_base 53: mod_base = OTHER; note = 2'-Omethylguanosine
  modified_base 61: mod_base = OTHER; note = 2'-Omethylcytosine
  modified_base 62: mod_base = OTHER; note = 2'-Omethylcytosine
  modified_base 63: mod_base = OTHER; note = 2'-fluorocytosine
  modified_base 64: mod_base = OTHER; note = 2'-Omethylguanosine
  modified_base 65: mod_base = OTHER; note = 2'-Omethylguanosine
  modified_base 66: mod_base = OTHER; note = 2'-Omethylcytosine
  modified_base 67: mod_base = OTHER; note = 2'-Omethylguanosine
  modified_base 68: mod_base = OTHER; note = 2'-Omethylguanosine
  modified_base 69: mod_base = OTHER; note = 2'-Omethyladenosine
  modified_base 70: mod_base = OTHER; note = 2'-fluoroguanosine
  modified_base 73: mod_base = OTHER; note = 2'-Omethylguanosine phosphorothiorate

SEQ ID NO: 3340 - RNA, 86 nt, synthetic construct; identical to SEQ ID NO: 3290
  source 1..86: mol_type = other RNA
  modified_base 45: mod_base = OTHER; note = Guanosine phosphorothiorate

SEQ ID NO: 3341 - RNA, 75 nt, synthetic construct; identical to SEQ ID NO: 3336
  source 1..75: mol_type = other RNA
  modified_base 11: mod_base = OTHER; note = 2'-Omethyluridine phosphorothiorate
  modified_base 14: mod_base = OTHER; note = Guanosine phosphorothiorate
  modified_base 18: mod_base = OTHER; note = 2'-fluoroguanosine
  modified_base 23: mod_base = OTHER; note = 2'-fluoroguanosine
  modified_base 25: mod_base = OTHER; note = 2'-fluoroadenosine
  modified_base 28: mod_base = OTHER; note = 2'-Omethyladenosine phosphorothiorate
  modified_base 29: mod_base = OTHER; note = Guanosine phosphorothiorate
  modified_base 40: mod_base = OTHER; note = 2'-fluorouridine
  modified_base 41: mod_base = OTHER; note = 2'-fluoroguanosine
  modified_base 46: mod_base = OTHER; note = Uridine phosphorothiorate
  modified_base 47: mod_base = OTHER; note = 2'-Omethylcytosine phosphorothiorate
  modified_base 48: mod_base = OTHER; note = 2'-Omethylcytosine phosphorothiorate
  modified_base 60: mod_base = OTHER; note = Cytosine phosphorothiorate
  modified_base 71: mod_base = OTHER; note = 2'-fluorocytosine phosphorothiorate
  modified_base 72: mod_base = OTHER; note = Guanosine phosphorothiorate
  modified_base 74: mod_base = OTHER; note = 2'-fluorocytosine

SEQ ID NO: 3342 - RNA, 76 nt, synthetic construct
  source 1..76: mol_type = other RNA
  modified_base 1: mod_base = OTHER; note = 2'-Omethylguanosine
  modified_base 2: mod_base = OTHER; note = 2'-Omethylguanosine
  modified_base 3: mod_base = OTHER; note = 2'-Omethylcytosine
  modified_base 4: mod_base = OTHER; note = 2'-Omethyluridine
  modified_base 5: mod_base = OTHER; note = 2'-Omethylcytosine
  modified_base 6: mod_base = OTHER; note = 2'-Omethylcytosine
  modified_base 16: mod_base = OTHER; note = 2'-Omethyluridine
  modified_base 17: mod_base = OTHER; note = 2'-Omethylguanosine
  modified_base 18: mod_base = OTHER; note = 2'-Omethylguanosine
  modified_base 20: mod_base = OTHER; note = 2'-Omethyluridine
  modified_base 25: mod_base = OTHER; note = 2'-Omethylcytosine
  modified_base 33: mod_base = OTHER; note = 2'-fluorouridine
  modified_base 35: mod_base = OTHER; note = Cytosine phosphorothiorate
  modified_base 37: mod_base = OTHER; note = Adenosine phosphorothiorate
  modified_base 38: mod_base = OTHER; note = Adenosine phosphorothiorate
  modified_base 41: mod_base = OTHER; note = 2'-Omethylcytosine
  modified_base 42: mod_base = OTHER; note = 2'-Omethylguanosine
  modified_base 43: mod_base = OTHER; note = 2'-Omethyladenosine
  modified_base 44: mod_base = OTHER; note = 2'-Omethyladenosine
  modified_base 49: mod_base = OTHER; note = 2'-Omethylcytosine
  modified_base 50: mod_base = OTHER; note = 2'-Omethylcytosine
  modified_base 52: mod_base = OTHER; note = 2'-Omethylguanosine
  modified_base 54: mod_base = OTHER; note = Uridine phosphorothiorate
  modified_base 55: mod_base = OTHER; note = Uridine phosphorothiorate
  modified_base 61: mod_base = OTHER; note = 2'-Omethylcytosine
  modified_base 65: mod_base = OTHER; note = 2'-Omethylguanosine
  modified_base 73: mod_base = OTHER; note = 2'-Omethylguanosine
ggctccgtggcgcaatggatagcgcatcggtcttcaaaatcgaaggttccgggttcgagtcccggcggagtcgcca

SEQ ID NO: 3343 - RNA, 75 nt, synthetic construct; identical to SEQ ID NO: 1045
  source 1..75: mol_type = other RNA
  modified_base 1: mod_base = OTHER; note = 2'-Omethylguanosine phosphorothiorate
  modified_base 2: mod_base = OTHER; note = 2'-Omethylguanosine phosphorothiorate
  modified_base 8: mod_base = OTHER; note = 2'-Omethyluridine
  modified_base 14: mod_base = OTHER; note = 2'-Omethyladenosine phosphorothiorate
  modified_base 15: mod_base = OTHER; note = 2'-Omethyladenosine
  modified_base 17: mod_base = OTHER; note = 2'-Omethylguanosine
  modified_base 23: mod_base = OTHER; note = 2'-Omethylcytosine
  modified_base 33: mod_base = OTHER; note = 2'-Omethyluridine phosphorothiorate
  modified_base 34: mod_base = OTHER; note = 2'-Omethyluridine phosphorothiorate
  modified_base 50: mod_base = OTHER; note = 2'-Omethylguanosine phosphorothiorate
  modified_base 56: mod_base = OTHER; note = 2'-Omethylguanosine phosphorothiorate
  modified_base 61: mod_base = OTHER; note = 2'-Omethyluridine
  modified_base 72: mod_base = OTHER; note = 2'-Omethyluridine
  modified_base 74: mod_base = OTHER; note = 2'-Omethylcytosine phosphorothiorate
  modified_base 75: mod_base = OTHER; note = 2'-Omethyladenosine

SEQ ID NO: 3344 - RNA, 76 nt, synthetic construct; identical to SEQ ID NO: 625
  source 1..76: mol_type = other RNA
  modified_base 4: mod_base = OTHER; note = 2'-Omethyluridine phosphorothiorate
  modified_base 5: mod_base = OTHER; note = 2'-Omethylcytosine phosphorothiorate
  modified_base 6: mod_base = OTHER; note = 2'-fluorocytosine
  modified_base 8: mod_base = OTHER; note = Uridine phosphorothiorate
  modified_base 10: mod_base = OTHER; note = 2'-Omethylguanosine
  modified_base 11: mod_base = OTHER; note = 2'-Omethylcytosine
  modified_base 12: mod_base = OTHER; note = 2'-Omethylguanosine
  modified_base 13: mod_base = OTHER; note = 2'-fluorocytosine
  modified_base 15: mod_base = OTHER; note = 2'-Omethyladenosine
  modified_base 17: mod_base = OTHER; note = Guanosine phosphorothiorate
  modified_base 18: mod_base = OTHER; note = 2'-Omethylguanosine
  modified_base 20: mod_base = OTHER; note = 2'-Omethyluridine
  modified_base 23: mod_base = OTHER; note = 2'-fluorocytosine phosphorothiorate
  modified_base 24: mod_base = OTHER; note = 2'-fluoroguanosine
  modified_base 30: mod_base = OTHER; note = 2'-Omethylguanosine
  modified_base 33: mod_base = OTHER; note = 2'-fluorouridine
  modified_base 34: mod_base = OTHER; note = Uridine phosphorothiorate
  modified_base 36: mod_base = OTHER; note = Adenosine phosphorothiorate
  modified_base 38: mod_base = OTHER; note = Adenosine phosphorothiorate
  modified_base 39: mod_base = OTHER; note = 2'-Omethyluridine phosphorothiorate
  modified_base 40: mod_base = OTHER; note = 2'-Omethyluridine
  modified_base 41: mod_base = OTHER; note = 2'-Omethylcytosine
  modified_base 43: mod_base = OTHER; note = 2'-Omethyladenosine
  modified_base 44: mod_base = OTHER; note = 2'-Omethyladenosine
  modified_base 46: mod_base = OTHER; note = 2'-fluoroguanosine
  modified_base 47: mod_base = OTHER; note = Uridine phosphorothiorate
  modified_base 48: mod_base = OTHER; note = 2'-fluorouridine phosphorothiorate
  modified_base 49: mod_base = OTHER; note = 2'-Omethylcytosine
  modified_base 50: mod_base = OTHER; note = 2'-Omethylcytosine
  modified_base 52: mod_base = OTHER; note = 2'-fluoroguanosine
  modified_base 53: mod_base = OTHER; note = 2'-fluoroguanosine
  modified_base 56: mod_base = OTHER; note = Cytosine phosphorothiorate
  modified_base 61: mod_base = OTHER; note = 2'-fluorocytosine
  modified_base 62: mod_base = OTHER; note = Cytosine phosphorothiorate
  modified_base 63: mod_base = OTHER; note = 2'-Omethylcytosine
  modified_base 67: mod_base = OTHER; note = 2'-fluoroguanosine
  modified_base 68: mod_base = OTHER; note = 2'-Omethylguanosine

SEQ ID NO: 3345 - RNA, 76 nt, synthetic construct; identical to SEQ ID NO: 3295
  source 1..76: mol_type = other RNA
  modified_base 1: mod_base = OTHER; note = 2'-Omethylcytosine
  modified_base 2: mod_base = OTHER; note = 2'-fluorocytosine phosphorothiorate
  modified_base 3: mod_base = OTHER; note = 2'-fluorouridine
  modified_base 4: mod_base = OTHER; note = 2'-Omethyluridine phosphorothiorate
  modified_base 5: mod_base = OTHER; note = 2'-fluorocytosine
  modified_base 9: mod_base = OTHER; note = 2'-fluoroadenosine
  modified_base 11: mod_base = OTHER; note = 2'-fluorocytosine
  modified_base 17: mod_base = OTHER; note = 2'-Omethyluridine
  modified_base 22: mod_base = OTHER; note = 2'-fluoroguanosine
  modified_base 25: mod_base = OTHER; note = Cytosine phosphorothiorate
  modified_base 26: mod_base = OTHER; note = 2'-fluoroguanosine phosphorothiorate
  modified_base 27: mod_base = OTHER; note = 2'-fluoroguanosine phosphorothiorate
  modified_base 28: mod_base = OTHER; note = Adenosine phosphorothiorate
  modified_base 38: mod_base = OTHER; note = 2'-fluoroadenosine
  modified_base 40: mod_base = OTHER; note = 2'-Omethylcytosine
  modified_base 43: mod_base = OTHER; note = 2'-fluorouridine phosphorothiorate
  modified_base 47: mod_base = OTHER; note = 2'-fluorouridine phosphorothiorate
  modified_base 49: mod_base = OTHER; note = 2'-fluoroguanosine phosphorothiorate
  modified_base 52: mod_base = OTHER; note = 2'-Omethylguanosine
  modified_base 58: mod_base = OTHER; note = 2'-Omethyladenosine phosphorothiorate
  modified_base 60: mod_base = OTHER; note = Uridine phosphorothiorate
  modified_base 72: mod_base = OTHER; note = 2'-fluoroguanosine
  modified_base 75: mod_base = OTHER; note = 2'-fluorocytosine

SEQ ID NO: 3346 - RNA, 75 nt, synthetic construct; identical to SEQ ID NO: 3299
  source 1..75: mol_type = other RNA
  modified_base 14: mod_base = OTHER; note = 2'-fluoroguanosine
  modified_base 19: mod_base = OTHER; note = 2'-fluorouridine
  modified_base 20: mod_base = OTHER; note = 2'-fluoroadenosine
  modified_base 40: mod_base = OTHER; note = 2'-fluorouridine phosphorothiorate
  modified_base 47: mod_base = OTHER; note = 2'-fluorocytosine
  modified_base 48: mod_base = OTHER; note = 2'-fluorocytosine
  modified_base 62: mod_base = OTHER; note = 2'-fluorocytosine
  modified_base 72: mod_base = OTHER; note = Guanosine phosphorothiorate
  modified_base 74: mod_base = OTHER; note = 2'-Omethylcytosine

SEQ ID NO: 3347 - RNA, 76 nt, synthetic construct; identical to SEQ ID NO: 625
  source 1..76: mol_type = other RNA
  modified_base 1: mod_base = OTHER; note = 2'-Omethylguanosine
  modified_base 2: mod_base = OTHER; note = 2'-Omethylguanosine
  modified_base 3: mod_base = OTHER; note = 2'-Omethylcytosine
  modified_base 4: mod_base = OTHER; note = 2'-Omethyluridine
  modified_base 5: mod_base = OTHER; note = 2'-Omethylcytosine
  modified_base 6: mod_base = OTHER; note = 2'-Omethylcytosine
  modified_base 7: mod_base = OTHER; note = 2'-fluoroguanosine phosphorothiorate
  modified_base 10: mod_base = OTHER; note = 2'-Omethylguanosine
  modified_base 11: mod_base = OTHER; note = 2'-Omethylcytosine
  modified_base 12: mod_base = OTHER; note = 2'-Omethylguanosine
  modified_base 13: mod_base = OTHER; note = 2'-Omethylcytosine
  modified_base 14: mod_base = OTHER; note = 2'-Omethyladenosine
  modified_base 15: mod_base = OTHER; note = 2'-Omethyladenosine
  modified_base 16: mod_base = OTHER; note = 2'-Omethyluridine
  modified_base 17: mod_base = OTHER; note = 2'-Omethylguanosine
  modified_base 18: mod_base = OTHER; note = 2'-Omethylguanosine
  modified_base 19: mod_base = OTHER; note = 2'-fluoroadenosine phosphorothiorate
  modified_base 21: mod_base = OTHER; note = 2'-fluoroadenosine phosphorothiorate
  modified_base 22: mod_base = OTHER; note = 2'-Omethylguanosine
  modified_base 23: mod_base = OTHER; note = 2'-Omethylcytosine
  modified_base 24: mod_base = OTHER; note = 2'-Omethylguanosine
  modified_base 25: mod_base = OTHER; note = 2'-Omethylcytosine
  modified_base 26: mod_base = OTHER; note = 2'-Omethyladenosine phosphorothiorate
  modified_base 28: mod_base = OTHER; note = 2'-Omethyluridine
  modified_base 31: mod_base = OTHER; note = 2'-Omethyladenosine phosphorothiorate
  modified_base 32: mod_base = OTHER; note = 2'-Omethylcytosine phosphorothiorate
  modified_base 33: mod_base = OTHER; note = 2'-fluorouridine
  modified_base 35: mod_base = OTHER; note = 2'-Omethylcytosine phosphorothiorate
  modified_base 37: mod_base = OTHER; note = Adenosine phosphorothiorate
  modified_base 38: mod_base = OTHER; note = 2'-Omethyladenosine phosphorothiorate
  modified_base 40: mod_base = OTHER; note = 2'-fluorouridine
  modified_base 41: mod_base = OTHER; note = 2'-fluorocytosine
  modified_base 42: mod_base = OTHER; note = Adenosine phosphorothiorate
  modified_base 44: mod_base = OTHER; note = 2'-Omethyladenosine
  modified_base 45: mod_base = OTHER; note = 2'-fluoroguanosine
  modified_base 49: mod_base = OTHER; note = 2'-Omethylcytosine
  modified_base 52: mod_base = OTHER; note = 2'-Omethylguanosine
  modified_base 53: mod_base = OTHER; note = 2'-fluoroguanosine
  modified_base 54: mod_base = OTHER; note = Uridine phosphorothiorate
  modified_base 55: mod_base = OTHER; note = Uridine phosphorothiorate
  modified_base 57: mod_base = OTHER; note = Guanosine phosphorothiorate
  modified_base 59: mod_base = OTHER; note = 2'-Omethylguanosine
  modified_base 62: mod_base = OTHER; note = 2'-Omethylcytosine phosphorothiorate
  modified_base 63: mod_base = OTHER; note = 2'-fluorocytosine
  modified_base 64: mod_base = OTHER; note = 2'-Omethylguanosine phosphorothiorate
  modified_base 65: mod_base = OTHER; note = 2'-Omethylguanosine
  modified_base 66: mod_base = OTHER; note = 2'-fluorocytosine phosphorothiorate
  modified_base 67: mod_base = OTHER; note = 2'-fluoroguanosine
  modified_base 68: mod_base = OTHER; note = 2'-Omethylguanosine phosphorothiorate
  modified_base 69: mod_base = OTHER; note = 2'-fluoroadenosine phosphorothiorate
  modified_base 71: mod_base = OTHER; note = 2'-Omethyluridine
  modified_base 73: mod_base = OTHER; note = 2'-Omethylguanosine
  modified_base 74: mod_base = OTHER; note = 2'-fluorocytosine
  modified_base 75: mod_base = OTHER; note = 2'-fluorocytosine phosphorothiorate
  modified_base 76: mod_base = OTHER; note = 2'-fluoroadenosine

SEQ ID NO: 3348 - RNA, 75 nt, synthetic construct; identical to SEQ ID NO: 1045
  source 1..75: mol_type = other RNA
  modified_base 2: mod_base = OTHER; note = 2'-Omethylguanosine phosphorothiorate
  modified_base 3: mod_base = OTHER; note = 2'-Omethyluridine phosphorothiorate
  modified_base 17: mod_base = OTHER; note = 2'-fluoroguanosine phosphorothiorate
  modified_base 19: mod_base = OTHER; note = 2'-Omethyluridine phosphorothiorate
  modified_base 27: mod_base = OTHER; note = 2'-Omethylcytosine
  modified_base 29: mod_base = OTHER; note = 2'-Omethylguanosine
  modified_base 38: mod_base = OTHER; note = 2'-Omethyladenosine
  modified_base 45: mod_base = OTHER; note = 2'-Omethylguanosine
  modified_base 50: mod_base = OTHER; note = 2'-Omethylguanosine phosphorothiorate
  modified_base 51: mod_base = OTHER; note = Adenosine phosphorothiorate
  modified_base 64: mod_base = OTHER; note = 2'-Omethylguanosine
  modified_base 72: mod_base = OTHER; note = 2'-Omethyluridine
  modified_base 74: mod_base = OTHER; note = 2'-Omethylcytosine phosphorothiorate

SEQ ID NO: 3349 - RNA, 76 nt, synthetic construct; identical to SEQ ID NO: 625
  source 1..76: mol_type = other RNA
  modified_base 1: mod_base = OTHER; note = 2'-Omethylguanosine phosphorothiorate
  modified_base 2: mod_base = OTHER; note = 2'-Omethylguanosine
  modified_base 3: mod_base = OTHER; note = 2'-Omethylcytosine
  modified_base 4: mod_base = OTHER; note = 2'-Omethyluridine
  modified_base 5: mod_base = OTHER; note = 2'-Omethylcytosine
  modified_base 6: mod_base = OTHER; note = 2'-Omethylcytosine
  modified_base 10: mod_base = OTHER; note = 2'-Omethylguanosine
  modified_base 11: mod_base = OTHER; note = 2'-Omethylcytosine
  modified_base 12: mod_base = OTHER; note = 2'-Omethylguanosine
  modified_base 13: mod_base = OTHER; note = 2'-Omethylcytosine
  modified_base 14: mod_base = OTHER; note = 2'-Omethyladenosine
  modified_base 15: mod_base = OTHER; note = 2'-Omethyladenosine
  modified_base 16: mod_base = OTHER; note = 2'-Omethyluridine
  modified_base 17: mod_base = OTHER; note = 2'-Omethylguanosine
  modified_base 18: mod_base = OTHER; note = 2'-Omethylguanosine
  modified_base 19: mod_base = OTHER; note = 2'-Omethyladenosine
  modified_base 20: mod_base = OTHER; note = 2'-Omethyluridine
  modified_base 22: mod_base = OTHER; note = 2'-Omethylguanosine
  modified_base 23: mod_base = OTHER; note = 2'-Omethylcytosine
  modified_base 24: mod_base = OTHER; note = 2'-Omethylguanosine
  modified_base 25: mod_base = OTHER; note = 2'-Omethylcytosine
  modified_base 49: mod_base = OTHER; note = 2'-Omethylcytosine
  modified_base 50: mod_base = OTHER; note = 2'-Omethylcytosine
  modified_base 51: mod_base = OTHER; note = 2'-Omethylguanosine
  modified_base 52: mod_base = OTHER; note = 2'-Omethylguanosine
  modified_base 53: mod_base = OTHER; note = 2'-Omethylguanosine
  modified_base 61: mod_base = OTHER; note = 2'-Omethylcytosine
  modified_base 62: mod_base = OTHER; note = 2'-Omethylcytosine
  modified_base 63: mod_base = OTHER; note = 2'-fluorocytosine
  modified_base 64: mod_base = OTHER; note = 2'-Omethylguanosine
  modified_base 65: mod_base = OTHER; note = 2'-Omethylguanosine
  modified_base 66: mod_base = OTHER; note = 2'-Omethylcytosine
  modified_base 67: mod_base = OTHER; note = 2'-Omethylguanosine
  modified_base 68: mod_base = OTHER; note = 2'-Omethylguanosine
  modified_base 69: mod_base = OTHER; note = 2'-Omethyladenosine

SEQ ID NO: 3350 - RNA, 85 nt, synthetic construct; identical to SEQ ID NO: 3301
  source 1..85: mol_type = other RNA
  modified_base 1: mod_base = OTHER; note = 2'-Omethylguanosine phosphorothiorate
  modified_base 2: mod_base = OTHER; note = 2'-Omethylcytosine phosphorothiorate
  modified_base 3: mod_base = OTHER; note = Uridine phosphorothiorate
  modified_base 5: mod_base = OTHER; note = 2'-Omethyluridine
  modified_base 15: mod_base = OTHER; note = 2'-Omethylguanosine phosphorothiorate
  modified_base 18: mod_base = OTHER; note = 2'-Omethylguanosine phosphorothiorate
  modified_base 24: mod_base = OTHER; note = 2'-Omethylguanosine phosphorothiorate
  modified_base 27: mod_base = OTHER; note = 2'-fluorouridine
  modified_base 37: mod_base = OTHER; note = 2'-Omethyladenosine
  modified_base 44: mod_base = OTHER; note = 2'-fluorouridine phosphorothiorate
  modified_base 51: mod_base = OTHER; note = 2'-Omethyluridine
  modified_base 59: mod_base = OTHER; note = 2'-Omethylcytosine phosphorothiorate
  modified_base 61: mod_base = OTHER; note = 2'-Omethylguanosine
  modified_base 62: mod_base = OTHER; note = Guanosine phosphorothiorate
  modified_base 77: mod_base = OTHER; note = 2'-fluoroadenosine
  modified_base 78: mod_base = OTHER; note = 2'-fluorocytosine
  modified_base 82: mod_base = OTHER; note = 2'-Omethylguanosine
  modified_base 83: mod_base = OTHER; note = Cytosine phosphorothiorate

SEQ ID NO: 3351 - RNA, 85 nt, synthetic construct; identical to SEQ ID NO: 3288
  source 1..85: mol_type = other RNA
  modified_base 1: mod_base = OTHER; note = 2'-Omethylcytosine
  modified_base 2: mod_base = OTHER; note = Cytosine phosphorothiorate
  modified_base 20: mod_base = OTHER; note = Adenosine phosphorothiorate
  modified_base 22: mod_base = OTHER; note = 2'-fluoroguanosine phosphorothiorate
  modified_base 27: mod_base = OTHER; note = 2'-Omethyluridine phosphorothiorate
  modified_base 33: mod_base = OTHER; note = 2'-fluorouridine
  modified_base 37: mod_base = OTHER; note = Adenosine phosphorothiorate
  modified_base 43: mod_base = OTHER; note = Uridine phosphorothiorate
  modified_base 46: mod_base = OTHER; note = 2'-Omethyladenosine
  modified_base 55: mod_base = OTHER; note = Cytosine phosphorothiorate
  modified_base 57: mod_base = OTHER; note = 2'-Omethylcytosine
  modified_base 79: mod_base = OTHER; note = 2'-fluoroguanosine
  modified_base 84: mod_base = OTHER; note = 2'-Omethylcytosine phosphorothiorate

SEQ ID NO: 3352 - RNA, 75 nt, synthetic construct; identical to SEQ ID NO: 3311
  source 1..75: mol_type = other RNA
  modified_base 1: mod_base = OTHER; note = Guanosine phosphorothiorate
  modified_base 2: mod_base = OTHER; note = 2'-fluoroguanosine
  modified_base 3: mod_base = OTHER; note = 2'-fluorouridine
  modified_base 15: mod_base = OTHER; note = 2'-fluoroadenosine
  modified_base 40: mod_base = OTHER; note = 2'-fluorocytosine
  modified_base 50: mod_base = OTHER; note = Guanosine phosphorothiorate
  modified_base 64: mod_base = OTHER; note = Guanosine phosphorothiorate
  modified_base 73: mod_base = OTHER; note = Cytosine phosphorothiorate

SEQ ID NO: 3353 - RNA, 76 nt, synthetic construct; identical to SEQ ID NO: 625
  source 1..76: mol_type = other RNA
  modified_base 1: mod_base = OTHER; note = 2'-Omethylguanosine
  modified_base 2: mod_base = OTHER; note = 2'-Omethylguanosine
  modified_base 3: mod_base = OTHER; note = 2'-Omethylcytosine
  modified_base 10: mod_base = OTHER; note = 2'-Omethylguanosine
  modified_base 11: mod_base = OTHER; note = 2'-Omethylcytosine
  modified_base 12: mod_base = OTHER; note = 2'-Omethylguanosine
  modified_base 13: mod_base = OTHER; note = 2'-Omethylcytosine
  modified_base 14: mod_base = OTHER; note = 2'-Omethyladenosine
  modified_base 15: mod_base = OTHER; note = 2'-fluoroadenosine
  modified_base 16: mod_base = OTHER; note = 2'-Omethyluridine
  modified_base 17: mod_base = OTHER; note = 2'-Omethylguanosine
  modified_base 18: mod_base = OTHER; note = 2'-Omethylguanosine
  modified_base 19: mod_base = OTHER; note = 2'-fluoroadenosine
  modified_base 20: mod_base = OTHER; note = 2'-Omethyluridine
  modified_base 21: mod_base = OTHER; note = 2'-fluoroadenosine
  modified_base 22: mod_base = OTHER; note = 2'-Omethylguanosine
  modified_base 23: mod_base = OTHER; note = 2'-Omethylcytosine
  modified_base 24: mod_base = OTHER; note = 2'-Omethylguanosine
  modified_base 25: mod_base = OTHER; note = 2'-Omethylcytosine
  modified_base 38: mod_base = OTHER; note = Adenosine phosphorothiorate
  modified_base 39: mod_base = OTHER; note = Uridine phosphorothiorate
  modified_base 40: mod_base = OTHER; note = 2'-fluorouridine
  modified_base 43: mod_base = OTHER; note = 2'-Omethyladenosine
  modified_base 44: mod_base = OTHER; note = 2'-Omethyladenosine
  modified_base 45: mod_base = OTHER; note = 2'-Omethylguanosine
  modified_base 46: mod_base = OTHER; note = 2'-fluoroguanosine
  modified_base 48: mod_base = OTHER; note = 2'-fluorouridine
  modified_base 49: mod_base = OTHER; note = 2'-Omethylcytosine
  modified_base 50: mod_base = OTHER; note = 2'-Omethylcytosine
  modified_base 51: mod_base = OTHER; note = 2'-Omethylguanosine
  modified_base 52: mod_base = OTHER; note = 2'-Omethylguanosine
  modified_base 53: mod_base = OTHER; note = 2'-Omethylguanosine
  modified_base 54: mod_base = OTHER; note = 2'-Omethyluridine
  modified_base 61: mod_base = OTHER; note = 2'-Omethylcytosine
  modified_base 62: mod_base = OTHER; note = 2'-Omethylcytosine
  modified_base 63: mod_base = OTHER; note = 2'-fluorocytosine
  modified_base 64: mod_base = OTHER; note = 2'-Omethylguanosine
  modified_base 65: mod_base = OTHER; note = 2'-Omethylguanosine
  modified_base 66: mod_base = OTHER; note = 2'-Omethylcytosine
  modified_base 67: mod_base = OTHER; note = 2'-Omethylguanosine
  modified_base 68: mod_base = OTHER; note = 2'-Omethylguanosine

SEQ ID NO: 3354 - RNA, 76 nt, synthetic construct; identical to SEQ ID NO: 625
  source 1..76: mol_type = other RNA
  modified_base 54: mod_base = OTHER; note = 2'-fluorouridine
  modified_base 55: mod_base = OTHER; note = 2'-fluorouridine
  modified_base 56: mod_base = OTHER; note = 2'-fluorocytosine
  modified_base 57: mod_base = OTHER; note = 2'-fluoroguanosine
  modified_base 58: mod_base = OTHER; note = 2'-fluoroadenosine
  modified_base 59: mod_base = OTHER; note = 2'-fluoroguanosine
  modified_base 60: mod_base = OTHER; note = 2'-fluorouridine

SEQ ID NO: 3355 - RNA, 75 nt, synthetic construct; identical to SEQ ID NO: 1045
  source 1..75: mol_type = other RNA
  modified_base 1: mod_base = OTHER; note = 2'-Omethylguanosine phosphorothiorate
  modified_base 2: mod_base = OTHER; note = 2'-Omethylguanosine phosphorothiorate
  modified_base 3: mod_base = OTHER; note = 2'-Omethyluridine
  modified_base 4: mod_base = OTHER; note = 2'-Omethyluridine
  modified_base 5: mod_base = OTHER; note = 2'-Omethylcytosine
  modified_base 6: mod_base = OTHER; note = 2'-Omethylcytosine
  modified_base 13: mod_base = OTHER; note = 2'-Omethyluridine
  modified_base 16: mod_base = OTHER; note = 2'-Omethyluridine
  modified_base 17: mod_base = OTHER; note = 2'-Omethylguanosine
  modified_base 18: mod_base = OTHER; note = 2'-Omethylguanosine
  modified_base 20: mod_base = OTHER; note = 2'-Omethyladenosine phosphorothiorate
  modified_base 25: mod_base = OTHER; note = 2'-Omethylcytosine
  modified_base 33: mod_base = OTHER; note = 2'-fluorouridine
  modified_base 35: mod_base = OTHER; note = Uridine phosphorothiorate
  modified_base 37: mod_base = OTHER; note = Adenosine phosphorothiorate
  modified_base 38: mod_base = OTHER; note = Adenosine phosphorothiorate
  modified_base 41: mod_base = OTHER; note = 2'-fluorocytosine phosphorothiorate
  modified_base 42: mod_base = OTHER; note = 2'-Omethyladenosine
  modified_base 43: mod_base = OTHER; note = 2'-Omethylguanosine
  modified_base 44: mod_base = OTHER; note = 2'-fluorocytosine
  modified_base 45: mod_base = OTHER; note = 2'-Omethylguanosine
  modified_base 46: mod_base = OTHER; note = 2'-fluoroadenosine
  modified_base 47: mod_base = OTHER; note = 2'-fluorouridine
  modified_base 55: mod_base = OTHER; note = 2'-Omethylcytosine
  modified_base 58: mod_base = OTHER; note = 2'-Omethylguanosine
  modified_base 60: mod_base = OTHER; note = 2'-Omethylcytosine
  modified_base 61: mod_base = OTHER; note = 2'-Omethyluridine
  modified_base 62: mod_base = OTHER; note = 2'-fluorocytosine
  modified_base 63: mod_base = OTHER; note = 2'-Omethylguanosine
  modified_base 64: mod_base = OTHER; note = 2'-Omethylguanosine
  modified_base 65: mod_base = OTHER; note = 2'-Omethyluridine
  modified_base 66: mod_base = OTHER; note = 2'-Omethylguanosine
  modified_base 67: mod_base = OTHER; note = 2'-Omethylguanosine
  modified_base 70: mod_base = OTHER; note = 2'-Omethylcytosine
  modified_base 72: mod_base = OTHER; note = 2'-Omethyluridine

SEQ ID NO: 3356 - RNA, 76 nt, synthetic construct; identical to SEQ ID NO: 625
  source 1..76: mol_type = other RNA
  modified_base 61: mod_base = OTHER; note = 2'-Omethylcytosine
  modified_base 62: mod_base = OTHER; note = 2'-Omethylcytosine
  modified_base 63: mod_base = OTHER; note = 2'-fluorocytosine
  modified_base 64: mod_base = OTHER; note = 2'-Omethylguanosine
  modified_base 65: mod_base = OTHER; note = 2'-Omethylguanosine
  modified_base 66: mod_base = OTHER; note = 2'-Omethylcytosine
  modified_base 67: mod_base = OTHER; note = 2'-Omethylguanosine
  modified_base 68: mod_base = OTHER; note = 2'-Omethylguanosine
  modified_base 69: mod_base = OTHER; note = 2'-fluoroadenosine

SEQ ID NO: 3357 - RNA, 76 nt, synthetic construct; identical to SEQ ID NO: 3318
  source 1..76: mol_type = other RNA
  modified_base 1: mod_base = OTHER; note = 2'-Omethylcytosine phosphorothiorate
  modified_base 2: mod_base = OTHER; note = 2'-Omethylcytosine
  modified_base 3: mod_base = OTHER; note = 2'-Omethyluridine
  modified_base 4: mod_base = OTHER; note = 2'-Omethyluridine
  modified_base 5: mod_base = OTHER; note = 2'-Omethylcytosine
  modified_base 6: mod_base = OTHER; note = 2'-Omethylguanosine
  modified_base 44: mod_base = OTHER; note = 2'-Omethyladenosine
  modified_base 45: mod_base = OTHER; note = 2'-Omethylguanosine
  modified_base 46: mod_base = OTHER; note = 2'-fluoroguanosine
  modified_base 47: mod_base = OTHER; note = 2'-fluorouridine
  modified_base 48: mod_base = OTHER; note = 2'-fluorocytosine
  modified_base 49: mod_base = OTHER; note = 2'-Omethylguanosine
  modified_base 73: mod_base = OTHER; note = 2'-Omethyladenosine

SEQ ID NO: 3358 - RNA, 76 nt, synthetic construct; identical to SEQ ID NO: 625
  source 1..76: mol_type = other RNA
  modified_base 1: mod_base = OTHER; note = 2'-Omethylguanosine phosphorothiorate
  modified_base 2: mod_base = OTHER; note = 2'-Omethylguanosine
  modified_base 3: mod_base = OTHER; note = 2'-Omethylcytosine
  modified_base 4: mod_base = OTHER; note = 2'-Omethyluridine
  modified_base 5: mod_base = OTHER; note = 2'-Omethylcytosine
  modified_base 6: mod_base = OTHER; note = 2'-Omethylcytosine
  modified_base 10: mod_base = OTHER; note = 2'-Omethylguanosine
  modified_base 11: mod_base = OTHER; note = 2'-Omethylcytosine
  modified_base 12: mod_base = OTHER; note = 2'-Omethylguanosine
  modified_base 13: mod_base = OTHER; note = 2'-Omethylcytosine
  modified_base 14: mod_base = OTHER; note = 2'-Omethyladenosine
  modified_base 15: mod_base = OTHER; note = 2'-Omethyladenosine
  modified_base 16: mod_base = OTHER; note = 2'-Omethyluridine
  modified_base 17: mod_base = OTHER; note = 2'-Omethylguanosine
  modified_base 18: mod_base = OTHER; note = 2'-Omethylguanosine
  modified_base 19: mod_base = OTHER; note = 2'-Omethyladenosine
  modified_base 20: mod_base = OTHER; note = 2'-Omethyluridine
  modified_base 22: mod_base = OTHER; note = 2'-Omethylguanosine
  modified_base 23: mod_base = OTHER; note = 2'-Omethylcytosine
  modified_base 24: mod_base = OTHER; note = 2'-Omethylguanosine
  modified_base 25: mod_base = OTHER; note = 2'-Omethylcytosine
  modified_base 49: mod_base = OTHER; note = 2'-Omethylcytosine
  modified_base 50: mod_base = OTHER; note = 2'-Omethylcytosine
  modified_base 51: mod_base = OTHER; note = 2'-Omethylguanosine
  modified_base 52: mod_base = OTHER; note = 2'-Omethylguanosine
  modified_base 53: mod_base = OTHER; note = 2'-Omethylguanosine
  modified_base 54: mod_base = OTHER; note = Uridine phosphorothiorate
  modified_base 55: mod_base = OTHER; note = Uridine phosphorothiorate
  modified_base 56: mod_base = OTHER; note = Cytosine phosphorothiorate
  modified_base 57: mod_base = OTHER; note = Guanosine phosphorothiorate
  modified_base 61: mod_base = OTHER; note = 2'-Omethylcytosine
  modified_base 62: mod_base = OTHER; note = 2'-Omethylcytosine
  modified_base 63: mod_base = OTHER; note = 2'-fluorocytosine
  modified_base 64: mod_base = OTHER; note = 2'-Omethylguanosine
  modified_base 65: mod_base = OTHER; note = 2'-Omethylguanosine
  modified_base 66: mod_base = OTHER; note = 2'-Omethylcytosine
  modified_base 67: mod_base = OTHER; note = 2'-Omethylguanosine
  modified_base 68: mod_base = OTHER; note = 2'-Omethylguanosine
  modified_base 69: mod_base = OTHER; note = 2'-Omethyladenosine
  modified_base 71: mod_base = OTHER; note = 2'-Omethyluridine
  modified_base 72: mod_base = OTHER; note = 2'-Omethylcytosine

SEQ ID NO: 3359 - RNA, 76 nt, synthetic construct; identical to SEQ ID NO: 625
  source 1..76: mol_type = other RNA
  modified_base 4: mod_base = OTHER; note = 2'-fluorouridine
  modified_base 5: mod_base = OTHER; note = Cytosine phosphorothiorate
  modified_base 6: mod_base = OTHER; note = 2'-fluorocytosine
  modified_base 7: mod_base = OTHER; note = Guanosine phosphorothiorate
  modified_base 10: mod_base = OTHER; note = 2'-fluoroguanosine
  modified_base 12: mod_base = OTHER; note = 2'-fluoroguanosine
  modified_base 13: mod_base = OTHER; note = 2'-fluorocytosine
  modified_base 15: mod_base = OTHER; note = 2'-Omethyladenosine
  modified_base 23: mod_base = OTHER; note = 2'-fluorocytosine phosphorothiorate
  modified_base 24: mod_base = OTHER; note = 2'-fluoroguanosine
  modified_base 27: mod_base = OTHER; note = 2'-Omethyluridine
  modified_base 28: mod_base = OTHER; note = 2'-Omethyluridine
  modified_base 31: mod_base = OTHER; note = 2'-fluoroadenosine
  modified_base 38: mod_base = OTHER; note = 2'-fluoroadenosine
  modified_base 39: mod_base = OTHER; note = 2'-fluorouridine
  modified_base 41: mod_base = OTHER; note = 2'-Omethylcytosine
  modified_base 45: mod_base = OTHER; note = 2'-fluoroguanosine
  modified_base 46: mod_base = OTHER; note = 2'-Omethylguanosine phosphorothiorate
  modified_base 48: mod_base = OTHER; note = 2'-Omethyluridine
  modified_base 49: mod_base = OTHER; note = 2'-fluorocytosine phosphorothiorate
  modified_base 50: mod_base = OTHER; note = 2'-Omethylcytosine
  modified_base 53: mod_base = OTHER; note = Guanosine phosphorothiorate
  modified_base 55: mod_base = OTHER; note = Uridine phosphorothiorate
  modified_base 56: mod_base = OTHER; note = 2'-fluorocytosine
  modified_base 57: mod_base = OTHER; note = Guanosine phosphorothiorate
  modified_base 58: mod_base = OTHER; note = 2'-fluoroadenosine
  modified_base 61: mod_base = OTHER; note = Cytosine phosphorothiorate
  modified_base 62: mod_base = OTHER; note = 2'-Omethylcytosine
  modified_base 64: mod_base = OTHER; note = 2'-fluoroguanosine phosphorothiorate
  modified_base 65: mod_base = OTHER; note = 2'-Omethylguanosine
  modified_base 66: mod_base = OTHER; note = 2'-Omethylcytosine
  modified_base 68: mod_base = OTHER; note = 2'-fluoroguanosine
  modified_base 71: mod_base = OTHER; note = 2'-fluorouridine phosphorothiorate
  modified_base 75: mod_base = OTHER; note = 2'-Omethylcytosine
  modified_base 76: mod_base = OTHER; note = 2'-Omethyladenosine

SEQ ID NO: 3360 - RNA, 76 nt, synthetic construct; identical to SEQ ID NO: 625
  source 1..76: mol_type = other RNA
  modified_base 1: mod_base = OTHER; note = 2'-Omethylguanosine
  modified_base 2: mod_base = OTHER; note = 2'-Omethylguanosine
  modified_base 3: mod_base = OTHER; note = 2'-Omethylcytosine
  modified_base 4: mod_base = OTHER; note = 2'-Omethyluridine
  modified_base 5: mod_base = OTHER; note = 2'-Omethylcytosine
  modified_base 6: mod_base = OTHER; note = 2'-Omethylcytosine
  modified_base 7: mod_base = OTHER; note = 2'-Omethylguanosine phosphorothiorate
  modified_base 10: mod_base = OTHER; note = 2'-Omethylguanosine
  modified_base 11: mod_base = OTHER; note = 2'-Omethylcytosine
  modified_base 12: mod_base = OTHER; note = 2'-Omethylguanosine phosphorothiorate
  modified_base 13: mod_base = OTHER; note = 2'-Omethylcytosine
  modified_base 14: mod_base = OTHER; note = 2'-Omethyladenosine
  modified_base 15: mod_base = OTHER; note = Adenosine phosphorothiorate
  modified_base 16: mod_base = OTHER; note = 2'-Omethyluridine
  modified_base 17: mod_base = OTHER; note = 2'-Omethylguanosine
  modified_base 18: mod_base = OTHER; note = 2'-Omethylguanosine
  modified_base 21: mod_base = OTHER; note = 2'-fluoroadenosine phosphorothiorate
  modified_base 22: mod_base = OTHER; note = 2'-Omethylguanosine
  modified_base 23: mod_base = OTHER; note = 2'-Omethylcytosine phosphorothiorate
  modified_base 24: mod_base = OTHER; note = 2'-Omethylguanosine
  modified_base 25: mod_base = OTHER; note = 2'-Omethylcytosine
  modified_base 26: mod_base = OTHER; note = Adenosine phosphorothiorate
  modified_base 28: mod_base = OTHER; note = 2'-Omethyluridine phosphorothiorate
  modified_base 29: mod_base = OTHER; note = 2'-Omethylguanosine phosphorothiorate
  modified_base 30: mod_base = OTHER; note = 2'-fluoroguanosine phosphorothiorate
  modified_base 31: mod_base = OTHER; note = 2'-Omethyladenosine phosphorothiorate
  modified_base 32: mod_base = OTHER; note = 2'-Omethylcytosine phosphorothiorate
  modified_base 33: mod_base = OTHER; note = 2'-fluorouridine
  modified_base 35: mod_base = OTHER; note = Cytosine phosphorothiorate
  modified_base 36: mod_base = OTHER; note = 2'-Omethyladenosine phosphorothiorate
  modified_base 37: mod_base = OTHER; note = Adenosine phosphorothiorate
  modified_base 38: mod_base = OTHER; note = Adenosine phosphorothiorate
  modified_base 39: mod_base = OTHER; note = 2'-Omethyluridine phosphorothiorate
  modified_base 40: mod_base = OTHER; note = 2'-Omethyluridine
  modified_base 41: mod_base = OTHER; note = 2'-Omethylcytosine
  modified_base 42: mod_base = OTHER; note = Adenosine phosphorothiorate
  modified_base 43: mod_base = OTHER; note = Adenosine phosphorothiorate
  modified_base 44: mod_base = OTHER; note = 2'-Omethyladenosine
  modified_base 48: mod_base = OTHER; note = 2'-fluorouridine
  modified_base 49: mod_base = OTHER; note = 2'-Omethylcytosine
  modified_base 50: mod_base = OTHER; note = 2'-Omethylcytosine
  modified_base 51: mod_base = OTHER; note = 2'-Omethylguanosine phosphorothiorate
  modified_base 52: mod_base = OTHER; note = 2'-Omethylguanosine
  modified_base 53: mod_base = OTHER; note = 2'-fluoroguanosine
  modified_base 55: mod_base = OTHER; note = Uridine phosphorothiorate
  modified_base 56: mod_base = OTHER; note = 2'-Omethylcytosine
  modified_base 57: mod_base = OTHER; note = 2'-Omethylguanosine
  modified_base 59: mod_base = OTHER; note = 2'-Omethylguanosine
  modified_base 62: mod_base = OTHER; note = 2'-Omethylcytosine
  modified_base 63: mod_base = OTHER; note = 2'-fluorocytosine
  modified_base 64: mod_base = OTHER; note = 2'-Omethylguanosine phosphorothiorate
  modified_base 65: mod_base = OTHER; note = 2'-Omethylguanosine phosphorothiorate
  modified_base 66: mod_base = OTHER; note = 2'-Omethylcytosine
  modified_base 67: mod_base = OTHER; note = Guanosine phosphorothiorate
  modified_base 68: mod_base = OTHER; note = 2'-Omethylguanosine
  modified_base 69: mod_base = OTHER; note = 2'-fluoroadenosine
  modified_base 71: mod_base = OTHER; note = 2'-Omethyluridine phosphorothiorate
  modified_base 72: mod_base = OTHER; note = Cytosine phosphorothiorate
  modified_base 73: mod_base = OTHER; note = 2'-Omethylguanosine
  modified_base 74: mod_base = OTHER; note = 2'-fluorocytosine phosphorothiorate
  modified_base 75: mod_base = OTHER; note = 2'-fluorocytosine phosphorothiorate
  modified_base 76: mod_base = OTHER; note = 2'-Omethyladenosine

SEQ ID NO: 3361 - RNA, 75 nt, synthetic construct; identical to SEQ ID NO: 3311
  source 1..75: mol_type = other RNA
  modified_base 1: mod_base = OTHER; note = 2'-Omethylguanosine
  modified_base 2: mod_base = OTHER; note = 2'-fluoroguanosine phosphorothiorate
  modified_base 6: mod_base = OTHER; note = 2'-Omethylcytosine
  modified_base 10: mod_base = OTHER; note = 2'-fluoroguanosine
  modified_base 11: mod_base = OTHER; note = Uridine phosphorothiorate
  modified_base 12: mod_base = OTHER; note = 2'-fluoroguanosine phosphorothiorate
  modified_base 16: mod_base = OTHER; note = 2'-fluorouridine phosphorothiorate
  modified_base 21: mod_base = OTHER; note = Adenosine phosphorothiorate
  modified_base 22: mod_base = OTHER; note = 2'-fluoroguanosine
  modified_base 24: mod_base = OTHER; note = 2'-fluoroadenosine
  modified_base 25: mod_base = OTHER; note = Cytosine phosphorothiorate
  modified_base 26: mod_base = OTHER; note = 2'-fluorouridine
  modified_base 27: mod_base = OTHER; note = 2'-fluorocytosine
  modified_base 44: mod_base = OTHER; note = 2'-fluorocytosine
  modified_base 56: mod_base = OTHER; note = 2'-Omethylguanosine
  modified_base 60: mod_base = OTHER; note = Cytosine phosphorothiorate
  modified_base 61: mod_base = OTHER; note = 2'-fluorouridine
  modified_base 67: mod_base = OTHER; note = Guanosine phosphorothiorate
  modified_base 68: mod_base = OTHER; note = 2'-fluoroadenosine
  modified_base 74: mod_base = OTHER; note = 2'-fluorocytosine

SEQ ID NO: 3362 - RNA, 75 nt, synthetic construct; identical to SEQ ID NO: 3311
  source 1..75: mol_type = other RNA
  modified_base 1: mod_base = OTHER; note = 2'-Omethylguanosine phosphorothiorate
  modified_base 2: mod_base = OTHER; note = 2'-Omethylguanosine
  modified_base 13: mod_base = OTHER; note = 2'-fluorouridine
  modified_base 19: mod_base = OTHER; note = 2'-fluorouridine
  modified_base 20: mod_base = OTHER; note = Adenosine phosphorothiorate
  modified_base 21: mod_base = OTHER; note = 2'-fluoroadenosine
  modified_base 22: mod_base = OTHER; note = 2'-Omethylguanosine
  modified_base 24: mod_base = OTHER; note = 2'-fluoroadenosine
  modified_base 25: mod_base = OTHER; note = Cytosine phosphorothiorate
  modified_base 32: mod_base = OTHER; note = 2'-fluorocytosine
  modified_base 37: mod_base = OTHER; note = 2'-fluoroadenosine phosphorothiorate
  modified_base 38: mod_base = OTHER; note = 2'-fluoroadenosine
  modified_base 39: mod_base = OTHER; note = 2'-fluorouridine
  modified_base 41: mod_base = OTHER; note = 2'-fluorocytosine
  modified_base 52: mod_base = OTHER; note = 2'-Omethylguanosine
  modified_base 57: mod_base = OTHER; note = 2'-Omethyladenosine
  modified_base 62: mod_base = OTHER; note = 2'-fluorocytosine
  modified_base 67: mod_base = OTHER; note = 2'-fluoroguanosine
  modified_base 68: mod_base = OTHER; note = 2'-fluoroadenosine
  modified_base 73: mod_base = OTHER; note = Cytosine phosphorothiorate
  modified_base 74: mod_base = OTHER; note = 2'-fluorocytosine phosphorothiorate

SEQ ID NO: 3363 - RNA, 76 nt, synthetic construct; identical to SEQ ID NO: 625
  source 1..76: mol_type = other RNA
  modified_base 1: mod_base = OTHER; note = 2'-Omethylguanosine phosphorothiorate
  modified_base 2: mod_base = OTHER; note = 2'-Omethylguanosine
  modified_base 3: mod_base = OTHER; note = 2'-Omethylcytosine
  modified_base 4: mod_base = OTHER; note = 2'-Omethyluridine
  modified_base 5: mod_base = OTHER; note = 2'-Omethylcytosine
  modified_base 6: mod_base = OTHER; note = 2'-Omethylcytosine
  modified_base 10: mod_base = OTHER; note = 2'-Omethylguanosine
  modified_base 11: mod_base = OTHER; note = 2'-Omethylcytosine
  modified_base 12: mod_base = OTHER; note = 2'-Omethylguanosine
  modified_base 13: mod_base = OTHER; note = 2'-Omethylcytosine
  modified_base 14: mod_base = OTHER; note = 2'-Omethyladenosine
  modified_base 16: mod_base = OTHER; note = 2'-Omethyluridine
  modified_base 17: mod_base = OTHER; note = 2'-Omethylguanosine
  modified_base 18: mod_base = OTHER; note = 2'-Omethylguanosine
  modified_base 22: mod_base = OTHER; note = 2'-Omethylguanosine
  modified_base 23: mod_base = OTHER; note = 2'-Omethylcytosine
  modified_base 24: mod_base = OTHER; note = 2'-Omethylguanosine
  modified_base 25: mod_base = OTHER; note = 2'-Omethylcytosine
  modified_base 30: mod_base = OTHER; note = 2'-Omethylguanosine
  modified_base 33: mod_base = OTHER; note = 2'-fluorouridine
  modified_base 35: mod_base = OTHER; note = Cytosine phosphorothiorate
  modified_base 37: mod_base = OTHER; note = Adenosine phosphorothiorate
  modified_base 38: mod_base = OTHER; note = Adenosine phosphorothiorate
  modified_base 41: mod_base = OTHER; note = 2'-fluorocytosine
  modified_base 42: mod_base = OTHER; note = 2'-Omethyladenosine
  modified_base 43: mod_base = OTHER; note = 2'-Omethyladenosine
  modified_base 44: mod_base = OTHER; note = 2'-Omethyladenosine
  modified_base 49: mod_base = OTHER; note = 2'-Omethylcytosine
  modified_base 50: mod_base = OTHER; note = 2'-Omethylcytosine
  modified_base 52: mod_base = OTHER; note = 2'-Omethylguanosine
  modified_base 53: mod_base = OTHER; note = 2'-fluoroguanosine
  modified_base 54: mod_base = OTHER; note = 2'-Omethyluridine
  modified_base 55: mod_base = OTHER; note = Uridine phosphorothiorate
  modified_base 56: mod_base = OTHER; note = 2'-Omethylcytosine
  modified_base 57: mod_base = OTHER; note = 2'-Omethylguanosine
  modified_base 59: mod_base = OTHER; note = 2'-Omethylguanosine
  modified_base 61: mod_base = OTHER; note = 2'-Omethylcytosine
  modified_base 62: mod_base = OTHER; note = 2'-Omethylcytosine
  modified_base 63: mod_base = OTHER; note = 2'-fluorocytosine
  modified_base 64: mod_base = OTHER; note = 2'-Omethylguanosine
  modified_base 65: mod_base = OTHER; note = 2'-Omethylguanosine
  modified_base 66: mod_base = OTHER; note = 2'-Omethylcytosine
  modified_base 67: mod_base = OTHER; note = 2'-Omethylguanosine
  modified_base 68: mod_base = OTHER; note = 2'-Omethylguanosine
  modified_base 72: mod_base = OTHER; note = 2'-Omethylcytosine
  modified_base 73: mod_base = OTHER; note = 2'-Omethylguanosine
  modified_base 74: mod_base = OTHER; note = 2'-fluorocytosine phosphorothiorate
  modified_base 75: mod_base = OTHER; note = 2'-fluorocytosine phosphorothiorate

SEQ ID NO: 3364 - RNA, 85 nt, synthetic construct; identical to SEQ ID NO: 3317
  source 1..85: mol_type = other RNA
  modified_base 1: mod_base = OTHER; note = 2'-Omethylguanosine phosphorothiorate
  modified_base 2: mod_base = OTHER; note = Cytosine phosphorothiorate
  modified_base 14: mod_base = OTHER; note = Adenosine phosphorothiorate
  modified_base 38: mod_base = OTHER; note = 2'-fluoroadenosine
  modified_base 61: mod_base = OTHER; note = 2'-Omethylguanosine phosphorothiorate
  modified_base 82: mod_base = OTHER; note = 2'-Omethylguanosine

SEQ ID NO: 3365 - RNA, 76 nt, synthetic construct; identical to SEQ ID NO: 625
  source 1..76: mol_type = other RNA
  modified_base 2: mod_base = OTHER; note = 2'-fluoroguanosine
  modified_base 3: mod_base = OTHER; note = 2'-Omethylcytosine
  modified_base 11: mod_base = OTHER; note = Cytosine phosphorothiorate
  modified_base 12: mod_base = OTHER; note = Guanosine phosphorothiorate
  modified_base 13: mod_base = OTHER; note = 2'-Omethylcytosine
  modified_base 14: mod_base = OTHER; note = 2'-Omethyladenosine
  modified_base 15: mod_base = OTHER; note = Adenosine phosphorothiorate
  modified_base 16: mod_base = OTHER; note = 2'-fluorouridine
  modified_base 17: mod_base = OTHER; note = 2'-Omethylguanosine
  modified_base 18: mod_base = OTHER; note = 2'-fluoroguanosine phosphorothiorate
  modified_base 20: mod_base = OTHER; note = 2'-fluorouridine
  modified_base 23: mod_base = OTHER; note = 2'-Omethylcytosine
  modified_base 31: mod_base = OTHER; note = 2'-Omethyladenosine
  modified_base 32: mod_base = OTHER; note = 2'-fluorocytosine
  modified_base 33: mod_base = OTHER; note = 2'-fluorouridine
  modified_base 45: mod_base = OTHER; note = Guanosine phosphorothiorate
  modified_base 46: mod_base = OTHER; note = 2'-Omethylguanosine
  modified_base 50: mod_base = OTHER; note = 2'-fluorocytosine
  modified_base 51: mod_base = OTHER; note = 2'-Omethylguanosine
  modified_base 52: mod_base = OTHER; note = Guanosine phosphorothiorate
  modified_base 54: mod_base = OTHER; note = 2'-Omethyluridine phosphorothiorate
  modified_base 55: mod_base = OTHER; note = Uridine phosphorothiorate
  modified_base 57: mod_base = OTHER; note = 2'-fluoroguanosine
  modified_base 60: mod_base = OTHER; note = 2'-fluorouridine
  modified_base 61: mod_base = OTHER; note = Cytosine phosphorothiorate
  modified_base 62: mod_base = OTHER; note = 2'-Omethylcytosine
  modified_base 63: mod_base = OTHER; note = 2'-Omethylcytosine
  modified_base 64: mod_base = OTHER; note = 2'-Omethylguanosine
  modified_base 65: mod_base = OTHER; note = Guanosine phosphorothiorate
  modified_base 66: mod_base = OTHER; note = 2'-fluorocytosine
  modified_base 67: mod_base = OTHER; note = Guanosine phosphorothiorate
  modified_base 68: mod_base = OTHER; note = 2'-Omethylguanosine phosphorothiorate
  modified_base 69: mod_base = OTHER; note = 2'-Omethyladenosine
  modified_base 70: mod_base = OTHER; note = 2'-Omethylguanosine phosphorothiorate
  modified_base 71: mod_base = OTHER; note = 2'-Omethyluridine
  modified_base 72: mod_base = OTHER; note = Cytosine phosphorothiorate
  modified_base 73: mod_base = OTHER; note = Guanosine phosphorothiorate
  modified_base 74: mod_base = OTHER; note = 2'-Omethylcytosine

SEQ ID NO: 3366 - RNA, 76 nt, synthetic construct; identical to SEQ ID NO: 3318
  source 1..76: mol_type = other RNA
  modified_base 1: mod_base = OTHER; note = 2'-Omethylcytosine
  modified_base 14: mod_base = OTHER; note = 2'-Omethyladenosine
  modified_base 15: mod_base = OTHER; note = 2'-Omethylguanosine
  modified_base 16: mod_base = OTHER; note = 2'-Omethyluridine
  modified_base 18: mod_base = OTHER; note = 2'-Omethylguanosine
  modified_base 19: mod_base = OTHER; note = 2'-Omethylguanosine
  modified_base 20: mod_base = OTHER; note = Uridine phosphorothiorate
  modified_base 21: mod_base = OTHER; note = Adenosine phosphorothiorate
  modified_base 33: mod_base = OTHER; note = Uridine phosphorothiorate
  modified_base 34: mod_base = OTHER; note = 2'-Omethylcytosine
  modified_base 35: mod_base = OTHER; note = Uridine phosphorothiorate
  modified_base 37: mod_base = OTHER; note = Guanosine phosphorothiorate
  modified_base 38: mod_base = OTHER; note = Adenosine phosphorothiorate
  modified_base 41: mod_base = OTHER; note = 2'-fluorocytosine
  modified_base 42: mod_base = OTHER; note = 2'-Omethyluridine
  modified_base 43: mod_base = OTHER; note = 2'-Omethyluridine
  modified_base 44: mod_base = OTHER; note = 2'-fluoroadenosine
  modified_base 50: mod_base = OTHER; note = 2'-Omethylcytosine
  modified_base 52: mod_base = OTHER; note = 2'-Omethylguanosine
  modified_base 73: mod_base = OTHER; note = 2'-Omethyladenosine

SEQ ID NO: 3367 - RNA, 76 nt, synthetic construct; identical to SEQ ID NO: 625
  source 1..76: mol_type = other RNA
  modified_base 1: mod_base = OTHER; note = 2'-Omethylguanosine phosphorothiorate
  modified_base 2: mod_base = OTHER; note = 2'-Omethylguanosine phosphorothiorate
  modified_base 3: mod_base = OTHER; note = 2'-Omethylcytosine
  modified_base 4: mod_base = OTHER; note = 2'-Omethyluridine
  modified_base 5: mod_base = OTHER; note = 2'-Omethylcytosine
  modified_base 6: mod_base = OTHER; note = 2'-Omethylcytosine
  modified_base 10: mod_base = OTHER; note = 2'-Omethylguanosine
  modified_base 11: mod_base = OTHER; note = 2'-Omethylcytosine
  modified_base 12: mod_base = OTHER; note = 2'-Omethylguanosine
  modified_base 13: mod_base = OTHER; note = 2'-Omethylcytosine
  modified_base 14: mod_base = OTHER; note = 2'-Omethyladenosine
  modified_base 15: mod_base = OTHER; note = 2'-fluoroadenosine
  modified_base 16: mod_base = OTHER; note = 2'-Omethyluridine
  modified_base 17: mod_base = OTHER; note = 2'-Omethylguanosine
  modified_base 18: mod_base = OTHER; note = 2'-Omethylguanosine
  modified_base 19: mod_base = OTHER; note = 2'-fluoroadenosine
  modified_base 20: mod_base = OTHER; note = 2'-Omethyluridine
  modified_base 21: mod_base = OTHER; note = 2'-fluoroadenosine
  modified_base 22: mod_base = OTHER; note = 2'-Omethylguanosine
  modified_base 23: mod_base = OTHER; note = 2'-Omethylcytosine
  modified_base 24: mod_base = OTHER; note = 2'-Omethylguanosine
  modified_base 25: mod_base = OTHER; note = 2'-Omethylcytosine
  modified_base 38: mod_base = OTHER; note = Adenosine phosphorothiorate
  modified_base 39: mod_base = OTHER; note = Uridine phosphorothiorate
  modified_base 40: mod_base = OTHER; note = 2'-fluorouridine
  modified_base 43: mod_base = OTHER; note = 2'-Omethyladenosine
  modified_base 44: mod_base = OTHER; note = 2'-Omethyladenosine
  modified_base 45: mod_base = OTHER; note = 2'-Omethylguanosine
  modified_base 46: mod_base = OTHER; note = 2'-fluoroguanosine
  modified_base 48: mod_base = OTHER; note = 2'-fluorouridine
  modified_base 49: mod_base = OTHER; note = 2'-Omethylcytosine
  modified_base 50: mod_base = OTHER; note = 2'-Omethylcytosine
  modified_base 54: mod_base = OTHER; note = 2'-Omethyluridine phosphorothiorate
  modified_base 55: mod_base = OTHER; note = Uridine phosphorothiorate
  modified_base 56: mod_base = OTHER; note = 2'-Omethylcytosine
  modified_base 57: mod_base = OTHER; note = 2'-fluoroguanosine
  modified_base 61: mod_base = OTHER; note = 2'-Omethylcytosine
  modified_base 62: mod_base = OTHER; note = 2'-Omethylcytosine
  modified_base 63: mod_base = OTHER; note = 2'-fluorocytosine
  modified_base 64: mod_base = OTHER; note = 2'-Omethylguanosine
  modified_base 65: mod_base = OTHER; note = 2'-Omethylguanosine
  modified_base 66: mod_base = OTHER; note = 2'-Omethylcytosine
  modified_base 67: mod_base = OTHER; note = 2'-Omethylguanosine
  modified_base 68: mod_base = OTHER; note = 2'-Omethylguanosine
  modified_base 69: mod_base = OTHER; note = 2'-Omethyladenosine
  modified_base 70: mod_base = OTHER; note = 2'-fluoroguanosine

SEQ ID NO: 3368 - RNA, 76 nt, synthetic construct; identical to SEQ ID NO: 625
  source 1..76: mol_type = other RNA
  modified_base 2: mod_base = OTHER; note = 2'-fluoroguanosine
  modified_base 6: mod_base = OTHER; note = 2'-fluorocytosine
  modified_base 11: mod_base = OTHER; note = Cytosine phosphorothiorate
  modified_base 12: mod_base = OTHER; note = 2'-Omethylguanosine
  modified_base 14: mod_base = OTHER; note = 2'-Omethyladenosine
  modified_base 16: mod_base = OTHER; note = 2'-Omethyluridine
  modified_base 20: mod_base = OTHER; note = 2'-Omethyluridine
  modified_base 22: mod_base = OTHER; note = 2'-Omethylguanosine
  modified_base 23: mod_base = OTHER; note = 2'-fluorocytosine
  modified_base 24: mod_base = OTHER; note = 2'-fluoroguanosine
  modified_base 25: mod_base = OTHER; note = 2'-Omethylcytosine
  modified_base 28: mod_base = OTHER; note = Uridine phosphorothiorate
  modified_base 30: mod_base = OTHER; note = 2'-Omethylguanosine phosphorothiorate
  modified_base 31: mod_base = OTHER; note = 2'-fluoroadenosine
  modified_base 34: mod_base = OTHER; note = Uridine phosphorothiorate
  modified_base 37: mod_base = OTHER; note = Adenosine phosphorothiorate
  modified_base 38: mod_base = OTHER; note = 2'-fluoroadenosine
  modified_base 40: mod_base = OTHER; note = Uridine phosphorothiorate
  modified_base 41: mod_base = OTHER; note = 2'-Omethylcytosine
  modified_base 42: mod_base = OTHER; note = 2'-fluoroadenosine
  modified_base 43: mod_base = OTHER; note = 2'-fluoroadenosine
  modified_base 45: mod_base = OTHER; note = 2'-fluoroguanosine
  modified_base 46: mod_base = OTHER; note = 2'-fluoroguanosine phosphorothiorate
  modified_base 48: mod_base = OTHER; note = 2'-fluorouridine
  modified_base 49: mod_base = OTHER; note = Cytosine phosphorothiorate
  modified_base 50: mod_base = OTHER; note = 2'-fluorocytosine
  modified_base 52: mod_base = OTHER; note = 2'-fluoroguanosine
  modified_base 53: mod_base = OTHER; note = 2'-fluoroguanosine
  modified_base 54: mod_base = OTHER; note = Uridine phosphorothiorate
  modified_base 56: mod_base = OTHER; note = 2'-Omethylcytosine
  modified_base 57: mod_base = OTHER; note = Guanosine phosphorothiorate
  modified_base 58: mod_base = OTHER; note = Adenosine phosphorothiorate
  modified_base 59: mod_base = OTHER; note = 2'-fluoroguanosine
  modified_base 63: mod_base = OTHER; note = 2'-Omethylcytosine
  modified_base 64: mod_base = OTHER; note = 2'-Omethylguanosine
  modified_base 65: mod_base = OTHER; note = Guanosine phosphorothiorate
  modified_base 66: mod_base = OTHER; note = 2'-Omethylcytosine
  modified_base 67: mod_base = OTHER; note = 2'-fluoroguanosine
  modified_base 71: mod_base = OTHER; note = 2'-fluorouridine
  modified_base 72: mod_base = OTHER; note = Cytosine phosphorothiorate

SEQ ID NO: 3369 - RNA, 76 nt, synthetic construct; identical to SEQ ID NO: 625
  source 1..76: mol_type = other RNA
  modified_base 1: mod_base = OTHER; note = 2'-Omethylguanosine
  modified_base 2: mod_base = OTHER; note = Guanosine phosphorothiorate
  modified_base 3: mod_base = OTHER; note = 2'-Omethylcytosine
  modified_base 6: mod_base = OTHER; note = 2'-fluorocytosine
  modified_base 12: mod_base = OTHER; note = 2'-Omethylguanosine
  modified_base 13: mod_base = OTHER; note = Cytosine phosphorothiorate
  modified_base 16: mod_base = OTHER; note = 2'-Omethyluridine
  modified_base 18: mod_base = OTHER; note = 2'-fluoroguanosine phosphorothiorate
  modified_base 22: mod_base = OTHER; note = 2'-fluoroguanosine
  modified_base 23: mod_base = OTHER; note = 2'-fluorocytosine
  modified_base 24: mod_base = OTHER; note = 2'-Omethylguanosine phosphorothiorate
  modified_base 25: mod_base = OTHER; note = 2'-fluorocytosine phosphorothiorate
  modified_base 27: mod_base = OTHER; note = 2'-Omethyluridine
  modified_base 31: mod_base = OTHER; note = 2'-fluoroadenosine
  modified_base 33: mod_base = OTHER; note = Uridine phosphorothiorate
  modified_base 34: mod_base = OTHER; note = 2'-fluorouridine
  modified_base 39: mod_base = OTHER; note = 2'-fluorouridine
  modified_base 43: mod_base = OTHER; note = Adenosine phosphorothiorate
  modified_base 45: mod_base = OTHER; note = Guanosine phosphorothiorate
  modified_base 48: mod_base = OTHER; note = 2'-Omethyluridine phosphorothiorate
  modified_base 49: mod_base = OTHER; note = Cytosine phosphorothiorate
  modified_base 50: mod_base = OTHER; note = 2'-fluorocytosine
  modified_base 52: mod_base = OTHER; note = 2'-Omethylguanosine
  modified_base 53: mod_base = OTHER; note = 2'-fluoroguanosine
  modified_base 54: mod_base = OTHER; note = 2'-Omethyluridine phosphorothiorate
  modified_base 59: mod_base = OTHER; note = Guanosine phosphorothiorate
  modified_base 60: mod_base = OTHER; note = 2'-Omethyluridine
  modified_base 66: mod_base = OTHER; note = Cytosine phosphorothiorate
  modified_base 67: mod_base = OTHER; note = 2'-Omethylguanosine
  modified_base 68: mod_base = OTHER; note = Guanosine phosphorothiorate
  modified_base 69: mod_base = OTHER; note = 2'-Omethyladenosine
  modified_base 72: mod_base = OTHER; note = 2'-Omethylcytosine
  modified_base 73: mod_base = OTHER; note = 2'-Omethylguanosine
  modified_base 75: mod_base = OTHER; note = Cytosine phosphorothiorate
  modified_base 76: mod_base = OTHER; note = 2'-Omethyladenosine

SEQ ID NO: 3370 - RNA, 76 nt, synthetic construct; identical to SEQ ID NO: 625
  source 1..76: mol_type = other RNA
  modified_base 1: mod_base = OTHER; note = 2'-Omethylguanosine
  modified_base 10: mod_base = OTHER; note = 2'-Omethylguanosine
  modified_base 13: mod_base = OTHER; note = 2'-Omethylcytosine
  modified_base 17: mod_base = OTHER; note = Guanosine phosphorothiorate
  modified_base 18: mod_base = OTHER; note = 2'-Omethylguanosine
  modified_base 19: mod_base = OTHER; note = Adenosine phosphorothiorate
  modified_base 20: mod_base = OTHER; note = 2'-Omethyluridine
  modified_base 25: mod_base = OTHER; note = 2'-Omethylcytosine
  modified_base 29: mod_base = OTHER; note = 2'-Omethylguanosine
  modified_base 33: mod_base = OTHER; note = 2'-fluorouridine
  modified_base 35: mod_base = OTHER; note = Cytosine phosphorothiorate
  modified_base 37: mod_base = OTHER; note = Adenosine phosphorothiorate
  modified_base 41: mod_base = OTHER; note = 2'-fluorocytosine
  modified_base 43: mod_base = OTHER; note = 2'-Omethyladenosine
  modified_base 44: mod_base = OTHER; note = 2'-fluoroadenosine
  modified_base 46: mod_base = OTHER; note = Guanosine phosphorothiorate
  modified_base 50: mod_base = OTHER; note = 2'-Omethylcytosine
  modified_base 52: mod_base = OTHER; note = 2'-Omethylguanosine
  modified_base 54: mod_base = OTHER; note = Uridine phosphorothiorate
  modified_base 55: mod_base = OTHER; note = Uridine phosphorothiorate
  modified_base 56: mod_base = OTHER; note = 2'-Omethylcytosine
  modified_base 57: mod_base = OTHER; note = Guanosine phosphorothiorate
  modified_base 62: mod_base = OTHER; note = 2'-Omethylcytosine
  modified_base 63: mod_base = OTHER; note = 2'-fluorocytosine
  modified_base 65: mod_base = OTHER; note = 2'-Omethylguanosine
  modified_base 71: mod_base = OTHER; note = 2'-Omethyluridine
  modified_base 73: mod_base = OTHER; note = 2'-Omethylguanosine

SEQ ID NO: 3371 - RNA, 76 nt, synthetic construct; identical to SEQ ID NO: 3289
  source 1..76: mol_type = other RNA
  modified_base 1: mod_base = OTHER; note = 2'-Omethylguanosine phosphorothiorate
  modified_base 2: mod_base = OTHER; note = 2'-Omethylcytosine phosphorothiorate
  modified_base 15: mod_base = OTHER; note = Guanosine phosphorothiorate
  modified_base 33: mod_base = OTHER; note = Uridine phosphorothiorate
  modified_base 34: mod_base = OTHER; note = 2'-fluorouridine
  modified_base 74: mod_base = OTHER; note = 2'-fluorocytosine phosphorothiorate
  modified_base 75: mod_base = OTHER; note = 2'-Omethylcytosine phosphorothiorate
  modified_base 76: mod_base = OTHER; note = 2'-Omethyladenosine

SEQ ID NO: 3372 - RNA, 85 nt, synthetic construct; identical to SEQ ID NO: 3310
  source 1..85: mol_type = other RNA
  modified_base 1: mod_base = OTHER; note = 2'-fluorocytosine phosphorothiorate
  modified_base 32: mod_base = OTHER; note = 2'-fluorouridine
  modified_base 36: mod_base = OTHER; note = Guanosine phosphorothiorate
  modified_base 46: mod_base = OTHER; note = 2'-Omethyladenosine
  modified_base 57: mod_base = OTHER; note = Cytosine phosphorothiorate
  modified_base 58: mod_base = OTHER; note = Guanosine phosphorothiorate
  modified_base 64: mod_base = OTHER; note = Uridine phosphorothiorate

SEQ ID NO: 3373 - RNA, 75 nt, synthetic construct; identical to SEQ ID NO: 3306
  source 1..75: mol_type = other RNA
  modified_base 49: mod_base = OTHER; note = 2'-Omethylcytosine
  modified_base 51: mod_base = OTHER; note = 2'-Omethyluridine

SEQ ID NO: 3374 - RNA, 85 nt, synthetic construct; identical to SEQ ID NO: 3286
  source 1..85: mol_type = other RNA
  modified_base 1: mod_base = OTHER; note = 2'-Omethylcytosine
  modified_base 8: mod_base = OTHER; note = Guanosine phosphorothiorate
  modified_base 19: mod_base = OTHER; note = Uridine phosphorothiorate
  modified_base 20: mod_base = OTHER; note = 2'-fluoroadenosine
  modified_base 27: mod_base = OTHER; note = 2'-fluorouridine
  modified_base 28: mod_base = OTHER; note = 2'-Omethylguanosine phosphorothiorate
  modified_base 29: mod_base = OTHER; note = 2'-fluoroguanosine
  modified_base 33: mod_base = OTHER; note = 2'-fluorouridine
  modified_base 36: mod_base = OTHER; note = 2'-fluoroguanosine
  modified_base 42: mod_base = OTHER; note = Adenosine phosphorothiorate
  modified_base 46: mod_base = OTHER; note = 2'-Omethyladenosine
  modified_base 52: mod_base = OTHER; note = 2'-fluoroguanosine
  modified_base 54: mod_base = OTHER; note = 2'-fluorocytosine
  modified_base 73: mod_base = OTHER; note = 2'-fluoroadenosine
  modified_base 84: mod_base = OTHER; note = Cytosine phosphorothiorate
  modified_base 85: mod_base = OTHER; note = 2'-fluoroadenosine

SEQ ID NO: 3375 - RNA, 85 nt, synthetic construct; identical to SEQ ID NO: 3301
  source 1..85: mol_type = other RNA
  modified_base 1: mod_base = OTHER; note = 2'-Omethylguanosine phosphorothiorate
  modified_base 2: mod_base = OTHER; note = 2'-Omethylcytosine
  modified_base 5: mod_base = OTHER; note = 2'-Omethyluridine phosphorothiorate
  modified_base 15: mod_base = OTHER; note = Guanosine phosphorothiorate
  modified_base 21: mod_base = OTHER; note = 2'-fluoroadenosine phosphorothiorate
  modified_base 31: mod_base = OTHER; note = 2'-fluoroadenosine
  modified_base 33: mod_base = OTHER; note = 2'-fluorouridine phosphorothiorate
  modified_base 36: mod_base = OTHER; note = 2'-Omethyladenosine
  modified_base 46: mod_base = OTHER; note = 2'-fluoroguanosine phosphorothiorate
  modified_base 48: mod_base = OTHER; note = Guanosine phosphorothiorate
  modified_base 55: mod_base = OTHER; note = Cytosine phosphorothiorate
  modified_base 56: mod_base = OTHER; note = 2'-Omethylguanosine
  modified_base 57: mod_base = OTHER; note = 2'-fluorocytosine
  modified_base 58: mod_base = OTHER; note = 2'-Omethylguanosine
  modified_base 65: mod_base = OTHER; note = 2'-fluorocytosine
  modified_base 74: mod_base = OTHER; note = 2'-fluorocytosine
  modified_base 81: mod_base = OTHER; note = 2'-fluorocytosine
  modified_base 82: mod_base = OTHER; note = 2'-Omethylguanosine
  modified_base 84: mod_base = OTHER; note = 2'-Omethylcytosine phosphorothiorate

SEQ ID NO: 3376 - RNA, 76 nt, synthetic construct; identical to SEQ ID NO: 625
  source 1..76: mol_type = other RNA
  modified_base 1: mod_base = OTHER; note = 2'-fluoroguanosine
  modified_base 3: mod_base = OTHER; note = 2'-Omethylcytosine
  modified_base 4: mod_base = OTHER; note = 2'-fluorouridine phosphorothiorate
  modified_base 14: mod_base = OTHER; note = 2'-Omethyladenosine
  modified_base 15: mod_base = OTHER; note = Adenosine phosphorothiorate
  modified_base 17: mod_base = OTHER; note = 2'-Omethylguanosine phosphorothiorate
  modified_base 18: mod_base = OTHER; note = 2'-Omethylguanosine
  modified_base 22: mod_base = OTHER; note = 2'-Omethylguanosine
  modified_base 24: mod_base = OTHER; note = 2'-fluoroguanosine
  modified_base 26: mod_base = OTHER; note = Adenosine phosphorothiorate
  modified_base 28: mod_base = OTHER; note = 2'-fluorouridine
  modified_base 39: mod_base = OTHER; note = 2'-fluorouridine
  modified_base 42: mod_base = OTHER; note = Adenosine phosphorothiorate
  modified_base 43: mod_base = OTHER; note = 2'-Omethyladenosine
  modified_base 47: mod_base = OTHER; note = 2'-fluorouridine
  modified_base 49: mod_base = OTHER; note = 2'-fluorocytosine
  modified_base 51: mod_base = OTHER; note = 2'-Omethylguanosine
  modified_base 52: mod_base = OTHER; note = 2'-Omethylguanosine
  modified_base 53: mod_base = OTHER; note = 2'-fluoroguanosine
  modified_base 54: mod_base = OTHER; note = Uridine phosphorothiorate
  modified_base 55: mod_base = OTHER; note = Uridine phosphorothiorate
  modified_base 56: mod_base = OTHER; note = 2'-Omethylcytosine
  modified_base 57: mod_base = OTHER; note = 2'-Omethylguanosine
  modified_base 58: mod_base = OTHER; note = 2'-fluoroadenosine
  modified_base 61: mod_base = OTHER; note = 2'-fluorocytosine
  modified_base 62: mod_base = OTHER; note = Cytosine phosphorothiorate
  modified_base 63: mod_base = OTHER; note = Cytosine phosphorothiorate
  modified_base 64: mod_base = OTHER; note = 2'-Omethylguanosine
  modified_base 66: mod_base = OTHER; note = 2'-Omethylcytosine
  modified_base 67: mod_base = OTHER; note = Guanosine phosphorothiorate
  modified_base 69: mod_base = OTHER; note = 2'-Omethyladenosine phosphorothiorate
  modified_base 70: mod_base = OTHER; note = 2'-fluoroguanosine
  modified_base 75: mod_base = OTHER; note = 2'-fluorocytosine

SEQ ID NO: 3377 - RNA, 85 nt, synthetic construct; identical to SEQ ID NO: 3301
  source 1..85: mol_type = other RNA
  modified_base 1: mod_base = OTHER; note = 2'-Omethylguanosine phosphorothiorate
  modified_base 2: mod_base = OTHER; note = Cytosine phosphorothiorate
  modified_base 3: mod_base = OTHER; note = 2'-Omethyluridine
  modified_base 4: mod_base = OTHER; note = 2'-Omethylguanosine phosphorothiorate
  modified_base 15: mod_base = OTHER; note = 2'-fluoroguanosine phosphorothiorate
  modified_base 18: mod_base = OTHER; note = 2'-Omethylguanosine
  modified_base 20: mod_base = OTHER; note = 2'-Omethyluridine
  modified_base 22: mod_base = OTHER; note = 2'-Omethyladenosine
  modified_base 33: mod_base = OTHER; note = 2'-fluorouridine
  modified_base 37: mod_base = OTHER; note = 2'-fluoroadenosine
  modified_base 44: mod_base = OTHER; note = 2'-fluorouridine
  modified_base 45: mod_base = OTHER; note = 2'-fluoroguanosine
  modified_base 46: mod_base = OTHER; note = 2'-Omethylguanosine
  modified_base 49: mod_base = OTHER; note = 2'-Omethyluridine phosphorothiorate
  modified_base 51: mod_base = OTHER; note = 2'-fluorouridine phosphorothiorate
  modified_base 56: mod_base = OTHER; note = 2'-Omethylguanosine phosphorothiorate
  modified_base 59: mod_base = OTHER; note = Cytosine phosphorothiorate
  modified_base 61: mod_base = OTHER; note = 2'-Omethylguanosine
  modified_base 71: mod_base = OTHER; note = 2'-fluorocytosine
  modified_base 73: mod_base = OTHER; note = Guanosine phosphorothiorate
  modified_base 81: mod_base = OTHER; note = 2'-fluorocytosine phosphorothiorate
  modified_base 83: mod_base = OTHER; note = Cytosine phosphorothiorate

SEQ ID NO: 3378 - RNA, 86 nt, synthetic construct; identical to SEQ ID NO: 3290
  source 1..86: mol_type = other RNA
  modified_base 61: mod_base = OTHER; note = 2'-Omethylguanosine

SEQ ID NO: 3379 - RNA, 75 nt, synthetic construct; identical to SEQ ID NO: 1045
  source 1..75: mol_type = other RNA
  modified_base 1: mod_base = OTHER; note = 2'-Omethylguanosine phosphorothiorate
  modified_base 2: mod_base = OTHER; note = 2'-Omethylguanosine phosphorothiorate
  modified_base 3: mod_base = OTHER; note = 2'-Omethyluridine
  modified_base 4: mod_base = OTHER; note = 2'-Omethyluridine
  modified_base 5: mod_base = OTHER; note = 2'-Omethylcytosine
  modified_base 6: mod_base = OTHER; note = 2'-Omethylcytosine
  modified_base 16: mod_base = OTHER; note = 2'-Omethyluridine
  modified_base 17: mod_base = OTHER; note = 2'-Omethylguanosine
  modified_base 18: mod_base = OTHER; note = 2'-Omethylguanosine
  modified_base 20: mod_base = OTHER; note = 2'-Omethyladenosine
  modified_base 25: mod_base = OTHER; note = 2'-Omethylcytosine
  modified_base 33: mod_base = OTHER; note = 2'-fluorouridine
  modified_base 35: mod_base = OTHER; note = Uridine phosphorothiorate
  modified_base 37: mod_base = OTHER; note = Adenosine phosphorothiorate
  modified_base 38: mod_base = OTHER; note = Adenosine phosphorothiorate
  modified_base 41: mod_base = OTHER; note = 2'-Omethylcytosine
  modified_base 44: mod_base = OTHER; note = 2'-Omethylcytosine
  modified_base 45: mod_base = OTHER; note = 2'-Omethylguanosine
  modified_base 46: mod_base = OTHER; note = 2'-fluoroadenosine
  modified_base 47: mod_base = OTHER; note = 2'-fluorouridine
  modified_base 55: mod_base = OTHER; note = 2'-Omethylcytosine
  modified_base 58: mod_base = OTHER; note = 2'-Omethylguanosine
  modified_base 60: mod_base = OTHER; note = 2'-Omethylcytosine
  modified_base 61: mod_base = OTHER; note = 2'-Omethyluridine
  modified_base 62: mod_base = OTHER; note = 2'-fluorocytosine
  modified_base 63: mod_base = OTHER; note = 2'-Omethylguanosine
  modified_base 64: mod_base = OTHER; note = 2'-Omethylguanosine
  modified_base 65: mod_base = OTHER; note = 2'-Omethyluridine
  modified_base 66: mod_base = OTHER; note = 2'-Omethylguanosine
  modified_base 67: mod_base = OTHER; note = 2'-Omethylguanosine
  modified_base 72: mod_base = OTHER; note = 2'-Omethyluridine

SEQ ID NO: 3380 - DNA, 73 bp, synthetic construct
  source 1..73: mol_type = other DNA
  modified_base 1: mod_base = OTHER; note = 2'-Omethylguanosine phosphorothiorate
  modified_base 2: mod_base = OTHER; note = 2'-Omethylguanosine phosphorothiorate
  modified_base 45: mod_base = OTHER; note = Guanosine phosphorothiorate
  modified_base 65: mod_base = OTHER; note = 2'-Omethylguanosine
  modified_base 72: mod_base = OTHER; note = 2'-Omethylcytosine phosphorothiorate
  misc_feature 1..45: note = RNA
  misc_feature 46: note = DNA
  misc_feature 47..73: note = RNA
ggctccgtggcgcaatggatagcgcattggacttcaaattcaaaggttccgggttcgagtcccggcggagtcg

SEQ ID NO: 3381 - RNA, 85 nt, synthetic construct
  source 1..85: mol_type = other RNA
gctgtgatggccgagtggttaaggcgttggacttcaaatccaatggggtttccctgcacgggttcgaatcctgttcacagcgcca

SEQ ID NO: 3382 - RNA, 85 nt, synthetic construct; identical to SEQ ID NO: 3297
  source 1..85: mol_type = other RNA
  modified_base 61: mod_base = OTHER; note = 2'-Omethylguanosine
  modified_base 71: mod_base = OTHER; note = 2'-Omethylcytosine

SEQ ID NO: 3383 - RNA, 76 nt, synthetic construct; identical to SEQ ID NO: 3295
  source 1..76: mol_type = other RNA
  modified_base 1: mod_base = OTHER; note = 2'-Omethylcytosine
  modified_base 2: mod_base = OTHER; note = Cytosine phosphorothiorate
  modified_base 4: mod_base = OTHER; note = 2'-Omethyluridine
  modified_base 13: mod_base = OTHER; note = 2'-fluorocytosine phosphorothiorate
  modified_base 17: mod_base = OTHER; note = Uridine phosphorothiorate
  modified_base 28: mod_base = OTHER; note = 2'-fluoroadenosine
  modified_base 47: mod_base = OTHER; note = 2'-fluorouridine phosphorothiorate
  modified_base 53: mod_base = OTHER; note = 2'-Omethylguanosine
  modified_base 76: mod_base = OTHER; note = 2'-fluoroadenosine

SEQ ID NO: 3384 - DNA, 74 bp, synthetic construct
  source 1..74: mol_type = other DNA
  modified_base 1: mod_base = OTHER; note = 2'-Omethylguanosine phosphorothiorate
  modified_base 2: mod_base = OTHER; note = 2'-Omethylguanosine
  modified_base 16: mod_base = OTHER; note = 2'-fluorouridine
  modified_base 73: mod_base = OTHER; note = 2'-Omethylguanosine
  misc_feature 1..71: note = RNA
  misc_feature 72: note = DNA
  misc_feature 73..74: note = RNA
ggctccgtggcgcaatggatagcgcattggacttcaaattcaaaggttccgggttcgagtcccggcggagtcgc

SEQ ID NO: 3385 - RNA, 75 nt, synthetic construct; identical to SEQ ID NO: 1045
  source 1..75: mol_type = other RNA
  modified_base 1: mod_base = OTHER; note = 2'-Omethylguanosine
  modified_base 2: mod_base = OTHER; note = 2'-Omethylguanosine
  modified_base 3: mod_base = OTHER; note = 2'-Omethyluridine
  modified_base 4: mod_base = OTHER; note = 2'-Omethyluridine
  modified_base 5: mod_base = OTHER; note = 2'-Omethylcytosine
  modified_base 6: mod_base = OTHER; note = 2'-Omethylcytosine
  modified_base 13: mod_base = OTHER; note = 2'-Omethyluridine
  modified_base 17: mod_base = OTHER; note = 2'-Omethylguanosine
  modified_base 18: mod_base = OTHER; note = 2'-Omethylguanosine
  modified_base 25: mod_base = OTHER; note = 2'-Omethylcytosine
  modified_base 33: mod_base = OTHER; note = 2'-fluorouridine
  modified_base 34: mod_base = OTHER; note = 2'-Omethyluridine
  modified_base 35: mod_base = OTHER; note = Uridine phosphorothiorate
  modified_base 37: mod_base = OTHER; note = Adenosine phosphorothiorate
  modified_base 38: mod_base = OTHER; note = Adenosine phosphorothiorate
  modified_base 41: mod_base = OTHER; note = 2'-Omethylcytosine
  modified_base 42: mod_base = OTHER; note = 2'-Omethyladenosine
  modified_base 43: mod_base = OTHER; note = 2'-Omethylguanosine
  modified_base 44: mod_base = OTHER; note = 2'-Omethylcytosine
  modified_base 48: mod_base = OTHER; note = 2'-Omethylcytosine
  modified_base 49: mod_base = OTHER; note = 2'-Omethylcytosine
  modified_base 50: mod_base = OTHER; note = 2'-Omethylguanosine
  modified_base 51: mod_base = OTHER; note = 2'-Omethyladenosine
  modified_base 52: mod_base = OTHER; note = 2'-Omethylguanosine
  modified_base 53: mod_base = OTHER; note = Uridine phosphorothiorate
  modified_base 54: mod_base = OTHER; note = Uridine phosphorothiorate
  modified_base 60: mod_base = OTHER; note = 2'-Omethylcytosine
  modified_base 64: mod_base = OTHER; note = 2'-Omethylguanosine
  modified_base 72: mod_base = OTHER; note = 2'-Omethyluridine

SEQ ID NO: 3386 - RNA, 86 nt, synthetic construct; identical to SEQ ID NO: 3290
  source 1..86: mol_type = other RNA
  modified_base 1: mod_base = OTHER; note = Adenosine phosphorothiorate

SEQ ID NO: 3387 - RNA, 75 nt, synthetic construct; identical to SEQ ID NO: 1045
  source 1..75: mol_type = other RNA
  modified_base 1: mod_base = OTHER; note = 2'-fluoroguanosine
  modified_base 2: mod_base = OTHER; note = 2'-Omethylguanosine phosphorothiorate
  modified_base 27: mod_base = OTHER; note = 2'-Omethylcytosine
  modified_base 41: mod_base = OTHER; note = 2'-fluorocytosine
  modified_base 44: mod_base = OTHER; note = 2'-fluorocytosine
  modified_base 57: mod_base = OTHER; note = 2'-fluoroadenosine
  modified_base 61: mod_base = OTHER; note = Uridine phosphorothiorate
  modified_base 67: mod_base = OTHER; note = Guanosine phosphorothiorate
  modified_base 73: mod_base = OTHER; note = Cytosine phosphorothiorate
  modified_base 74: mod_base = OTHER; note = 2'-Omethylcytosine

SEQ ID NO: 3388 - RNA, 76 nt, synthetic construct; identical to SEQ ID NO: 3295
  source 1..76: mol_type = other RNA
  modified_base 1: mod_base = OTHER; note = 2'-fluorocytosine
  modified_base 3: mod_base = OTHER; note = 2'-Omethyluridine
  modified_base 6: mod_base = OTHER; note = Guanosine phosphorothiorate
  modified_base 14: mod_base = OTHER; note = 2'-fluoroadenosine phosphorothiorate
  modified_base 21: mod_base = OTHER; note = 2'-fluoroadenosine phosphorothiorate
  modified_base 42: mod_base = OTHER; note = Uridine phosphorothiorate
  modified_base 54: mod_base = OTHER; note = 2'-Omethyluridine

SEQ ID NO: 3389 - RNA, 76 nt, synthetic construct; identical to SEQ ID NO: 625
  source 1..76: mol_type = other RNA
  modified_base 1: mod_base = OTHER; note = 2'-Omethylguanosine phosphorothiorate
  modified_base 2: mod_base = OTHER; note = 2'-Omethylguanosine phosphorothiorate
  modified_base 3: mod_base = OTHER; note = 2'-Omethylcytosine
  modified_base 4: mod_base = OTHER; note = 2'-Omethyluridine
  modified_base 5: mod_base = OTHER; note = 2'-Omethylcytosine
  modified_base 6: mod_base = OTHER; note = 2'-Omethylcytosine
  modified_base 14: mod_base = OTHER; note = 2'-Omethyladenosine
  modified_base 15: mod_base = OTHER; note = 2'-Omethyladenosine
  modified_base 16: mod_base = OTHER; note = 2'-Omethyluridine
  modified_base 17: mod_base = OTHER; note = 2'-Omethylguanosine
  modified_base 18: mod_base = OTHER; note = 2'-Omethylguanosine
  modified_base 20: mod_base = OTHER; note = 2'-Omethyluridine
  modified_base 25: mod_base = OTHER; note = 2'-Omethylcytosine
  modified_base 33: mod_base = OTHER; note = 2'-fluorouridine
  modified_base 35: mod_base = OTHER; note = Cytosine phosphorothiorate
  modified_base 37: mod_base = OTHER; note = Adenosine phosphorothiorate
  modified_base 38: mod_base = OTHER; note = Adenosine phosphorothiorate
  modified_base 49: mod_base = OTHER; note = 2'-Omethylcytosine
  modified_base 50: mod_base = OTHER; note = 2'-Omethylcytosine
  modified_base 52: mod_base = OTHER; note = 2'-Omethylguanosine
  modified_base 54: mod_base = OTHER; note = 2'-Omethyluridine
  modified_base 55: mod_base = OTHER; note = Uridine phosphorothiorate
  modified_base 56: mod_base = OTHER; note = 2'-Omethylcytosine
  modified_base 57: mod_base = OTHER; note = 2'-fluoroguanosine
  modified_base 59: mod_base = OTHER; note = 2'-Omethylguanosine
  modified_base 61: mod_base = OTHER; note = 2'-Omethylcytosine
  modified_base 62: mod_base = OTHER; note = 2'-Omethylcytosine
  modified_base 63: mod_base = OTHER; note = 2'-fluorocytosine
  modified_base 64: mod_base = OTHER; note = 2'-Omethylguanosine
  modified_base 65: mod_base = OTHER; note = 2'-Omethylguanosine
  modified_base 73: mod_base = OTHER; note = 2'-Omethylguanosine

SEQ ID NO: 3390 - RNA, 76 nt, synthetic construct; identical to SEQ ID NO: 3289
  source 1..76: mol_type = other RNA
  modified_base 1: mod_base = OTHER; note = 2'-Omethylguanosine phosphorothiorate
  modified_base 2: mod_base = OTHER; note = 2'-Omethylcytosine phosphorothiorate
  modified_base 59: mod_base = OTHER; note = 2'-Omethylguanosine
  modified_base 75: mod_base = OTHER; note = Cytosine phosphorothiorate
  modified_base 76: mod_base = OTHER; note = 2'-Omethyladenosine

SEQ ID NO: 3391 - RNA, 85 nt, synthetic construct; identical to SEQ ID NO: 3297
  source 1..85: mol_type = other RNA
  modified_base 1: mod_base = OTHER; note = 2'-Omethylguanosine phosphorothiorate
  modified_base 12: mod_base = OTHER; note = Cytosine phosphorothiorate
  modified_base 59: mod_base = OTHER; note = 2'-Omethylcytosine
  modified_base 81: mod_base = OTHER; note = 2'-Omethylcytosine phosphorothiorate

SEQ ID NO: 3392 - RNA, 86 nt, synthetic construct; identical to SEQ ID NO: 3290
  source 1..86: mol_type = other RNA
  modified_base 53: mod_base = OTHER; note = 2'-fluoroguanosine

SEQ ID NO: 3393 - DNA, 76 bp, synthetic construct; identical to SEQ ID NO: 1924
  source 1..76: mol_type = other DNA
  modified_base 1: mod_base = OTHER; note = 2'-Omethylguanosine phosphorothiorate
  modified_base 2: mod_base = OTHER; note = 2'-Omethylguanosine phosphorothiorate
  modified_base 3: mod_base = OTHER; note = 2'-Omethylcytosine
  modified_base 4: mod_base = OTHER; note = deoxyuridine phosphorothiorate
  modified_base 5: mod_base = OTHER; note = 2'-O-(2-Methoxyethyl) 5-methylcytosine phosphorothiorate
  modified_base 6: mod_base = OTHER; note = 2'-Omethylcytosine phosphorothiorate
  modified_base 7: mod_base = OTHER; note = 2'-fluoroguanosine
  modified_base 11: mod_base = OTHER; note = Cytosine phosphorothiorate
  modified_base 12: mod_base = OTHER; note = 2'-fluoroguanosine phosphorothiorate
  modified_base 17: mod_base = OTHER; note = Guanosine phosphorothiorate
  modified_base 18: mod_base = OTHER; note = 2'-O-(2-Methoxyethyl) guanosine
  modified_base 20: mod_base = OTHER; note = 2'-Omethyluridine phosphorothiorate
  modified_base 21: mod_base = OTHER; note = deoxyadenosine phosphorothiorate
  modified_base 26: mod_base = OTHER; note = Adenosine phosphorothiorate
  modified_base 27: mod_base = OTHER; note = deoxyuridine phosphorothiorate
  modified_base 28: mod_base = OTHER; note = 2'-Omethyluridine
  modified_base 40: mod_base = OTHER; note = Uridine phosphorothiorate
  modified_base 41: mod_base = OTHER; note = 2'-fluorocytosine
  modified_base 45: mod_base = OTHER; note = 2'-fluoroguanosine phosphorothiorate
  modified_base 46: mod_base = OTHER; note = 2'-Omethylguanosine
  modified_base 49: mod_base = OTHER; note = 2'-fluorocytosine
  modified_base 50: mod_base = OTHER; note = 2'-fluorocytosine
  modified_base 53: mod_base = OTHER; note = 2'-fluoroguanosine phosphorothiorate
  modified_base 56: mod_base = OTHER; note = Cytosine phosphorothiorate
  modified_base 60: mod_base = OTHER; note = 2'-O-(2-Methoxyethyl) thymine
  modified_base 61: mod_base = OTHER; note = 2'-O-(2-Methoxyethyl) 5-methylcytosine phosphorothiorate
  modified_base 63: mod_base = OTHER; note = Cytosine phosphorothiorate
  modified_base 67: mod_base = OTHER; note = 2'-Omethylguanosine
  modified_base 69: mod_base = OTHER; note = 2'-Omethyladenosine
  modified_base 70: mod_base = OTHER; note = Guanosine phosphorothiorate
  modified_base 71: mod_base = OTHER; note = 2'-fluorouridine
  modified_base 74: mod_base = OTHER; note = Cytosine phosphorothiorate
  modified_base 75: mod_base = OTHER; note = 2'-Omethylcytosine
  misc_feature 1..3: note = RNA
  misc_feature 4: note = DNA
  misc_feature 5..12: note = RNA
  misc_feature 13: note = DNA
  misc_feature 14..20: note = RNA
  misc_feature 21: note = DNA
  misc_feature 22..26: note = RNA
  misc_feature 27: note = DNA
  misc_feature 28..33: note = RNA
  misc_feature 34: note = DNA
  misc_feature 35..56: note = RNA
  misc_feature 57: note = DNA
  misc_feature 58..61: note = RNA
  misc_feature 62: note = DNA
  misc_feature 63..71: note = RNA
  misc_feature 72: note = DNA
  misc_feature 73..76: note = RNA

SEQ ID NO: 3394 - RNA, 85 nt, synthetic construct; identical to SEQ ID NO: 3297
  source 1..85: mol_type = other RNA
  modified_base 1: mod_base = OTHER; note = 2'-Omethylguanosine
  modified_base 2: mod_base = OTHER; note = 2'-Omethylcytosine
  modified_base 3: mod_base = OTHER; note = 2'-Omethyluridine
  modified_base 4: mod_base = OTHER; note = 2'-Omethylguanosine
  modified_base 5: mod_base = OTHER; note = 2'-Omethyluridine
  modified_base 6: mod_base = OTHER; note = 2'-Omethylguanosine
  modified_base 13: mod_base = OTHER; note = 2'-Omethylguanosine
  modified_base 14: mod_base = OTHER; note = 2'-Omethyladenosine
  modified_base 15: mod_base = OTHER; note = 2'-Omethylguanosine
  modified_base 16: mod_base = OTHER; note = 2'-Omethyluridine
  modified_base 17: mod_base = OTHER; note = 2'-Omethylguanosine
  modified_base 18: mod_base = OTHER; note = 2'-Omethylguanosine
  modified_base 19: mod_base = OTHER; note = Uridine phosphorothiorate
  modified_base 20: mod_base = OTHER; note = 2'-Omethyluridine
  modified_base 21: mod_base = OTHER; note = Adenosine phosphorothiorate
  modified_base 25: mod_base = OTHER; note = 2'-Omethylcytosine
  modified_base 33: mod_base = OTHER; note = Uridine phosphorothiorate
  modified_base 34: mod_base = OTHER; note = 2'-Omethyluridine
  modified_base 35: mod_base = OTHER; note = Cytosine phosphorothiorate
  modified_base 37: mod_base = OTHER; note = Adenosine phosphorothiorate
  modified_base 38: mod_base = OTHER; note = Adenosine phosphorothiorate
  modified_base 58: mod_base = OTHER; note = 2'-Omethylguanosine
  modified_base 59: mod_base = OTHER; note = 2'-Omethylcytosine
  modified_base 60: mod_base = OTHER; note = 2'-Omethyladenosine
  modified_base 61: mod_base = OTHER; note = 2'-Omethylguanosine
  modified_base 62: mod_base = OTHER; note = 2'-Omethylguanosine
  modified_base 63: mod_base = OTHER; note = Uridine phosphorothiorate
  modified_base 64: mod_base = OTHER; note = Uridine phosphorothiorate
  modified_base 70: mod_base = OTHER; note = 2'-Omethylcytosine
  modified_base 74: mod_base = OTHER; note = 2'-Omethylcytosine
  modified_base 82: mod_base = OTHER; note = 2'-Omethylguanosine

SEQ ID NO: 3395 - RNA, 76 nt, synthetic construct; identical to SEQ ID NO: 625
  source 1..76: mol_type = other RNA
  modified_base 2: mod_base = OTHER; note = 2'-Omethylguanosine
  modified_base 3: mod_base = OTHER; note = 2'-fluorocytosine phosphorothiorate
  modified_base 4: mod_base = OTHER; note = Uridine phosphorothiorate
  modified_base 6: mod_base = OTHER; note = 2'-fluorocytosine
  modified_base 13: mod_base = OTHER; note = 2'-fluorocytosine phosphorothiorate
  modified_base 14: mod_base = OTHER; note = 2'-fluoroadenosine
  modified_base 17: mod_base = OTHER; note = 2'-Omethylguanosine
  modified_base 19: mod_base = OTHER; note = Adenosine phosphorothiorate
  modified_base 20: mod_base = OTHER; note = 2'-Omethyluridine
  modified_base 25: mod_base = OTHER; note = 2'-fluorocytosine
  modified_base 28: mod_base = OTHER; note = Uridine phosphorothiorate
  modified_base 29: mod_base = OTHER; note = 2'-Omethylguanosine
  modified_base 31: mod_base = OTHER; note = 2'-fluoroadenosine
  modified_base 33: mod_base = OTHER; note = 2'-fluorouridine
  modified_base 40: mod_base = OTHER; note = Uridine phosphorothiorate
  modified_base 41: mod_base = OTHER; note = 2'-fluorocytosine
  modified_base 42: mod_base = OTHER; note = Adenosine phosphorothiorate
  modified_base 43: mod_base = OTHER; note = 2'-fluoroadenosine
  modified_base 46: mod_base = OTHER; note = 2'-fluoroguanosine phosphorothiorate
  modified_base 47: mod_base = OTHER; note = 2'-Omethyluridine
  modified_base 48: mod_base = OTHER; note = 2'-fluorouridine phosphorothiorate
  modified_base 49: mod_base = OTHER; note = 2'-Omethylcytosine
  modified_base 50: mod_base = OTHER; note = 2'-fluorocytosine
  modified_base 52: mod_base = OTHER; note = Guanosine phosphorothiorate
  modified_base 53: mod_base = OTHER; note = 2'-fluoroguanosine
  modified_base 57: mod_base = OTHER; note = 2'-fluoroguanosine
  modified_base 63: mod_base = OTHER; note = 2'-Omethylcytosine
  modified_base 64: mod_base = OTHER; note = 2'-fluoroguanosine
  modified_base 65: mod_base = OTHER; note = 2'-Omethylguanosine
  modified_base 68: mod_base = OTHER; note = 2'-Omethylguanosine
  modified_base 69: mod_base = OTHER; note = 2'-Omethyladenosine phosphorothiorate
  modified_base 70: mod_base = OTHER; note = 2'-fluoroguanosine
  modified_base 71: mod_base = OTHER; note = 2'-Omethyluridine
  modified_base 72: mod_base = OTHER; note = 2'-Omethylcytosine

SEQ ID NO: 3396 - RNA, 76 nt, synthetic construct; identical to SEQ ID NO: 625
  source 1..76: mol_type = other RNA
  modified_base 60: mod_base = OTHER; note = Thymine

SEQ ID NO: 3397 - RNA, 85 nt, synthetic construct; identical to SEQ ID NO: 3301
  source 1..85: mol_type = other RNA
  modified_base 1: mod_base = OTHER; note = 2'-Omethylguanosine phosphorothiorate
  modified_base 2: mod_base = OTHER; note = Cytosine phosphorothiorate
  modified_base 3: mod_base = OTHER; note = 2'-Omethyluridine phosphorothiorate
  modified_base 4: mod_base = OTHER; note = 2'-Omethylguanosine phosphorothiorate
  modified_base 10: mod_base = OTHER; note = 2'-fluoroguanosine
  modified_base 18: mod_base = OTHER; note = 2'-Omethylguanosine
  modified_base 20: mod_base = OTHER; note = Uridine phosphorothiorate
  modified_base 26: mod_base = OTHER; note = 2'-fluoroguanosine phosphorothiorate
  modified_base 27: mod_base = OTHER; note = 2'-fluorouridine
  modified_base 29: mod_base = OTHER; note = 2'-fluoroguanosine phosphorothiorate
  modified_base 33: mod_base = OTHER; note = 2'-fluorouridine
  modified_base 42: mod_base = OTHER; note = 2'-fluoroadenosine
  modified_base 52: mod_base = OTHER; note = 2'-fluorocytosine
  modified_base 53: mod_base = OTHER; note = 2'-fluorocytosine
  modified_base 57: mod_base = OTHER; note = 2'-Omethylcytosine
  modified_base 60: mod_base = OTHER; note = Adenosine phosphorothiorate
  modified_base 73: mod_base = OTHER; note = 2'-Omethylguanosine
  modified_base 82: mod_base = OTHER; note = 2'-fluoroguanosine phosphorothiorate

SEQ ID NO: 3398 - RNA, 85 nt, synthetic construct; identical to SEQ ID NO: 3288
  source 1..85: mol_type = other RNA
  modified_base 1: mod_base = OTHER; note = 2'-Omethylcytosine
  modified_base 12: mod_base = OTHER; note = Guanosine phosphorothiorate
  modified_base 17: mod_base = OTHER; note = 2'-Omethylguanosine
  modified_base 26: mod_base = OTHER; note = Uridine phosphorothiorate
  modified_base 30: mod_base = OTHER; note = 2'-fluoroadenosine
  modified_base 34: mod_base = OTHER; note = 2'-fluorocytosine
  modified_base 39: mod_base = OTHER; note = Cytosine phosphorothiorate
  modified_base 45: mod_base = OTHER; note = 2'-fluoroguanosine phosphorothiorate
  modified_base 48: mod_base = OTHER; note = Adenosine phosphorothiorate
  modified_base 56: mod_base = OTHER; note = 2'-fluoroguanosine
  modified_base 57: mod_base = OTHER; note = 2'-Omethylcytosine
  modified_base 58: mod_base = OTHER; note = 2'-Omethylguanosine
  modified_base 60: mod_base = OTHER; note = 2'-fluoroguanosine phosphorothiorate
  modified_base 65: mod_base = OTHER; note = Cytosine phosphorothiorate
  modified_base 72: mod_base = OTHER; note = 2'-fluorocytosine
  modified_base 76: mod_base = OTHER; note = 2'-fluorocytosine phosphorothiorate
  modified_base 79: mod_base = OTHER; note = 2'-Omethylguanosine
  modified_base 84: mod_base = OTHER; note = Cytosine phosphorothiorate
  modified_base 85: mod_base = OTHER; note = 2'-Omethyladenosine

SEQ ID NO: 3399 - RNA, 76 nt, synthetic construct; identical to SEQ ID NO: 625
  source 1..76: mol_type = other RNA
  modified_base 1: mod_base = OTHER; note = 2'-Omethylguanosine phosphorothiorate
  modified_base 2: mod_base = OTHER; note = 2'-Omethylguanosine
  modified_base 3: mod_base = OTHER; note = 2'-Omethylcytosine
  modified_base 4: mod_base = OTHER; note = 2'-Omethyluridine
  modified_base 5: mod_base = OTHER; note = 2'-Omethylcytosine
  modified_base 6: mod_base = OTHER; note = 2'-Omethylcytosine
  modified_base 10: mod_base = OTHER; note = 2'-Omethylguanosine
  modified_base 11: mod_base = OTHER; note = 2'-Omethylcytosine
  modified_base 12: mod_base = OTHER; note = 2'-Omethylguanosine
  modified_base 13: mod_base = OTHER; note = 2'-Omethylcytosine
  modified_base 17: mod_base = OTHER; note = 2'-Omethylguanosine
  modified_base 22: mod_base = OTHER; note = 2'-Omethylguanosine
  modified_base 23: mod_base = OTHER; note = 2'-Omethylcytosine
  modified_base 24: mod_base = OTHER; note = 2'-Omethylguanosine
  modified_base 25: mod_base = OTHER; note = 2'-Omethylcytosine
  modified_base 33: mod_base = OTHER; note = 2'-fluorouridine
  modified_base 35: mod_base = OTHER; note = Cytosine phosphorothiorate
  modified_base 37: mod_base = OTHER; note = Adenosine phosphorothiorate
  modified_base 38: mod_base = OTHER; note = Adenosine phosphorothiorate
  modified_base 49: mod_base = OTHER; note = 2'-Omethylcytosine
  modified_base 50: mod_base = OTHER; note = 2'-Omethylcytosine
  modified_base 51: mod_base = OTHER; note = 2'-Omethylguanosine
  modified_base 52: mod_base = OTHER; note = 2'-Omethylguanosine
  modified_base 53: mod_base = OTHER; note = 2'-Omethylguanosine
  modified_base 54: mod_base = OTHER; note = 2'-Omethyluridine
  modified_base 61: mod_base = OTHER; note = 2'-Omethylcytosine
  modified_base 62: mod_base = OTHER; note = 2'-Omethylcytosine
  modified_base 63: mod_base = OTHER; note = 2'-fluorocytosine
  modified_base 64: mod_base = OTHER; note = 2'-Omethylguanosine
  modified_base 65: mod_base = OTHER; note = 2'-Omethylguanosine
  modified_base 66: mod_base = OTHER; note = 2'-Omethylcytosine
  modified_base 67: mod_base = OTHER; note = 2'-Omethylguanosine
  modified_base 68: mod_base = OTHER; note = 2'-Omethylguanosine
  modified_base 69: mod_base = OTHER; note = 2'-fluoroadenosine
  modified_base 71: mod_base = OTHER; note = 2'-Omethyluridine
  modified_base 73: mod_base = OTHER; note = 2'-Omethylguanosine
  modified_base 75: mod_base = OTHER; note = 2'-fluorocytosine phosphorothiorate

SEQ ID NO: 3400 - RNA, 85 nt, synthetic construct; identical to SEQ ID NO: 3297
  source 1..85: mol_type = other RNA
  modified_base 1: mod_base = OTHER; note = 2'-Omethylguanosine phosphorothiorate
  modified_base 11: mod_base = OTHER; note = 2'-Omethylcytosine
  modified_base 19: mod_base = OTHER; note = Uridine phosphorothiorate
  modified_base 28: mod_base = OTHER; note = 2'-fluorouridine
  modified_base 47: mod_base = OTHER; note = Guanosine phosphorothiorate
  modified_base 82: mod_base = OTHER; note = 2'-Omethylguanosine phosphorothiorate

SEQ ID NO: 3401 - RNA, 85 nt, synthetic construct
  source 1..85: mol_type = other RNA
gctgtgatggccgagtggttaaggcgttggacttcaaatccaatggggactccctgcgcaggttcgaatcctgctcacagcgcca

SEQ ID NO: 3402 - RNA, 86 nt, synthetic construct; identical to SEQ ID NO: 3290
  source 1..86: mol_type = other RNA
  modified_base 19: mod_base = OTHER; note = 2'-Omethyluridine

SEQ ID NO: 3403 - RNA, 76 nt, synthetic construct; identical to SEQ ID NO: 3295
  source 1..76: mol_type = other RNA
  modified_base 1: mod_base = OTHER; note = 2'-Omethylcytosine
  modified_base 2: mod_base = OTHER; note = 2'-fluorocytosine phosphorothiorate
  modified_base 15: mod_base = OTHER; note = 2'-Omethylguanosine
  modified_base 31: mod_base = OTHER; note = 2'-fluoroadenosine phosphorothiorate
  modified_base 50: mod_base = OTHER; note = 2'-Omethylcytosine
  modified_base 52: mod_base = OTHER; note = 2'-Omethylguanosine phosphorothiorate
  modified_base 71: mod_base = OTHER; note = 2'-fluoroguanosine

SEQ ID NO: 3404 - RNA, 76 nt, synthetic construct; identical to SEQ ID NO: 625
  source 1..76: mol_type = other RNA
  modified_base 2: mod_base = OTHER; note = Guanosine phosphorothiorate
  modified_base 6: mod_base = OTHER; note = Cytosine phosphorothiorate
  modified_base 7: mod_base = OTHER; note = Guanosine phosphorothiorate
  modified_base 15: mod_base = OTHER; note = 2'-fluoroadenosine phosphorothiorate
  modified_base 16: mod_base = OTHER; note = 2'-Omethyluridine
  modified_base 17: mod_base = OTHER; note = Guanosine phosphorothiorate
  modified_base 20: mod_base = OTHER; note = 2'-fluorouridine
  modified_base 22: mod_base = OTHER; note = 2'-Omethylguanosine
  modified_base 24: mod_base = OTHER; note = 2'-fluoroguanosine
  modified_base 25: mod_base = OTHER; note = 2'-fluorocytosine phosphorothiorate
  modified_base 26: mod_base = OTHER; note = 2'-fluoroadenosine phosphorothiorate
  modified_base 27: mod_base = OTHER; note = 2'-fluorouridine phosphorothiorate
  modified_base 28: mod_base = OTHER; note = Uridine phosphorothiorate
  modified_base 29: mod_base = OTHER; note = 2'-fluoroguanosine phosphorothiorate
  modified_base 30: mod_base = OTHER; note = 2'-Omethylguanosine
  modified_base 38: mod_base = OTHER; note = 2'-fluoroadenosine
  modified_base 39: mod_base = OTHER; note = 2'-fluorouridine
  modified_base 40: mod_base = OTHER; note = 2'-fluorouridine
  modified_base 43: mod_base = OTHER; note = 2'-fluoroadenosine
  modified_base 46: mod_base = OTHER; note = 2'-fluoroguanosine
  modified_base 48: mod_base = OTHER; note = 2'-Omethyluridine
  modified_base 49: mod_base = OTHER; note = 2'-Omethylcytosine
  modified_base 52: mod_base = OTHER; note = 2'-Omethylguanosine
  modified_base 53: mod_base = OTHER; note = 2'-Omethylguanosine
  modified_base 56: mod_base = OTHER; note = 2'-Omethylcytosine phosphorothiorate
  modified_base 57: mod_base = OTHER; note = 2'-Omethylguanosine phosphorothiorate
  modified_base 60: mod_base = OTHER; note = 2'-fluorouridine phosphorothiorate
  modified_base 63: mod_base = OTHER; note = 2'-fluorocytosine
  modified_base 64: mod_base = OTHER; note = 2'-Omethylguanosine
  modified_base 65: mod_base = OTHER; note = 2'-fluoroguanosine
  modified_base 66: mod_base = OTHER; note = 2'-Omethylcytosine
  modified_base 74: mod_base = OTHER; note = 2'-Omethylcytosine

SEQ ID NO: 3405 - RNA, 76 nt, synthetic construct; identical to SEQ ID NO: 625
  source 1..76: mol_type = other RNA
  modified_base 1: mod_base = OTHER; note = 2'-fluoroguanosine
  modified_base 2: mod_base = OTHER; note = 2'-fluoroguanosine
  modified_base 3: mod_base = OTHER; note = 2'-fluorocytosine
  modified_base 4: mod_base = OTHER; note = 2'-fluorouridine
  modified_base 5: mod_base = OTHER; note = 2'-fluorocytosine
  modified_base 6: mod_base = OTHER; note = 2'-fluorocytosine
  modified_base 7: mod_base = OTHER; note = 2'-fluoroguanosine
  modified_base 66: mod_base = OTHER; note = 2'-fluorocytosine
  modified_base 67: mod_base = OTHER; note = 2'-fluoroguanosine
  modified_base 68: mod_base = OTHER; note = 2'-fluoroguanosine
  modified_base 69: mod_base = OTHER; note = 2'-fluoroadenosine
  modified_base 70: mod_base = OTHER; note = 2'-fluoroguanosine
  modified_base 71: mod_base = OTHER; note = 2'-fluorouridine
  modified_base 72: mod_base = OTHER; note = 2'-fluorocytosine

SEQ ID NO: 3406 - RNA, 85 nt, synthetic construct; identical to SEQ ID NO: 3288
  source 1..85: mol_type = other RNA
  modified_base 3: mod_base = OTHER; note = 2'-Omethyladenosine
  modified_base 44: mod_base = OTHER; note = 2'-Omethylguanosine
  modified_base 47: mod_base = OTHER; note = 2'-Omethylcytosine
  modified_base 52: mod_base = OTHER; note = Guanosine phosphorothiorate
  modified_base 64: mod_base = OTHER; note = Uridine phosphorothiorate
  modified_base 84: mod_base = OTHER; note = 2'-Omethylcytosine
  modified_base 85: mod_base = OTHER; note = 2'-Omethyladenosine

SEQ ID NO: 3407 - RNA, 76 nt, synthetic construct; identical to SEQ ID NO: 625
  source 1..76: mol_type = other RNA
  modified_base 1: mod_base = OTHER; note = 2'-fluoroguanosine
  modified_base 2: mod_base = OTHER; note = 2'-Omethylguanosine phosphorothiorate
  modified_base 3: mod_base = OTHER; note = 2'-Omethylcytosine
  modified_base 5: mod_base = OTHER; note = 2'-fluorocytosine
  modified_base 8: mod_base = OTHER; note = Uridine phosphorothiorate
  modified_base 10: mod_base = OTHER; note = 2'-fluoroguanosine
  modified_base 13: mod_base = OTHER; note = 2'-Omethylcytosine phosphorothiorate
  modified_base 17: mod_base = OTHER; note = 2'-Omethylguanosine
  modified_base 20: mod_base = OTHER; note = 2'-fluorouridine
  modified_base 21: mod_base = OTHER; note = Adenosine phosphorothiorate
  modified_base 22: mod_base = OTHER; note = 2'-fluoroguanosine
  modified_base 23: mod_base = OTHER; note = 2'-fluorocytosine
  modified_base 25: mod_base = OTHER; note = 2'-Omethylcytosine
  modified_base 27: mod_base = OTHER; note = Uridine phosphorothiorate
  modified_base 28: mod_base = OTHER; note = 2'-fluorouridine
  modified_base 29: mod_base = OTHER; note = Guanosine phosphorothiorate
  modified_base 30: mod_base = OTHER; note = 2'-fluoroguanosine
  modified_base 38: mod_base = OTHER; note = 2'-Omethyladenosine
  modified_base 41: mod_base = OTHER; note = 2'-Omethylcytosine
  modified_base 42: mod_base = OTHER; note = 2'-Omethyladenosine
  modified_base 43: mod_base = OTHER; note = 2'-fluoroadenosine phosphorothiorate
  modified_base 49: mod_base = OTHER; note = 2'-fluorocytosine
  modified_base 50: mod_base = OTHER; note = 2'-fluorocytosine
  modified_base 52: mod_base = OTHER; note = 2'-Omethylguanosine
  modified_base 53: mod_base = OTHER; note = 2'-Omethylguanosine
  modified_base 56: mod_base = OTHER; note = Cytosine phosphorothiorate
  modified_base 57: mod_base = OTHER; note = 2'-Omethylguanosine
  modified_base 58: mod_base = OTHER; note = 2'-fluoroadenosine
  modified_base 59: mod_base = OTHER; note = 2'-fluoroguanosine
  modified_base 63: mod_base = OTHER; note = 2'-Omethylcytosine
  modified_base 66: mod_base = OTHER; note = 2'-Omethylcytosine
  modified_base 67: mod_base = OTHER; note = Guanosine phosphorothiorate
  modified_base 68: mod_base = OTHER; note = 2'-fluoroguanosine
  modified_base 69: mod_base = OTHER; note = 2'-Omethyladenosine
  modified_base 70: mod_base = OTHER; note = 2'-Omethylguanosine
  modified_base 72: mod_base = OTHER; note = 2'-fluorocytosine
  modified_base 73: mod_base = OTHER; note = 2'-fluoroguanosine
  modified_base 75: mod_base = OTHER; note = 2'-Omethylcytosine
  modified_base 76: mod_base = OTHER; note = 2'-Omethyladenosine

SEQ ID NO: 3408 - RNA, 75 nt, synthetic construct; identical to SEQ ID NO: 1045
  source 1..75: mol_type = other RNA
  modified_base 2: mod_base = OTHER; note = 2'-Omethylguanosine phosphorothiorate
  modified_base 3: mod_base = OTHER; note = 2'-Omethyluridine phosphorothiorate
  modified_base 4: mod_base = OTHER; note = 2'-Omethyluridine phosphorothiorate
  modified_base 5: mod_base = OTHER; note = 2'-Omethylcytosine phosphorothiorate
  modified_base 6: mod_base = OTHER; note = 2'-Omethylcytosine
  modified_base 10: mod_base = OTHER; note = 2'-Omethylguanosine
  modified_base 15: mod_base = OTHER; note = 2'-Omethyladenosine
  modified_base 16: mod_base = OTHER; note = 2'-Omethyluridine
  modified_base 17: mod_base = OTHER; note = 2'-Omethylguanosine
  modified_base 18: mod_base = OTHER; note = 2'-Omethylguanosine
  modified_base 28: mod_base = OTHER; note = 2'-Omethyluridine phosphorothiorate
  modified_base 39: mod_base = OTHER; note = 2'-Omethyluridine
  modified_base 45: mod_base = OTHER; note = 2'-Omethylguanosine
  modified_base 52: mod_base = OTHER; note = 2'-Omethylguanosine phosphorothiorate
  modified_base 53: mod_base = OTHER; note = 2'-Omethyluridine phosphorothiorate
  modified_base 60: mod_base = OTHER; note = 2'-Omethylcytosine
  modified_base 61: mod_base = OTHER; note = 2'-Omethyluridine
  modified_base 65: mod_base = OTHER; note = 2'-Omethyluridine
  modified_base 66: mod_base = OTHER; note = 2'-Omethylguanosine
  modified_base 67: mod_base = OTHER; note = 2'-Omethylguanosine
  modified_base 72: mod_base = OTHER; note = 2'-Omethyluridine
  modified_base 73: mod_base = OTHER; note = Cytosine phosphorothiorate
  modified_base 74: mod_base = OTHER; note = 2'-Omethylcytosine phosphorothiorate
  modified_base 75: mod_base = OTHER; note = 2'-Omethyladenosine

SEQ ID NO: 3409 - RNA, 74 nt, synthetic construct; identical to SEQ ID NO: 3293
  source 1..74: mol_type = other RNA
  modified_base 1: mod_base = OTHER; note = 2'-Omethyladenosine
  modified_base 9: mod_base = OTHER; note = Guanosine phosphorothiorate
  modified_base 11: mod_base = OTHER; note = 2'-Omethylguanosine phosphorothiorate
  modified_base 25: mod_base = OTHER; note = 2'-Omethyluridine
  modified_base 42: mod_base = OTHER; note = 2'-Omethyladenosine
  modified_base 48: mod_base = OTHER; note = 2'-fluorocytosine
  modified_base 62: mod_base = OTHER; note = Guanosine phosphorothiorate
  modified_base 72: mod_base = OTHER; note = Cytosine phosphorothiorate
  modified_base 73: mod_base = OTHER; note = 2'-Omethylcytosine

SEQ ID NO: 3410 - RNA, 76 nt, synthetic construct; identical to SEQ ID NO: 3295
  source 1..76: mol_type = other RNA
  modified_base 1: mod_base = OTHER; note = 2'-Omethylcytosine
  modified_base 2: mod_base = OTHER; note = 2'-Omethylcytosine
  modified_base 4: mod_base = OTHER; note = 2'-Omethyluridine phosphorothiorate
  modified_base 6: mod_base = OTHER; note = 2'-fluoroguanosine phosphorothiorate
  modified_base 7: mod_base = OTHER; note = 2'-Omethyladenosine phosphorothiorate
  modified_base 8: mod_base = OTHER; note = 2'-fluorouridine
  modified_base 9: mod_base = OTHER; note = 2'-Omethyladenosine phosphorothiorate
  modified_base 17: mod_base = OTHER; note = 2'-Omethyluridine
  modified_base 25: mod_base = OTHER; note = Cytosine phosphorothiorate
  modified_base 26: mod_base = OTHER; note = 2'-fluoroguanosine
  modified_base 27: mod_base = OTHER; note = 2'-Omethylguanosine
  modified_base 28: mod_base = OTHER; note = Adenosine phosphorothiorate
  modified_base 38: mod_base = OTHER; note = 2'-fluoroadenosine
  modified_base 39: mod_base = OTHER; note = Uridine phosphorothiorate
  modified_base 53: mod_base = OTHER; note = Guanosine phosphorothiorate
  modified_base 54: mod_base = OTHER; note = 2'-fluorouridine phosphorothiorate
  modified_base 56: mod_base = OTHER; note = 2'-fluorocytosine phosphorothiorate
  modified_base 70: mod_base = OTHER; note = 2'-fluoroadenosine
  modified_base 75: mod_base = OTHER; note = Cytosine phosphorothiorate

SEQ ID NO: 3411 - RNA, 75 nt, synthetic construct; identical to SEQ ID NO: 3311
  source 1..75: mol_type = other RNA
  modified_base 1: mod_base = OTHER; note = 2'-fluoroguanosine phosphorothiorate
  modified_base 2: mod_base = OTHER; note = 2'-Omethylguanosine phosphorothiorate
  modified_base 12: mod_base = OTHER; note = 2'-Omethylguanosine
  modified_base 13: mod_base = OTHER; note = Uridine phosphorothiorate
  modified_base 16: mod_base = OTHER; note = 2'-fluorouridine
  modified_base 22: mod_base = OTHER; note = 2'-fluoroguanosine
  modified_base 23: mod_base = OTHER; note = 2'-fluorocytosine
  modified_base 28: mod_base = OTHER; note = 2'-fluorouridine
  modified_base 29: mod_base = OTHER; note = 2'-Omethylguanosine
  modified_base 44: mod_base = OTHER; note = 2'-fluorocytosine
  modified_base 53: mod_base = OTHER; note = 2'-fluorouridine phosphorothiorate
  modified_base 65: mod_base = OTHER; note = Uridine phosphorothiorate
  modified_base 66: mod_base = OTHER; note = Guanosine phosphorothiorate
  modified_base 67: mod_base = OTHER; note = 2'-fluoroguanosine
  modified_base 73: mod_base = OTHER; note = Cytosine phosphorothiorate
  modified_base 74: mod_base = OTHER; note = 2'-Omethylcytosine
  modified_base 75: mod_base = OTHER; note = 2'-fluoroadenosine

SEQ ID NO: 3412 - RNA, 76 nt, synthetic construct; identical to SEQ ID NO: 625
  source 1..76: mol_type = other RNA
  modified_base 1: mod_base = OTHER; note = 2'-Omethylguanosine
  modified_base 2: mod_base = OTHER; note = 2'-Omethylguanosine
  modified_base 18: mod_base = OTHER; note = 2'-Omethylguanosine
  modified_base 33: mod_base = OTHER; note = 2'-fluorouridine
  modified_base 35: mod_base = OTHER; note = Cytosine phosphorothiorate
  modified_base 38: mod_base = OTHER; note = Adenosine phosphorothiorate
  modified_base 52: mod_base = OTHER; note = 2'-Omethylguanosine
  modified_base 57: mod_base = OTHER; note = 2'-Omethylguanosine
  modified_base 62: mod_base = OTHER; note = 2'-Omethylcytosine
  modified_base 73: mod_base = OTHER; note = 2'-Omethylguanosine
  modified_base 75: mod_base = OTHER; note = 2'-fluorocytosine phosphorothiorate

SEQ ID NO: 3413 - RNA, 76 nt, synthetic construct; identical to SEQ ID NO: 625
  source 1..76: mol_type = other RNA
  modified_base 3: mod_base = OTHER; note = Cytosine phosphorothiorate
  modified_base 4: mod_base = OTHER; note = 2'-Omethyluridine
  modified_base 10: mod_base = OTHER; note = 2'-fluoroguanosine
  modified_base 12: mod_base = OTHER; note = 2'-fluoroguanosine
  modified_base 14: mod_base = OTHER; note = Adenosine phosphorothiorate
  modified_base 15: mod_base = OTHER; note = 2'-fluoroadenosine
  modified_base 16: mod_base = OTHER; note = Uridine phosphorothiorate
  modified_base 17: mod_base = OTHER; note = 2'-Omethylguanosine
  modified_base 20: mod_base = OTHER; note = 2'-fluorouridine
  modified_base 22: mod_base = OTHER; note = 2'-Omethylguanosine
  modified_base 23: mod_base = OTHER; note = 2'-Omethylcytosine
  modified_base 24: mod_base = OTHER; note = 2'-fluoroguanosine
  modified_base 26: mod_base = OTHER; note = 2'-fluoroadenosine phosphorothiorate
  modified_base 27: mod_base = OTHER; note = 2'-fluorouridine
  modified_base 29: mod_base = OTHER; note = 2'-fluoroguanosine
  modified_base 31: mod_base = OTHER; note = 2'-fluoroadenosine
  modified_base 33: mod_base = OTHER; note = Uridine phosphorothiorate
  modified_base 34: mod_base = OTHER; note = Uridine phosphorothiorate
  modified_base 36: mod_base = OTHER; note = Adenosine phosphorothiorate
  modified_base 39: mod_base = OTHER; note = 2'-fluorouridine
  modified_base 40: mod_base = OTHER; note = 2'-fluorouridine
  modified_base 42: mod_base = OTHER; note = 2'-fluoroadenosine phosphorothiorate
  modified_base 43: mod_base = OTHER; note = 2'-Omethyladenosine
  modified_base 45: mod_base = OTHER; note = 2'-fluoroguanosine phosphorothiorate
  modified_base 47: mod_base = OTHER; note = 2'-Omethyluridine
  modified_base 48: mod_base = OTHER; note = 2'-Omethyluridine
  modified_base 51: mod_base = OTHER; note = Guanosine phosphorothiorate
  modified_base 57: mod_base = OTHER; note = Guanosine phosphorothiorate
  modified_base 62: mod_base = OTHER; note = 2'-fluorocytosine
  modified_base 63: mod_base = OTHER; note = Cytosine phosphorothiorate
  modified_base 64: mod_base = OTHER; note = 2'-fluoroguanosine phosphorothiorate
  modified_base 65: mod_base = OTHER; note = 2'-fluoroguanosine
  modified_base 67: mod_base = OTHER; note = Guanosine phosphorothiorate
  modified_base 68: mod_base = OTHER; note = 2'-fluoroguanosine
  modified_base 74: mod_base = OTHER; note = 2'-fluorocytosine phosphorothiorate
  modified_base 75: mod_base = OTHER; note = 2'-fluorocytosine

SEQ ID NO: 3414 - RNA, 76 nt, synthetic construct
  source 1..76: mol_type = other RNA
ggcccgatggcgcaatggatagcgcattggacttcaaattcaaaggtttcgggttcgagtcccgatcgggtcgcca

SEQ ID NO: 3415 - RNA, 75 nt, synthetic construct; identical to SEQ ID NO: 1045
  source 1..75: mol_type = other RNA
  modified_base 1: mod_base = OTHER; note = 2'-fluoroguanosine phosphorothiorate
  modified_base 2: mod_base = OTHER; note = 2'-Omethylguanosine phosphorothiorate
  modified_base 12: mod_base = OTHER; note = 2'-Omethylguanosine
  modified_base 13: mod_base = OTHER; note = Uridine phosphorothiorate
  modified_base 16: mod_base = OTHER; note = 2'-fluorouridine
  modified_base 22: mod_base = OTHER; note = 2'-fluoroguanosine
  modified_base 23: mod_base = OTHER; note = 2'-fluorocytosine
  modified_base 28: mod_base = OTHER; note = 2'-fluorouridine
  modified_base 29: mod_base = OTHER; note = 2'-Omethylguanosine
  modified_base 44: mod_base = OTHER; note = 2'-fluorocytosine
  modified_base 53: mod_base = OTHER; note = 2'-fluorouridine phosphorothiorate
  modified_base 65: mod_base = OTHER; note = Uridine phosphorothiorate
  modified_base 66: mod_base = OTHER; note = Guanosine phosphorothiorate
  modified_base 67: mod_base = OTHER; note = 2'-fluoroguanosine
  modified_base 73: mod_base = OTHER; note = Cytosine phosphorothiorate
  modified_base 74: mod_base = OTHER; note = 2'-Omethylcytosine
  modified_base 75: mod_base = OTHER; note = 2'-fluoroadenosine

SEQ ID NO: 3416 - RNA, 76 nt, synthetic construct; identical to SEQ ID NO: 625
  source 1..76: mol_type = other RNA
  modified_base 1: mod_base = OTHER; note = 2'-Omethylguanosine
  modified_base 2: mod_base = OTHER; note = 2'-Omethylguanosine
  modified_base 5: mod_base = OTHER; note = Cytosine phosphorothiorate
  modified_base 6: mod_base = OTHER; note = Cytosine phosphorothiorate
  modified_base 10: mod_base = OTHER; note = Guanosine phosphorothiorate
  modified_base 11: mod_base = OTHER; note = 2'-fluorocytosine
  modified_base 12: mod_base = OTHER; note = 2'-Omethylguanosine
  modified_base 13: mod_base = OTHER; note = 2'-Omethylcytosine
  modified_base 14: mod_base = OTHER; note = Adenosine phosphorothiorate
  modified_base 22: mod_base = OTHER; note = 2'-fluoroguanosine phosphorothiorate
  modified_base 24: mod_base = OTHER; note = 2'-Omethylguanosine phosphorothiorate
  modified_base 25: mod_base = OTHER; note = 2'-Omethylcytosine
  modified_base 27: mod_base = OTHER; note = 2'-Omethyluridine
  modified_base 29: mod_base = OTHER; note = 2'-fluoroguanosine phosphorothiorate
  modified_base 30: mod_base = OTHER; note = 2'-fluoroguanosine phosphorothiorate
  modified_base 31: mod_base = OTHER; note = 2'-fluoroadenosine
  modified_base 33: mod_base = OTHER; note = 2'-fluorouridine
  modified_base 34: mod_base = OTHER; note = 2'-fluorouridine
  modified_base 38: mod_base = OTHER; note = 2'-fluoroadenosine
  modified_base 49: mod_base = OTHER; note = 2'-fluorocytosine
  modified_base 50: mod_base = OTHER; note = 2'-Omethylcytosine
  modified_base 51: mod_base = OTHER; note = 2'-Omethylguanosine
  modified_base 52: mod_base = OTHER; note = Guanosine phosphorothiorate
  modified_base 53: mod_base = OTHER; note = 2'-Omethylguanosine
  modified_base 54: mod_base = OTHER; note = 2'-Omethyluridine
  modified_base 60: mod_base = OTHER; note = 2'-fluorouridine
  modified_base 61: mod_base = OTHER; note = 2'-Omethylcytosine phosphorothiorate
  modified_base 62: mod_base = OTHER; note = 2'-fluorocytosine
  modified_base 63: mod_base = OTHER; note = 2'-fluorocytosine
  modified_base 70: mod_base = OTHER; note = 2'-fluoroguanosine
  modified_base 71: mod_base = OTHER; note = 2'-fluorouridine phosphorothiorate
  modified_base 76: mod_base = OTHER; note = 2'-fluoroadenosine

SEQ ID NO: 3417 - RNA, 75 nt, synthetic construct; identical to SEQ ID NO: 3299
  source 1..75: mol_type = other RNA
  modified_base 5: mod_base = OTHER; note = 2'-Omethylguanosine phosphorothiorate
  modified_base 10: mod_base = OTHER; note = Cytosine phosphorothiorate
  modified_base 21: mod_base = OTHER; note = 2'-fluoroguanosine
  modified_base 22: mod_base = OTHER; note = 2'-fluoroadenosine
  modified_base 25: mod_base = OTHER; note = Adenosine phosphorothiorate
  modified_base 37: mod_base = OTHER; note = 2'-fluoroadenosine
  modified_base 47: mod_base = OTHER; note = 2'-fluorocytosine
  modified_base 49: mod_base = OTHER; note = Adenosine phosphorothiorate
  modified_base 60: mod_base = OTHER; note = 2'-fluorocytosine
  modified_base 70: mod_base = OTHER; note = Guanosine phosphorothiorate
  modified_base 73: mod_base = OTHER; note = Cytosine phosphorothiorate
  modified_base 74: mod_base = OTHER; note = 2'-Omethylcytosine

SEQ ID NO: 3418 - RNA, 76 nt, synthetic construct; identical to SEQ ID NO: 625
  source 1..76: mol_type = other RNA
  modified_base 14: mod_base = OTHER; note = 2'-Omethyladenosine
  modified_base 15: mod_base = OTHER; note = 2'-Omethyladenosine
  modified_base 16: mod_base = OTHER; note = 2'-Omethyluridine
  modified_base 17: mod_base = OTHER; note = 2'-Omethylguanosine
  modified_base 18: mod_base = OTHER; note = 2'-Omethylguanosine
  modified_base 19: mod_base = OTHER; note = 2'-Omethyladenosine
  modified_base 20: mod_base = OTHER; note = 2'-Omethyluridine
  modified_base 44: mod_base = OTHER; note = 2'-Omethyladenosine
  modified_base 45: mod_base = OTHER; note = 2'-Omethylguanosine
  modified_base 46: mod_base = OTHER; note = 2'-Omethylguanosine
  modified_base 54: mod_base = OTHER; note = Uridine phosphorothiorate
  modified_base 55: mod_base = OTHER; note = Uridine phosphorothiorate
  modified_base 56: mod_base = OTHER; note = Cytosine phosphorothiorate
  modified_base 57: mod_base = OTHER; note = Guanosine phosphorothiorate
  modified_base 61: mod_base = OTHER; note = 2'-Omethylcytosine
  modified_base 62: mod_base = OTHER; note = 2'-Omethylcytosine
  modified_base 63: mod_base = OTHER; note = 2'-Omethylcytosine
  modified_base 64: mod_base = OTHER; note = 2'-Omethylguanosine
  modified_base 65: mod_base = OTHER; note = 2'-Omethylguanosine
  modified_base 66: mod_base = OTHER; note = 2'-Omethylcytosine
  modified_base 67: mod_base = OTHER; note = 2'-Omethylguanosine
  modified_base 68: mod_base = OTHER; note = 2'-Omethylguanosine
  modified_base 69: mod_base = OTHER; note = 2'-Omethyladenosine

SEQ ID NO: 3419 - RNA, 76 nt, synthetic construct
  source 1..76: mol_type = other RNA
  modified_base 1: mod_base = OTHER; note = 2'-Omethylguanosine phosphorothiorate
  modified_base 2: mod_base = OTHER; note = 2'-Omethylguanosine phosphorothiorate
  modified_base 3: mod_base = OTHER; note = 2'-Omethylcytosine
  modified_base 4: mod_base = OTHER; note = 2'-Omethyluridine
  modified_base 5: mod_base = OTHER; note = 2'-Omethylcytosine
  modified_base 6: mod_base = OTHER; note = 2'-Omethylcytosine
  modified_base 10: mod_base = OTHER; note = 2'-Omethylguanosine
  modified_base 11: mod_base = OTHER; note = 2'-Omethylcytosine
  modified_base 12: mod_base = OTHER; note = 2'-Omethylguanosine
  modified_base 13: mod_base = OTHER; note = 2'-Omethylcytosine
  modified_base 17: mod_base = OTHER; note = 2'-Omethylguanosine
  modified_base 18: mod_base = OTHER; note = 2'-Omethylguanosine
  modified_base 22: mod_base = OTHER; note = 2'-Omethylguanosine
  modified_base 23: mod_base = OTHER; note = 2'-Omethylcytosine
  modified_base 24: mod_base = OTHER; note = 2'-Omethylguanosine
  modified_base 25: mod_base = OTHER; note = 2'-Omethylcytosine
  modified_base 33: mod_base = OTHER; note = 2'-fluorouridine
  modified_base 35: mod_base = OTHER; note = Cytosine phosphorothiorate
  modified_base 37: mod_base = OTHER; note = Adenosine phosphorothiorate
  modified_base 38: mod_base = OTHER; note = Adenosine phosphorothiorate
  modified_base 41: mod_base = OTHER; note = 2'-fluoroguanosine
  modified_base 42: mod_base = OTHER; note = 2'-Omethylguanosine
  modified_base 43: mod_base = OTHER; note = 2'-Omethyluridine
  modified_base 44: mod_base = OTHER; note = 2'-fluoroadenosine
  modified_base 49: mod_base = OTHER; note = 2'-Omethylcytosine
  modified_base 50: mod_base = OTHER; note = 2'-Omethylcytosine
  modified_base 51: mod_base = OTHER; note = 2'-Omethylguanosine
  modified_base 52: mod_base = OTHER; note = 2'-Omethylguanosine
  modified_base 53: mod_base = OTHER; note = 2'-Omethylguanosine
  modified_base 54: mod_base = OTHER; note = Uridine phosphorothiorate
  modified_base 55: mod_base = OTHER; note = Uridine phosphorothiorate
  modified_base 61: mod_base = OTHER; note = 2'-Omethylcytosine
  modified_base 62: mod_base = OTHER; note = 2'-Omethylcytosine
  modified_base 63: mod_base = OTHER; note = 2'-fluorocytosine
  modified_base 64: mod_base = OTHER; note = 2'-Omethylguanosine
  modified_base 65: mod_base = OTHER; note = 2'-Omethylguanosine
  modified_base 66: mod_base = OTHER; note = 2'-Omethylcytosine
  modified_base 67: mod_base = OTHER; note = 2'-Omethylguanosine
  modified_base 68: mod_base = OTHER; note = 2'-Omethylguanosine
  modified_base 73: mod_base = OTHER; note = 2'-Omethylguanosine
ggctccgtggcgcaatggatagcgcaaccgtcttcaaaacggtaggttccgggttcgagtcccggcggagtcgcca

SEQ ID NO: 3420 - RNA, 85 nt, synthetic construct; identical to SEQ ID NO: 3317
  source 1..85: mol_type = other RNA

SEQ ID NO: 3421 - RNA, 76 nt, synthetic construct; identical to SEQ ID NO: 625
  source 1..76: mol_type = other RNA
  modified_base 1: mod_base = OTHER; note = 2'-Omethylguanosine
  modified_base 2: mod_base = OTHER; note = 2'-Omethylguanosine
  modified_base 3: mod_base = OTHER; note = 2'-Omethylcytosine
  modified_base 4: mod_base = OTHER; note = 2'-Omethyluridine
  modified_base 5: mod_base = OTHER; note = 2'-Omethylcytosine
  modified_base 6: mod_base = OTHER; note = 2'-Omethylcytosine
  modified_base 13: mod_base = OTHER; note = 2'-Omethylcytosine
  modified_base 14: mod_base = OTHER; note = 2'-Omethyladenosine
  modified_base 15: mod_base = OTHER; note = 2'-Omethyladenosine
  modified_base 16: mod_base = OTHER; note = 2'-fluorouridine phosphorothiorate
  modified_base 18: mod_base = OTHER; note = 2'-fluoroguanosine phosphorothiorate
  modified_base 19: mod_base = OTHER; note = 2'-fluoroadenosine phosphorothiorate
  modified_base 20: mod_base = OTHER; note = Uridine phosphorothiorate
  modified_base 21: mod_base = OTHER; note = 2'-fluoroadenosine phosphorothiorate
  modified_base 22: mod_base = OTHER; note = 2'-Omethylguanosine
  modified_base 23: mod_base = OTHER; note = 2'-Omethylcytosine
  modified_base 25: mod_base = OTHER; note = 2'-Omethylcytosine
  modified_base 26: mod_base = OTHER; note = Adenosine phosphorothiorate
  modified_base 29: mod_base = OTHER; note = 2'-fluoroguanosine phosphorothiorate
  modified_base 30: mod_base = OTHER; note = 2'-Omethylguanosine phosphorothiorate
  modified_base 31: mod_base = OTHER; note = 2'-Omethyladenosine phosphorothiorate
  modified_base 33: mod_base = OTHER; note = 2'-fluorouridine
  modified_base 35: mod_base = OTHER; note = Cytosine phosphorothiorate
  modified_base 37: mod_base = OTHER; note = Adenosine phosphorothiorate
  modified_base 38: mod_base = OTHER; note = 2'-Omethyladenosine phosphorothiorate
  modified_base 40: mod_base = OTHER; note = 2'-fluorouridine
  modified_base 41: mod_base = OTHER; note = 2'-fluorocytosine
  modified_base 43: mod_base = OTHER; note = Adenosine phosphorothiorate
  modified_base 44: mod_base = OTHER; note = 2'-Omethyladenosine
  modified_base 45: mod_base = OTHER; note = 2'-fluoroguanosine
  modified_base 46: mod_base = OTHER; note = Guanosine phosphorothiorate
  modified_base 47: mod_base = OTHER; note = Uridine phosphorothiorate
  modified_base 49: mod_base = OTHER; note = 2'-Omethylcytosine
  modified_base 50: mod_base = OTHER; note = 2'-Omethylcytosine
  modified_base 52: mod_base = OTHER; note = 2'-Omethylguanosine
  modified_base 53: mod_base = OTHER; note = 2'-fluoroguanosine
  modified_base 55: mod_base = OTHER; note = Uridine phosphorothiorate
  modified_base 57: mod_base = OTHER; note = 2'-Omethylguanosine
  modified_base 59: mod_base = OTHER; note = 2'-Omethylguanosine
  modified_base 61: mod_base = OTHER; note = Cytosine phosphorothiorate
  modified_base 62: mod_base = OTHER; note = 2'-Omethylcytosine phosphorothiorate
  modified_base 63: mod_base = OTHER; note = 2'-fluorocytosine
  modified_base 65: mod_base = OTHER; note = 2'-Omethylguanosine phosphorothiorate
  modified_base 66: mod_base = OTHER; note = 2'-fluorocytosine
  modified_base 67: mod_base = OTHER; note = 2'-Omethylguanosine phosphorothiorate
  modified_base 68: mod_base = OTHER; note = 2'-Omethylguanosine phosphorothiorate
  modified_base 71: mod_base = OTHER; note = 2'-Omethyluridine phosphorothiorate
  modified_base 73: mod_base = OTHER; note = 2'-Omethylguanosine
  modified_base 74: mod_base = OTHER; note = Cytosine phosphorothiorate
  modified_base 75: mod_base = OTHER; note = 2'-fluorocytosine phosphorothiorate
  modified_base 76: mod_base = OTHER; note = 2'-Omethyladenosine

SEQ ID NO: 3422 - RNA, 75 nt, synthetic construct; identical to SEQ ID NO: 3306
  source 1..75: mol_type = other RNA
  modified_base 1: mod_base = OTHER; note = 2'-Omethylguanosine phosphorothiorate
  modified_base 2: mod_base = OTHER; note = 2'-Omethyladenosine phosphorothiorate
  modified_base 58: mod_base = OTHER; note = 2'-Omethyladenosine
  modified_base 74: mod_base = OTHER; note = Cytosine phosphorothiorate
  modified_base 75: mod_base = OTHER; note = 2'-Omethyladenosine

SEQ ID NO: 3423 - RNA, 76 nt, synthetic construct; identical to SEQ ID NO: 625
  source 1..76: mol_type = other RNA
  modified_base 1: mod_base = OTHER; note = 2'-Omethylguanosine
  modified_base 2: mod_base = OTHER; note = 2'-Omethylguanosine
  modified_base 3: mod_base = OTHER; note = 2'-Omethylcytosine
  modified_base 4: mod_base = OTHER; note = 2'-Omethyluridine
  modified_base 5: mod_base = OTHER; note = 2'-Omethylcytosine
  modified_base 6: mod_base = OTHER; note = 2'-Omethylcytosine
  modified_base 10: mod_base = OTHER; note = 2'-Omethylguanosine
  modified_base 11: mod_base = OTHER; note = 2'-Omethylcytosine
  modified_base 12: mod_base = OTHER; note = 2'-Omethylguanosine
  modified_base 13: mod_base = OTHER; note = 2'-Omethylcytosine
  modified_base 14: mod_base = OTHER; note = 2'-Omethyladenosine
  modified_base 15: mod_base = OTHER; note = 2'-fluoroadenosine
  modified_base 16: mod_base = OTHER; note = 2'-Omethyluridine
  modified_base 17: mod_base = OTHER; note = 2'-Omethylguanosine
  modified_base 18: mod_base = OTHER; note = 2'-Omethylguanosine
  modified_base 19: mod_base = OTHER; note = 2'-fluoroadenosine
  modified_base 20: mod_base = OTHER; note = 2'-Omethyluridine
  modified_base 21: mod_base = OTHER; note = 2'-fluoroadenosine
  modified_base 22: mod_base = OTHER; note = 2'-Omethylguanosine
  modified_base 23: mod_base = OTHER; note = 2'-Omethylcytosine
  modified_base 24: mod_base = OTHER; note = 2'-Omethylguanosine
  modified_base 25: mod_base = OTHER; note = 2'-Omethylcytosine
  modified_base 40: mod_base = OTHER; note = 2'-fluorouridine
  modified_base 41: mod_base = OTHER; note = 2'-fluorocytosine
  modified_base 42: mod_base = OTHER; note = 2'-fluoroadenosine
  modified_base 43: mod_base = OTHER; note = 2'-fluoroadenosine
  modified_base 54: mod_base = OTHER; note = Uridine phosphorothiorate
  modified_base 55: mod_base = OTHER; note = Uridine phosphorothiorate
  modified_base 56: mod_base = OTHER; note = Cytosine phosphorothiorate
  modified_base 57: mod_base = OTHER; note = Guanosine phosphorothiorate
  modified_base 61: mod_base = OTHER; note = 2'-Omethylcytosine
  modified_base 62: mod_base = OTHER; note = 2'-Omethylcytosine
  modified_base 63: mod_base = OTHER; note = 2'-Omethylcytosine
  modified_base 64: mod_base = OTHER; note = 2'-Omethylguanosine
  modified_base 65: mod_base = OTHER; note = 2'-Omethylguanosine
  modified_base 66: mod_base = OTHER; note = 2'-Omethylcytosine
  modified_base 67: mod_base = OTHER; note = 2'-Omethylguanosine
  modified_base 68: mod_base = OTHER; note = 2'-Omethylguanosine
  modified_base 69: mod_base = OTHER; note = 2'-Omethyladenosine
  modified_base 73: mod_base = OTHER; note = 2'-Omethylguanosine

SEQ ID NO: 3424 - RNA, 76 nt, synthetic construct; identical to SEQ ID NO: 625
  source 1..76: mol_type = other RNA
  modified_base 1: mod_base = OTHER; note = 2'-Omethylguanosine phosphorothiorate
  modified_base 2: mod_base = OTHER; note = 2'-Omethylguanosine
  modified_base 13: mod_base = OTHER; note = 2'-Omethylcytosine
  modified_base 33: mod_base = OTHER; note = 2'-fluorouridine
  modified_base 37: mod_base = OTHER; note = Adenosine phosphorothiorate
  modified_base 52: mod_base = OTHER; note = 2'-Omethylguanosine
  modified_base 62: mod_base = OTHER; note = 2'-Omethylcytosine
  modified_base 63: mod_base = OTHER; note = 2'-fluorocytosine
  modified_base 73: mod_base = OTHER; note = 2'-Omethylguanosine
  modified_base 75: mod_base = OTHER; note = 2'-fluorocytosine phosphorothiorate

SEQ ID NO: 3425 - RNA, 76 nt, synthetic construct; identical to SEQ ID NO: 625
  source 1..76: mol_type = other RNA
  modified_base 1: mod_base = OTHER; note = Guanosine phosphorothiorate
  modified_base 2: mod_base = OTHER; note = Guanosine phosphorothiorate
  modified_base 3: mod_base = OTHER; note = 2'-Omethylcytosine phosphorothiorate
  modified_base 4: mod_base = OTHER; note = 2'-Omethyluridine
  modified_base 8: mod_base = OTHER; note = Uridine phosphorothiorate
  modified_base 11: mod_base = OTHER; note = Cytosine phosphorothiorate
  modified_base 14: mod_base = OTHER; note = 2'-Omethyladenosine
  modified_base 15: mod_base = OTHER; note = 2'-fluoroadenosine
  modified_base 16: mod_base = OTHER; note = 2'-Omethyluridine
  modified_base 18: mod_base = OTHER; note = 2'-fluoroguanosine phosphorothiorate
  modified_base 20: mod_base = OTHER; note = 2'-Omethyluridine phosphorothiorate
  modified_base 25: mod_base = OTHER; note = Cytosine phosphorothiorate
  modified_base 26: mod_base = OTHER; note = 2'-Omethyladenosine
  modified_base 30: mod_base = OTHER; note = 2'-Omethylguanosine
  modified_base 34: mod_base = OTHER; note = 2'-fluorouridine
  modified_base 39: mod_base = OTHER; note = 2'-fluorouridine
  modified_base 40: mod_base = OTHER; note = 2'-Omethyluridine
  modified_base 42: mod_base = OTHER; note = Adenosine phosphorothiorate
  modified_base 48: mod_base = OTHER; note = 2'-fluorouridine
  modified_base 53: mod_base = OTHER; note = 2'-Omethylguanosine
  modified_base 54: mod_base = OTHER; note = 2'-Omethyluridine
  modified_base 56: mod_base = OTHER; note = 2'-Omethylcytosine phosphorothiorate
  modified_base 57: mod_base = OTHER; note = 2'-fluoroguanosine phosphorothiorate
  modified_base 58: mod_base = OTHER; note = 2'-fluoroadenosine
  modified_base 59: mod_base = OTHER; note = 2'-fluoroguanosine
  modified_base 60: mod_base = OTHER; note = Uridine phosphorothiorate
  modified_base 66: mod_base = OTHER; note = Cytosine phosphorothiorate
  modified_base 67: mod_base = OTHER; note = 2'-fluoroguanosine
  modified_base 71: mod_base = OTHER; note = Uridine phosphorothiorate
  modified_base 72: mod_base = OTHER; note = 2'-fluorocytosine phosphorothiorate
  modified_base 73: mod_base = OTHER; note = 2'-Omethylguanosine
  modified_base 75: mod_base = OTHER; note = 2'-fluorocytosine

SEQ ID NO: 3426 - RNA, 75 nt, synthetic construct; identical to SEQ ID NO: 3311
  source 1..75: mol_type = other RNA
  modified_base 1: mod_base = OTHER; note = 2'-Omethylguanosine phosphorothiorate
  modified_base 13: mod_base = OTHER; note = 2'-fluorouridine phosphorothiorate
  modified_base 19: mod_base = OTHER; note = Uridine phosphorothiorate
  modified_base 20: mod_base = OTHER; note = 2'-fluoroadenosine
  modified_base 28: mod_base = OTHER; note = 2'-fluorouridine
  modified_base 40: mod_base = OTHER; note = 2'-fluorocytosine
  modified_base 42: mod_base = OTHER; note = 2'-fluoroadenosine
  modified_base 52: mod_base = OTHER; note = 2'-fluoroguanosine phosphorothiorate
  modified_base 67: mod_base = OTHER; note = 2'-fluoroguanosine
  modified_base 74: mod_base = OTHER; note = Cytosine phosphorothiorate
  modified_base 75: mod_base = OTHER; note = 2'-fluoroadenosine

SEQ ID NO: 3427 - RNA, 75 nt, synthetic construct; identical to SEQ ID NO: 1045
  source 1..75: mol_type = other RNA
  modified_base 73: mod_base = OTHER; note = 2'-Omethylcytosine
  modified_base 74: mod_base = OTHER; note = 2'-Omethylcytosine

SEQ ID NO: 3428 - RNA, 86 nt, synthetic construct; identical to SEQ ID NO: 3290
  source 1..86: mol_type = other RNA
  modified_base 21: mod_base = OTHER; note = Adenosine phosphorothiorate

SEQ ID NO: 3429 - RNA, 76 nt, synthetic construct; identical to SEQ ID NO: 625
  source 1..76: mol_type = other RNA
  modified_base 2: mod_base = OTHER; note = 2'-fluoroguanosine
  modified_base 6: mod_base = OTHER; note = 2'-Omethylcytosine
  modified_base 10: mod_base = OTHER; note = 2'-fluoroguanosine
  modified_base 12: mod_base = OTHER; note = 2'-Omethylguanosine phosphorothiorate
  modified_base 13: mod_base = OTHER; note = 2'-Omethylcytosine
  modified_base 14: mod_base = OTHER; note = 2'-Omethyladenosine
  modified_base 18: mod_base = OTHER; note = Guanosine phosphorothiorate
  modified_base 22: mod_base = OTHER; note = 2'-Omethylguanosine
  modified_base 25: mod_base = OTHER; note = 2'-Omethylcytosine
  modified_base 27: mod_base = OTHER; note = 2'-Omethyluridine phosphorothiorate
  modified_base 28: mod_base = OTHER; note = 2'-Omethyluridine
  modified_base 29: mod_base = OTHER; note = 2'-Omethylguanosine
  modified_base 31: mod_base = OTHER; note = 2'-Omethyladenosine
  modified_base 34: mod_base = OTHER; note = 2'-Omethyluridine
  modified_base 37: mod_base = OTHER; note = Adenosine phosphorothiorate
  modified_base 39: mod_base = OTHER; note = 2'-fluorouridine
  modified_base 41: mod_base = OTHER; note = 2'-Omethylcytosine
  modified_base 42: mod_base = OTHER; note = 2'-fluoroadenosine
  modified_base 43: mod_base = OTHER; note = 2'-Omethyladenosine
  modified_base 50: mod_base = OTHER; note = 2'-fluorocytosine
  modified_base 51: mod_base = OTHER; note = 2'-Omethylguanosine
  modified_base 52: mod_base = OTHER; note = Guanosine phosphorothiorate
  modified_base 53: mod_base = OTHER; note = 2'-Omethylguanosine
  modified_base 56: mod_base = OTHER; note = 2'-Omethylcytosine
  modified_base 58: mod_base = OTHER; note = Adenosine phosphorothiorate
  modified_base 59: mod_base = OTHER; note = 2'-Omethylguanosine
  modified_base 60: mod_base = OTHER; note = 2'-fluorouridine
  modified_base 61: mod_base = OTHER; note = Cytosine phosphorothiorate
  modified_base 62: mod_base = OTHER; note = 2'-fluorocytosine
  modified_base 67: mod_base = OTHER; note = 2'-fluoroguanosine
  modified_base 69: mod_base = OTHER; note = 2'-Omethyladenosine
  modified_base 70: mod_base = OTHER; note = Guanosine phosphorothiorate
  modified_base 71: mod_base = OTHER; note = 2'-fluorouridine phosphorothiorate
  modified_base 72: mod_base = OTHER; note = 2'-fluorocytosine
  modified_base 73: mod_base = OTHER; note = 2'-fluoroguanosine
  modified_base 74: mod_base = OTHER; note = Cytosine phosphorothiorate
  modified_base 75: mod_base = OTHER; note = 2'-fluorocytosine

SEQ ID NO: 3430 - RNA, 86 nt, synthetic construct; identical to SEQ ID NO: 3290
  source 1..86: mol_type = other RNA
  modified_base 54: mod_base = OTHER; note = Uridine phosphorothiorate

SEQ ID NO: 3431 - RNA, 75 nt, synthetic construct; identical to SEQ ID NO: 3299
  source 1..75: mol_type = other RNA
  modified_base 1: mod_base = OTHER; note = 2'-Omethylcytosine phosphorothiorate
  modified_base 9: mod_base = OTHER; note = Guanosine phosphorothiorate
  modified_base 19: mod_base = OTHER; note = 2'-fluorouridine
  modified_base 26: mod_base = OTHER; note = 2'-Omethyluridine
  modified_base 40: mod_base = OTHER; note = Uridine phosphorothiorate
  modified_base 48: mod_base = OTHER; note = Cytosine phosphorothiorate
  modified_base 72: mod_base = OTHER; note = 2'-Omethylguanosine

SEQ ID NO: 3432 - RNA, 75 nt, synthetic construct; identical to SEQ ID NO: 3306
  source 1..75: mol_type = other RNA
  modified_base 1: mod_base = OTHER; note = 2'-Omethylguanosine
  modified_base 46: mod_base = OTHER; note = 2'-fluorouridine
  modified_base 47: mod_base = OTHER; note = 2'-fluorouridine
  modified_base 72: mod_base = OTHER; note = 2'-Omethyladenosine

SEQ ID NO: 3433 - RNA, 75 nt, synthetic construct; identical to SEQ ID NO: 3336
  source 1..75: mol_type = other RNA
  modified_base 3: mod_base = OTHER; note = 2'-Omethyluridine phosphorothiorate
  modified_base 16: mod_base = OTHER; note = 2'-fluorocytosine
  modified_base 35: mod_base = OTHER; note = 2'-fluoroadenosine
  modified_base 52: mod_base = OTHER; note = 2'-Omethylguanosine phosphorothiorate
  modified_base 58: mod_base = OTHER; note = 2'-Omethylguanosine phosphorothiorate
  modified_base 72: mod_base = OTHER; note = Guanosine phosphorothiorate

SEQ ID NO: 3434 - RNA, 76 nt, synthetic construct; identical to SEQ ID NO: 625
  source 1..76: mol_type = other RNA
  modified_base 1: mod_base = OTHER; note = 2'-Omethylguanosine
  modified_base 2: mod_base = OTHER; note = 2'-Omethylguanosine
  modified_base 3: mod_base = OTHER; note = 2'-Omethylcytosine
  modified_base 4: mod_base = OTHER; note = 2'-Omethyluridine
  modified_base 5: mod_base = OTHER; note = 2'-Omethylcytosine
  modified_base 6: mod_base = OTHER; note = 2'-Omethylcytosine
  modified_base 10: mod_base = OTHER; note = 2'-Omethylguanosine
  modified_base 11: mod_base = OTHER; note = 2'-Omethylcytosine
  modified_base 12: mod_base = OTHER; note = 2'-Omethylguanosine
  modified_base 13: mod_base = OTHER; note = 2'-Omethylcytosine
  modified_base 14: mod_base = OTHER; note = 2'-Omethyladenosine
  modified_base 15: mod_base = OTHER; note = 2'-fluoroadenosine
  modified_base 16: mod_base = OTHER; note = 2'-Omethyluridine
  modified_base 17: mod_base = OTHER; note = Guanosine phosphorothiorate
  modified_base 18: mod_base = OTHER; note = 2'-Omethylguanosine
  modified_base 19: mod_base = OTHER; note = Adenosine phosphorothiorate
  modified_base 20: mod_base = OTHER; note = 2'-Omethyluridine
  modified_base 21: mod_base = OTHER; note = 2'-fluoroadenosine
  modified_base 22: mod_base = OTHER; note = 2'-Omethylguanosine
  modified_base 23: mod_base = OTHER; note = 2'-Omethylcytosine
  modified_base 24: mod_base = OTHER; note = 2'-Omethylguanosine
  modified_base 25: mod_base = OTHER; note = 2'-Omethylcytosine
  modified_base 29: mod_base = OTHER; note = 2'-Omethylguanosine
  modified_base 33: mod_base = OTHER; note = 2'-fluorouridine
  modified_base 35: mod_base = OTHER; note = Cytosine phosphorothiorate
  modified_base 37: mod_base = OTHER; note = Adenosine phosphorothiorate
  modified_base 38: mod_base = OTHER; note = Adenosine phosphorothiorate
  modified_base 40: mod_base = OTHER; note = 2'-fluorouridine
  modified_base 41: mod_base = OTHER; note = 2'-Omethylcytosine
  modified_base 42: mod_base = OTHER; note = 2'-Omethyladenosine
  modified_base 43: mod_base = OTHER; note = 2'-Omethyladenosine
  modified_base 44: mod_base = OTHER; note = 2'-fluoroadenosine
  modified_base 45: mod_base = OTHER; note = 2'-Omethylguanosine
  modified_base 46: mod_base = OTHER; note = Guanosine phosphorothiorate
  modified_base 48: mod_base = OTHER; note = 2'-fluorouridine
  modified_base 49: mod_base = OTHER; note = 2'-Omethylcytosine
  modified_base 50: mod_base = OTHER; note = 2'-Omethylcytosine
  modified_base 51: mod_base = OTHER; note = 2'-Omethylguanosine
  modified_base 52: mod_base = OTHER; note = 2'-Omethylguanosine
  modified_base 53: mod_base = OTHER; note = 2'-Omethylguanosine
  modified_base 54: mod_base = OTHER; note = Uridine phosphorothiorate
  modified_base 55: mod_base = OTHER; note = Uridine phosphorothiorate
  modified_base 56: mod_base = OTHER; note = 2'-Omethylcytosine
  modified_base 57: mod_base = OTHER; note = Guanosine phosphorothiorate
  modified_base 61: mod_base = OTHER; note = 2'-Omethylcytosine
  modified_base 62: mod_base = OTHER; note = 2'-Omethylcytosine
  modified_base 63: mod_base = OTHER; note = 2'-fluorocytosine
  modified_base 64: mod_base = OTHER; note = 2'-Omethylguanosine
  modified_base 65: mod_base = OTHER; note = 2'-Omethylguanosine
  modified_base 66: mod_base = OTHER; note = 2'-Omethylcytosine
  modified_base 67: mod_base = OTHER; note = 2'-Omethylguanosine
  modified_base 68: mod_base = OTHER; note = 2'-Omethylguanosine
  modified_base 69: mod_base = OTHER; note = 2'-fluoroadenosine
  modified_base 70: mod_base = OTHER; note = 2'-fluoroguanosine
  modified_base 71: mod_base = OTHER; note = 2'-Omethyluridine
  modified_base 73: mod_base = OTHER; note = 2'-Omethylguanosine
  modified_base 75: mod_base = OTHER; note = 2'-fluorocytosine phosphorothiorate

SEQ ID NO: 3435 - RNA, 86 nt, synthetic construct; identical to SEQ ID NO: 3290
  source 1..86: mol_type = other RNA
  modified_base 85: mod_base = OTHER; note = 2'-Omethylcytosine

SEQ ID NO: 3436 - RNA, 85 nt, synthetic construct; identical to SEQ ID NO: 3301
  source 1..85: mol_type = other RNA
  modified_base 1: mod_base = OTHER; note = 2'-Omethylguanosine phosphorothiorate
  modified_base 2: mod_base = OTHER; note = Cytosine phosphorothiorate
  modified_base 3: mod_base = OTHER; note = 2'-Omethyluridine
  modified_base 5: mod_base = OTHER; note = Uridine phosphorothiorate
  modified_base 17: mod_base = OTHER; note = 2'-Omethylguanosine phosphorothiorate
  modified_base 21: mod_base = OTHER; note = 2'-fluoroadenosine
  modified_base 23: mod_base = OTHER; note = 2'-Omethylguanosine phosphorothiorate
  modified_base 28: mod_base = OTHER; note = 2'-fluorouridine
  modified_base 29: mod_base = OTHER; note = 2'-fluoroguanosine
  modified_base 35: mod_base = OTHER; note = 2'-fluorouridine
  modified_base 37: mod_base = OTHER; note = 2'-Omethyladenosine phosphorothiorate
  modified_base 46: mod_base = OTHER; note = 2'-Omethylguanosine phosphorothiorate
  modified_base 50: mod_base = OTHER; note = 2'-Omethylcytosine phosphorothiorate
  modified_base 54: mod_base = OTHER; note = 2'-fluorocytosine
  modified_base 56: mod_base = OTHER; note = Guanosine phosphorothiorate
  modified_base 58: mod_base = OTHER; note = 2'-Omethylguanosine phosphorothiorate
  modified_base 59: mod_base = OTHER; note = 2'-Omethylcytosine
  modified_base 82: mod_base = OTHER; note = Guanosine phosphorothiorate

SEQ ID NO: 3437 - RNA, 75 nt, synthetic construct; identical to SEQ ID NO: 1045
  source 1..75: mol_type = other RNA
  modified_base 1: mod_base = OTHER; note = 2'-Omethylguanosine
  modified_base 2: mod_base = OTHER; note = 2'-Omethylguanosine
  modified_base 3: mod_base = OTHER; note = 2'-Omethyluridine
  modified_base 4: mod_base = OTHER; note = 2'-Omethyluridine
  modified_base 5: mod_base = OTHER; note = 2'-Omethylcytosine
  modified_base 6: mod_base = OTHER; note = 2'-Omethylcytosine
  modified_base 14: mod_base = OTHER; note = 2'-Omethyladenosine
  modified_base 15: mod_base = OTHER; note = 2'-Omethyladenosine
  modified_base 16: mod_base = OTHER; note = 2'-Omethyluridine
  modified_base 17: mod_base = OTHER; note = 2'-Omethylguanosine
  modified_base 18: mod_base = OTHER; note = 2'-Omethylguanosine
  modified_base 20: mod_base = OTHER; note = 2'-Omethyladenosine
  modified_base 22: mod_base = OTHER; note = 2'-Omethylguanosine
  modified_base 23: mod_base = OTHER; note = 2'-Omethylcytosine
  modified_base 24: mod_base = OTHER; note = 2'-Omethyladenosine
  modified_base 25: mod_base = OTHER; note = 2'-Omethylcytosine
  modified_base 41: mod_base = OTHER; note = 2'-fluorocytosine
  modified_base 42: mod_base = OTHER; note = 2'-Omethyladenosine
  modified_base 43: mod_base = OTHER; note = 2'-Omethylguanosine
  modified_base 44: mod_base = OTHER; note = 2'-fluorocytosine
  modified_base 48: mod_base = OTHER; note = 2'-Omethylcytosine
  modified_base 49: mod_base = OTHER; note = 2'-Omethylcytosine
  modified_base 51: mod_base = OTHER; note = 2'-Omethyladenosine
  modified_base 53: mod_base = OTHER; note = 2'-Omethyluridine
  modified_base 54: mod_base = OTHER; note = Uridine phosphorothiorate
  modified_base 55: mod_base = OTHER; note = 2'-Omethylcytosine
  modified_base 56: mod_base = OTHER; note = 2'-fluoroguanosine
  modified_base 58: mod_base = OTHER; note = 2'-Omethylguanosine
  modified_base 60: mod_base = OTHER; note = 2'-Omethylcytosine
  modified_base 64: mod_base = OTHER; note = 2'-Omethylguanosine
  modified_base 72: mod_base = OTHER; note = 2'-Omethyluridine

SEQ ID NO: 3438 - RNA, 86 nt, synthetic construct; identical to SEQ ID NO: 3290
  source 1..86: mol_type = other RNA
  modified_base 61: mod_base = OTHER; note = 2'-Omethylguanosine
  modified_base 73: mod_base = OTHER; note = 2'-Omethylcytosine

SEQ ID NO: 3439 - RNA, 74 nt, synthetic construct; identical to SEQ ID NO: 3293
  source 1..74: mol_type = other RNA
  modified_base 1: mod_base = OTHER; note = 2'-Omethyladenosine
  modified_base 24: mod_base = OTHER; note = Guanosine phosphorothiorate
  modified_base 39: mod_base = OTHER; note = Adenosine phosphorothiorate
  modified_base 47: mod_base = OTHER; note = 2'-fluoroguanosine
  modified_base 73: mod_base = OTHER; note = Cytosine phosphorothiorate
  modified_base 74: mod_base = OTHER; note = 2'-fluoroadenosine

SEQ ID NO: 3440 - RNA, 86 nt, synthetic construct; identical to SEQ ID NO: 3290
  source 1..86: mol_type = other RNA
  modified_base 62: mod_base = OTHER; note = 2'-Omethylguanosine

SEQ ID NO: 3441 - RNA, 75 nt, synthetic construct; identical to SEQ ID NO: 3306
  source 1..75: mol_type = other RNA
  modified_base 10: mod_base = OTHER; note = 2'-Omethylguanosine
  modified_base 11: mod_base = OTHER; note = 2'-Omethylcytosine
  modified_base 12: mod_base = OTHER; note = 2'-Omethylguanosine
  modified_base 13: mod_base = OTHER; note = 2'-Omethylcytosine
  modified_base 21: mod_base = OTHER; note = 2'-Omethylguanosine
  modified_base 22: mod_base = OTHER; note = 2'-Omethylcytosine
  modified_base 23: mod_base = OTHER; note = 2'-Omethylguanosine
  modified_base 24: mod_base = OTHER; note = 2'-Omethylcytosine
  modified_base 48: mod_base = OTHER; note = 2'-Omethylguanosine
  modified_base 49: mod_base = OTHER; note = 2'-Omethylcytosine
  modified_base 50: mod_base = OTHER; note = 2'-Omethylguanosine
  modified_base 51: mod_base = OTHER; note = 2'-Omethyluridine
  modified_base 52: mod_base = OTHER; note = 2'-Omethylguanosine

SEQ ID NO: 3442 - RNA, 76 nt, synthetic construct; identical to SEQ ID NO: 625
  source 1..76: mol_type = other RNA
  modified_base 1: mod_base = OTHER; note = 2'-Omethylguanosine phosphorothiorate
  modified_base 2: mod_base = OTHER; note = 2'-Omethylguanosine phosphorothiorate
  modified_base 24: mod_base = OTHER; note = Guanosine phosphorothiorate
  modified_base 25: mod_base = OTHER; note = 2'-O-(2-Methoxyethyl) 5-methylcytosine
  modified_base 53: mod_base = OTHER; note = 2'-fluoroguanosine
  modified_base 54: mod_base = OTHER; note = 2'-fluorouridine
  modified_base 74: mod_base = OTHER; note = Cytosine phosphorothiorate
  modified_base 75: mod_base = OTHER; note = 2'-Omethylcytosine phosphorothiorate
  modified_base 76: mod_base = OTHER; note = 2'-Omethyladenosine

SEQ ID NO: 3443 - RNA, 76 nt, synthetic construct; identical to SEQ ID NO: 3295
  source 1..76: mol_type = other RNA
  modified_base 1: mod_base = OTHER; note = 2'-Omethylcytosine phosphorothiorate
  modified_base 2: mod_base = OTHER; note = 2'-fluorocytosine phosphorothiorate
  modified_base 3: mod_base = OTHER; note = 2'-Omethyluridine
  modified_base 8: mod_base = OTHER; note = 2'-Omethyluridine
  modified_base 12: mod_base = OTHER; note = 2'-Omethyluridine
  modified_base 16: mod_base = OTHER; note = 2'-Omethyluridine phosphorothiorate
  modified_base 27: mod_base = OTHER; note = 2'-fluoroguanosine
  modified_base 28: mod_base = OTHER; note = Adenosine phosphorothiorate
  modified_base 30: mod_base = OTHER; note = 2'-fluoroguanosine phosphorothiorate
  modified_base 41: mod_base = OTHER; note = 2'-fluorocytosine phosphorothiorate
  modified_base 42: mod_base = OTHER; note = 2'-fluorouridine
  modified_base 53: mod_base = OTHER; note = Guanosine phosphorothiorate
  modified_base 54: mod_base = OTHER; note = 2'-fluorouridine
  modified_base 69: mod_base = OTHER; note = 2'-fluoroadenosine
  modified_base 75: mod_base = OTHER; note = Cytosine phosphorothiorate
  modified_base 76: mod_base = OTHER; note = 2'-fluoroadenosine

SEQ ID NO: 3444 - RNA, 85 nt, synthetic construct; identical to SEQ ID NO: 3286
  source 1..85: mol_type = other RNA
  modified_base 1: mod_base = OTHER; note = 2'-fluorocytosine
  modified_base 5: mod_base = OTHER; note = 2'-fluoroguanosine
  modified_base 12: mod_base = OTHER; note = Guanosine phosphorothiorate
  modified_base 23: mod_base = OTHER; note = 2'-fluoroguanosine
  modified_base 27: mod_base = OTHER; note = 2'-Omethyluridine phosphorothiorate
  modified_base 28: mod_base = OTHER; note = 2'-fluoroguanosine
  modified_base 33: mod_base = OTHER; note = 2'-fluorouridine
  modified_base 35: mod_base = OTHER; note = 2'-fluoroadenosine phosphorothiorate
  modified_base 40: mod_base = OTHER; note = Cytosine phosphorothiorate
  modified_base 51: mod_base = OTHER; note = 2'-Omethyluridine
  modified_base 53: mod_base = OTHER; note = Uridine phosphorothiorate
  modified_base 55: mod_base = OTHER; note = 2'-Omethylcytosine
  modified_base 57: mod_base = OTHER; note = 2'-Omethylcytosine
  modified_base 67: mod_base = OTHER; note = Adenosine phosphorothiorate
  modified_base 76: mod_base = OTHER; note = Cytosine phosphorothiorate
  modified_base 79: mod_base = OTHER; note = 2'-fluoroguanosine phosphorothiorate
  modified_base 84: mod_base = OTHER; note = 2'-Omethylcytosine

SEQ ID NO: 3445 - RNA, 86 nt, synthetic construct; identical to SEQ ID NO: 3290
  source 1..86: mol_type = other RNA
  modified_base 20: mod_base = OTHER; note = 2'-fluorouridine

SEQ ID NO: 3446 - RNA, 76 nt, synthetic construct; identical to SEQ ID NO: 3318
  source 1..76: mol_type = other RNA
  modified_base 1: mod_base = OTHER; note = 2'-Omethylcytosine phosphorothiorate
  modified_base 2: mod_base = OTHER; note = 2'-Omethylcytosine phosphorothiorate
  modified_base 3: mod_base = OTHER; note = 2'-Omethyluridine
  modified_base 4: mod_base = OTHER; note = 2'-Omethyluridine
  modified_base 5: mod_base = OTHER; note = 2'-Omethylcytosine
  modified_base 6: mod_base = OTHER; note = 2'-Omethylguanosine
  modified_base 8: mod_base = OTHER; note = Uridine phosphorothiorate
  modified_base 16: mod_base = OTHER; note = 2'-Omethyluridine
  modified_base 18: mod_base = OTHER; note = 2'-Omethylguanosine
  modified_base 19: mod_base = OTHER; note = 2'-Omethylguanosine
  modified_base 33: mod_base = OTHER; note = 2'-fluorouridine
  modified_base 35: mod_base = OTHER; note = Uridine phosphorothiorate
  modified_base 37: mod_base = OTHER; note = Guanosine phosphorothiorate
  modified_base 38: mod_base = OTHER; note = Adenosine phosphorothiorate
  modified_base 44: mod_base = OTHER; note = 2'-Omethyladenosine
  modified_base 45: mod_base = OTHER; note = 2'-Omethylguanosine
  modified_base 46: mod_base = OTHER; note = 2'-fluoroguanosine
  modified_base 47: mod_base = OTHER; note = 2'-fluorouridine
  modified_base 48: mod_base = OTHER; note = 2'-fluorocytosine
  modified_base 49: mod_base = OTHER; note = 2'-Omethylguanosine
  modified_base 50: mod_base = OTHER; note = 2'-Omethylcytosine
  modified_base 51: mod_base = OTHER; note = 2'-Omethyluridine
  modified_base 52: mod_base = OTHER; note = 2'-Omethylguanosine
  modified_base 53: mod_base = OTHER; note = 2'-Omethylguanosine
  modified_base 54: mod_base = OTHER; note = 2'-Omethyluridine
  modified_base 56: mod_base = OTHER; note = 2'-Omethylcytosine
  modified_base 59: mod_base = OTHER; note = 2'-Omethyladenosine
  modified_base 61: mod_base = OTHER; note = 2'-Omethylcytosine
  modified_base 62: mod_base = OTHER; note = 2'-Omethylcytosine
  modified_base 63: mod_base = OTHER; note = 2'-fluoroguanosine
  modified_base 64: mod_base = OTHER; note = 2'-Omethylguanosine
  modified_base 65: mod_base = OTHER; note = 2'-Omethylcytosine
  modified_base 66: mod_base = OTHER; note = 2'-Omethyluridine
  modified_base 67: mod_base = OTHER; note = 2'-Omethylcytosine
  modified_base 68: mod_base = OTHER; note = 2'-Omethylguanosine
  modified_base 73: mod_base = OTHER; note = 2'-Omethyladenosine

SEQ ID NO: 3447 - RNA, 76 nt, synthetic construct
  source 1..76: mol_type = other RNA
  modified_base 1: mod_base = OTHER; note = 2'-Omethylguanosine phosphorothiorate
  modified_base 2: mod_base = OTHER; note = 2'-Omethylcytosine
  modified_base 3: mod_base = OTHER; note = 2'-Omethylcytosine
  modified_base 4: mod_base = OTHER; note = 2'-Omethylcytosine
  modified_base 5: mod_base = OTHER; note = 2'-Omethylguanosine
  modified_base 6: mod_base = OTHER; note = 2'-Omethyladenosine
  modified_base 49: mod_base = OTHER; note = 2'-Omethylcytosine
  modified_base 50: mod_base = OTHER; note = 2'-Omethylcytosine
  modified_base 51: mod_base = OTHER; note = 2'-Omethylguanosine
  modified_base 52: mod_base = OTHER; note = 2'-Omethylguanosine
  modified_base 53: mod_base = OTHER; note = 2'-Omethylguanosine
  modified_base 61: mod_base = OTHER; note = 2'-Omethylcytosine
  modified_base 62: mod_base = OTHER; note = 2'-Omethylcytosine
  modified_base 63: mod_base = OTHER; note = 2'-fluorocytosine
  modified_base 64: mod_base = OTHER; note = 2'-Omethylguanosine
  modified_base 65: mod_base = OTHER; note = 2'-Omethylguanosine
  modified_base 66: mod_base = OTHER; note = 2'-Omethylcytosine
  modified_base 67: mod_base = OTHER; note = 2'-Omethyluridine
  modified_base 68: mod_base = OTHER; note = 2'-Omethylcytosine
  modified_base 69: mod_base = OTHER; note = 2'-Omethylguanosine
  modified_base 71: mod_base = OTHER; note = 2'-Omethylguanosine
  modified_base 72: mod_base = OTHER; note = 2'-Omethylcytosine
gcccgagtggcgcaatggatagcgcattggacttcaaattcaaaggttccgggttcgagtcccggctcgggcgcca

SEQ ID NO: 3448 - RNA, 85 nt, synthetic construct; identical to SEQ ID NO: 3297
  source 1..85: mol_type = other RNA
  modified_base 1: mod_base = OTHER; note = 2'-Omethylguanosine
  modified_base 2: mod_base = OTHER; note = 2'-Omethylcytosine
  modified_base 3: mod_base = OTHER; note = 2'-Omethyluridine
  modified_base 4: mod_base = OTHER; note = 2'-Omethylguanosine
  modified_base 5: mod_base = OTHER; note = 2'-Omethyluridine
  modified_base 6: mod_base = OTHER; note = 2'-Omethylguanosine
  modified_base 14: mod_base = OTHER; note = 2'-Omethyladenosine
  modified_base 15: mod_base = OTHER; note = 2'-Omethylguanosine
  modified_base 16: mod_base = OTHER; note = 2'-Omethyluridine
  modified_base 17: mod_base = OTHER; note = 2'-Omethylguanosine
  modified_base 18: mod_base = OTHER; note = 2'-Omethylguanosine
  modified_base 20: mod_base = OTHER; note = 2'-Omethyluridine
  modified_base 22: mod_base = OTHER; note = 2'-Omethyladenosine
  modified_base 23: mod_base = OTHER; note = 2'-Omethylguanosine
  modified_base 24: mod_base = OTHER; note = 2'-Omethylguanosine
  modified_base 25: mod_base = OTHER; note = 2'-Omethylcytosine
  modified_base 33: mod_base = OTHER; note = 2'-fluorouridine
  modified_base 35: mod_base = OTHER; note = Cytosine phosphorothiorate
  modified_base 37: mod_base = OTHER; note = Adenosine phosphorothiorate
  modified_base 38: mod_base = OTHER; note = Adenosine phosphorothiorate
  modified_base 41: mod_base = OTHER; note = 2'-Omethylcytosine
  modified_base 42: mod_base = OTHER; note = 2'-Omethyladenosine
  modified_base 43: mod_base = OTHER; note = 2'-Omethyladenosine
  modified_base 44: mod_base = OTHER; note = 2'-Omethyluridine
  modified_base 58: mod_base = OTHER; note = 2'-Omethylguanosine
  modified_base 59: mod_base = OTHER; note = 2'-Omethylcytosine
  modified_base 61: mod_base = OTHER; note = 2'-Omethylguanosine
  modified_base 63: mod_base = OTHER; note = 2'-Omethyluridine
  modified_base 64: mod_base = OTHER; note = Uridine phosphorothiorate
  modified_base 65: mod_base = OTHER; note = 2'-Omethylcytosine
  modified_base 66: mod_base = OTHER; note = 2'-fluoroguanosine
  modified_base 68: mod_base = OTHER; note = 2'-Omethyladenosine
  modified_base 70: mod_base = OTHER; note = 2'-Omethylcytosine
  modified_base 74: mod_base = OTHER; note = 2'-Omethylcytosine
  modified_base 82: mod_base = OTHER; note = 2'-Omethylguanosine

SEQ ID NO: 3449 - RNA, 76 nt, synthetic construct; identical to SEQ ID NO: 625
  source 1..76: mol_type = other RNA
  modified_base 1: mod_base = OTHER; note = 2'-Omethylguanosine phosphorothiorate
  modified_base 2: mod_base = OTHER; note = 2'-Omethylguanosine
  modified_base 3: mod_base = OTHER; note = 2'-Omethylcytosine
  modified_base 4: mod_base = OTHER; note = 2'-Omethyluridine
  modified_base 5: mod_base = OTHER; note = 2'-Omethylcytosine
  modified_base 6: mod_base = OTHER; note = 2'-Omethylcytosine
  modified_base 10: mod_base = OTHER; note = 2'-Omethylguanosine
  modified_base 11: mod_base = OTHER; note = 2'-Omethylcytosine
  modified_base 12: mod_base = OTHER; note = 2'-Omethylguanosine
  modified_base 13: mod_base = OTHER; note = 2'-Omethylcytosine
  modified_base 16: mod_base = OTHER; note = 2'-Omethyluridine
  modified_base 17: mod_base = OTHER; note = 2'-Omethylguanosine
  modified_base 18: mod_base = OTHER; note = 2'-Omethylguanosine
  modified_base 22: mod_base = OTHER; note = 2'-Omethylguanosine
  modified_base 23: mod_base = OTHER; note = 2'-Omethylcytosine
  modified_base 24: mod_base = OTHER; note = 2'-Omethylguanosine
  modified_base 25: mod_base = OTHER; note = 2'-Omethylcytosine
  modified_base 40: mod_base = OTHER; note = 2'-fluorouridine
  modified_base 41: mod_base = OTHER; note = 2'-fluorocytosine
  modified_base 42: mod_base = OTHER; note = 2'-fluoroadenosine
  modified_base 43: mod_base = OTHER; note = 2'-fluoroadenosine
  modified_base 54: mod_base = OTHER; note = 2'-Omethyluridine phosphorothiorate
  modified_base 55: mod_base = OTHER; note = Uridine phosphorothiorate
  modified_base 56: mod_base = OTHER; note = 2'-Omethylcytosine
  modified_base 57: mod_base = OTHER; note = 2'-fluoroguanosine
  modified_base 59: mod_base = OTHER; note = 2'-Omethylguanosine
  modified_base 61: mod_base = OTHER; note = 2'-Omethylcytosine
  modified_base 62: mod_base = OTHER; note = 2'-Omethylcytosine
  modified_base 63: mod_base = OTHER; note = 2'-Omethylcytosine
  modified_base 64: mod_base = OTHER; note = 2'-Omethylguanosine
  modified_base 65: mod_base = OTHER; note = 2'-Omethylguanosine
  modified_base 66: mod_base = OTHER; note = 2'-Omethylcytosine
  modified_base 67: mod_base = OTHER; note = 2'-Omethylguanosine
  modified_base 68: mod_base = OTHER; note = 2'-Omethylguanosine
  modified_base 69: mod_base = OTHER; note = 2'-Omethyladenosine
  modified_base 73: mod_base = OTHER; note = 2'-Omethylguanosine

SEQ ID NO: 3450 - RNA, 76 nt, synthetic construct
  source 1..76: mol_type = other RNA
gtacgtgtggcgcaatggatagcgcattggacttcaaattcaaaggttccgggttcgagtcccggcacgtacgcca

(The sequence listing continues in the following parts.)

What is claimed is:

1. A tRNA effector molecule (TREM) comprising a sequence of Formula (I):
[L1]-[ASt Domain1]-[L2]-[DH Domain]-[L3]-[ACH Domain]-[VL Domain]-[TH Domain]-[L4]-[ASt Domain2] (I),
wherein:
independently, [L1] and [VL Domain], are optional; and
a nucleotide within [L1]-[ASt Domain1]-[L2] comprises a nucleotide having a non-naturally occurring modification.

2. The TREM of claim 1, wherein the non-naturally occurring modification is present on the 2′-position of a nucleotide sugar or within the internucleotide region (e.g., a backbone modification).

3. The TREM of any one of the preceding claims, wherein the non-naturally occurring modification is selected from a 2′-O-methyl (2-OMe), 2′-halo (e.g., 2′F or 2′Cl), 2′-O-methoxyethyl (2′MOE), or 2′deoxy modification.

4. The TREM of any one of the preceding claims, wherein the non-naturally occurring modification is a 2′OMe modification.

5. The TREM of any one of the preceding claims, wherein the non-naturally occurring modification is a 2′halo (e.g., 2′F or 2′Cl) modification.

6. The TREM of any one of the preceding claims, wherein the non-naturally occurring modification is a 2′MOE modification.

7. The TREM of any one of the preceding claims, wherein the non-naturally occurring modification is a 2′-deoxy modification.

8. The TREM of any one of the preceding claims, wherein the non-naturally occurring modification is present in the internucleotide region (e.g., a backbone modification).

9. The TREM of claim 8, wherein the non-naturally occurring modification is a phosphorothioate modification.

10. The TREM of any one of the preceding claims, wherein the TREM has a sequence selected from a sequence provided in FIG. 2.

11. The TREM of any one of the preceding claims, wherein the TREM is a TREM provided in FIG. 2.

12. The TREM of any one of the preceding claims, wherein the TREM comprises a TREM having at least 70%, 75%, 80%, 85%, 90%, 95%, or 99% sequence identity with a TREM provided in FIG. 2.

13. The TREM of any one of the preceding claims, wherein the TREM comprises a sequence that differs by no more than 1, 2, 3, 4, 5, 6, 7, 8, 9, or 10 nucleotides from a TREM provided in FIG. 2.

14. The TREM of any one of the preceding claims, wherein the TREM comprises 1, 2, 3, 4, 5, 6, 7, 8, 9, or 10 additional non-naturally occurring modifications compared with a TREM provided in FIG. 2 (e.g., 2′-ribose modifications or an internucleotide modification, e.g., 2′OMe, 2′-halo, 2′-MOE, 2′-deoxy, or phosphorothiorate modifications).

15. The TREM of any one of the preceding claims, wherein the TREM is selected from TREM NOs. 1-500, 501-1000, 1001-1500, 1501-2000, 2001-2500, 2501-3000, 3001-3500, 3501-4000, 4001-4500, 4501-5000, 5001-5500, 5501-6000, 6001-6500, 6501-7000, 7001-7500, 7501-8000, 8001-8500, 8501-9000, and 9001-9136 in FIG. 2.

16. The TREM of any one of the preceding claims, wherein the non-naturally occurring modification is present at a nucleotide position which corresponds to one or more of nucleotides 1-9 of SEQ ID NO: 622.

17. The TREM of any one of the preceding claims, wherein:
(i) the non-naturally occurring modification is present at a nucleotide position which corresponds to one or more of nucleotides 1-9 of SEQ ID NO: 622; and/or
(ii) the TREM differs from the nucleotide sequence of SEQ ID NO: 622 by no more than 1, 2, 3, 4, 5, 6, 7, 8, 9, or 10 nucleotides nucleotides.

18. The TREM of any one of the preceding claims, wherein:
(i) the non-naturally occurring modification is present at a nucleotide position which corresponds to one or more of nucleotides 1-9 of SEQ ID NO: 622; and/or
(ii) the TREM comprises the nucleotide sequence of SEQ ID NO: 622.

19. The TREM of any one of claims 1-17, wherein the TREM comprises the nucleotide sequence of SEQ ID NO: 623.

20. The TREM of any one of claims 1-17, wherein the TREM comprises the nucleotide sequence of SEQ ID NO: 624.

21. The TREM of any one of the preceding claims, wherein the non-naturally occurring modification is present at a nucleotide position which corresponds to one or more of nucleotides 1-9, according to the CtNS.

22. A tRNA effector molecule (TREM) comprising a sequence of Formula (I):
[L1]-[ASt Domain1]-[L2]-[DH Domain]-[L3]-[ACH Domain]-[VL Domain]-[TH Domain]-[L4]-[ASt Domain2] (I),
wherein:
independently, [L1] and [VL Domain], are optional; and
a nucleotide within [DH Domain1], or [L3] comprises a nucleotide having a non-naturally occurring modification.

23. The TREM of claim 22, wherein the non-naturally occurring modification is present on the 2′-position of a nucleotide sugar or within the internucleotide region (e.g., a backbone modification).

24. The TREM of any one of claims 22-23, wherein the non-naturally occurring modification is selected from a 2′-O-methyl (2-OMe), 2′-halo (e.g., 2′F or 2′Cl), 2′-O-methoxyethyl (2′MOE), or 2′deoxy modification.

25. The TREM of any one of claims 22-24, wherein the non-naturally occurring modification is a 2′OMe modification.

26. The TREM of any one of claims 22-25, wherein the non-naturally occurring modification is a 2′halo (e.g., 2′F or 2′Cl) modification.

27. The TREM of any one of claims 22-26, wherein the non-naturally occurring modification is a 2′MOE modification.

28. The TREM of any one of claims 22-27, wherein the non-naturally occurring modification is a 2′-deoxy modification.

29. The TREM of any one of claims 22-28, wherein the non-naturally occurring modification is present in the internucleotide region (e.g., a backbone modification).

30. The TREM of claim 29, wherein the non-naturally occurring modification is a phosphorothioate modification.

31. The TREM of any one of claims 22-30, wherein the TREM has a sequence selected from a sequence provided in FIG. 2.

32. The TREM of any one of claims 22-31, wherein the TREM is a TREM provided in FIG. 2.

33. The TREM of any one of claims 22-32, wherein the TREM comprises a TREM having at least 70%, 75%, 80%, 85%, 90%, 95%, or 99% sequence identity with a TREM provided in FIG. 2.

34. The TREM of any one of claims 22-33, wherein the TREM comprises a sequence that differs by no more than 1, 2, 3, 4, 5, 6, 7, 8, 9, or 10 nucleotides from a TREM provided in FIG. 2.

35. The TREM of any one of claims 22-34, wherein the TREM comprises 1, 2, 3, 4, 5, 6, 7, 8, 9, or 10 additional non-naturally occurring modifications compared with a TREM provided in FIG. 2 (e.g., 2′-ribose modifications or an internucleotide modification, e.g., 2′OMe, 2′-halo, 2′-MOE, 2′-deoxy, or phosphorothiorate modifications).

36. The TREM of any one of claims 22-35, wherein the TREM is selected from TREM NO. 1-500, 501-1000, 1001-1500, 1501-2000, 2001-2500, 2501-3000, 3001-3500, 3501-4000, 4001-4500, 4501-5000, 5001-5500, 5501-6000, 6001-6500, 6501-7000, 7001-7500, 7501-8000, 8001-8500, 8501-9000, and 9001-9136 in FIG. 2in FIG. 2.

37. The TREM of any one of claims 22-3623-37, wherein the non-naturally occurring modification is present at a nucleotide position which corresponds to one or more of nucleotides 10-26 of SEQ ID NO: 622.

38. The TREM of any one of claims 22-37, wherein:
(i) the non-naturally occurring modification is present at a nucleotide position which corresponds to one or more of nucleotides 10-26 of SEQ ID NO: 622; and/or
(ii) the TREM differs from the nucleotide sequence of SEQ ID NO: 622 by no more than 1, 2, 3, 4, 5, 6, 7, 8, 9, or 10 nucleotides nucleotides.

39. The TREM of any one of claims 22-38, wherein:
(i) the non-naturally occurring modification is present at a nucleotide position which corresponds to one or more of nucleotides 10-26 of SEQ ID NO: 622; and/or
(ii) the TREM comprises the nucleotide sequence of SEQ ID NO: 622.

40. The TREM of any one of claims 22-38, wherein the TREM comprises the nucleotide sequence of SEQ ID NO: 623.

41. The TREM of any one of claims 22-38, wherein the TREM comprises the nucleotide sequence of SEQ ID NO: 624.

42. The TREM of any one of claims 22-41, wherein the non-naturally occurring modification is present at a nucleotide position which corresponds to one or more of nucleotides 10-26, according to the CtNS.

43. A tRNA effector molecule (TREM) comprising a sequence of Formula (I):
[L1]-[ASt Domain1]-[L2]-[DH Domain]-[L3]-[ACH Domain]-[VL Domain]-[TH Domain]-[L4]-[ASt Domain2] (I),
wherein:
independently, [L1] and [VL Domain], are optional; and
a nucleotide within [ACH Domain] comprises a nucleotide having a non-naturally occurring modification.

44. The TREM of claim 43, wherein the non-naturally occurring modification is present on the 2′-position of a nucleotide sugar or within the internucleotide region (e.g., a backbone modification).

45. The TREM of any one of claims 43-44, wherein the non-naturally occurring modification is selected from a 2′-O-methyl (2-OMe), 2′-halo (e.g., 2′F or 2′Cl), 2′-O-methoxyethyl (2′MOE), or 2′deoxy modification.

46. The TREM of any one of claims 43-45, wherein the non-naturally occurring modification is a 2′OMe modification.

47. The TREM of any one of claims 43-46, wherein the non-naturally occurring modification is a 2′halo (e.g., 2′F or 2′Cl) modification.

48. The TREM of any one of claims 43-47, wherein the non-naturally occurring modification is a 2′MOE modification.

49. The TREM of any one of claims 43-48, wherein the non-naturally occurring modification is a 2′-deoxy modification.

50. The TREM of any one of claims 43-49, wherein the non-naturally occurring modification is present in the internucleotide region (e.g., a backbone modification).

51. The TREM of claim 50, wherein the non-naturally occurring modification is a phosphorothioate modification.

52. The TREM of any one of claims 43-51, wherein the TREM has a sequence selected from a sequence provided in FIG. 2.

53. The TREM of any one of claims 43-52, wherein the TREM is a TREM provided in FIG. 2.

54. The TREM of any one of claims 43-53, wherein the TREM comprises a TREM having at least 70%, 75%, 80%, 85%, 90%, 95%, or 99% sequence identity with a TREM provided in FIG. 2.

55. The TREM of any one of claims 43-54, wherein the TREM comprises a sequence that differs by no more than 1, 2, 3, 4, 5, 6, 7, 8, 9, or 10 nucleotides from a TREM provided in FIG. 2.

56. The TREM of any one of claims 43-55, wherein the TREM comprises 1, 2, 3, 4, 5, 6, 7, 8, 9, or 10 additional non-naturally occurring modifications compared with a TREM provided in FIG. 2 (e.g., 2′-ribose modifications or an internucleotide modification, e.g., 2′OMe, 2′-halo, 2′-MOE, 2′-deoxy, or phosphorothiorate modifications).

57. The TREM of any one of claims 43-56, wherein the TREM is selected from TREM NO. 1-500, 501-1000, 1001-1500, 1501-2000, 2001-2500, 2501-3000, 3001-3500, 3501-4000, 4001-4500, 4501-5000, 5001-5500, 5501-6000, 6001-6500, 6501-7000, 7001-7500, 7501-8000, 8001-8500, 8501-9000, and 9001-9136 in FIG. 2.

58. The TREM of any one of claims 43-57, wherein the non-naturally occurring modification is present at a nucleotide position which corresponds to one or more of nucleotides 27-43 of SEQ ID NO: 622.

59. The TREM of any one of claims 43-58, wherein:
(i) the non-naturally occurring modification is present at a nucleotide position which corresponds to one or more of nucleotides 27-43 of SEQ ID NO: 622; and/or
(ii) the TREM differs from the nucleotide sequence of SEQ ID NO: 622 by no more than 1, 2, 3, 4, 5, 6, 7, 8, 9, or 10 nucleotides nucleotides.

60. The TREM of any one of claims 43-59, wherein:
(i) the non-naturally occurring modification is present at a nucleotide position which corresponds to one or more of nucleotides 27-43 of SEQ ID NO: 622; and/or
(ii) the TREM comprises the nucleotide sequence of SEQ ID NO: 622.

61. The TREM of any one of claims 43-59, wherein the TREM comprises the nucleotide sequence of SEQ ID NO: 623.

62. The TREM of any one of claims 43-59, wherein the TREM comprises the nucleotide sequence of SEQ ID NO: 624.

63. The TREM of any one of claims 43-62, wherein the non-naturally occurring modification is present at a nucleotide position which corresponds to one or more of nucleotides 27-43, according to the CtNS.

64. A tRNA effector molecule (TREM) comprising a sequence of Formula (I):
[L1]-[ASt Domain1]-[L2]-[DH Domain]-[L3]-[ACH Domain]-[VL Domain]-[TH Domain]-[L4]-[ASt Domain2] (I),
wherein:
independently, [L1] and [VL Domain], are optional; and
a nucleotide within [VL Domain] comprises a nucleotide having a non-naturally occurring modification.

65. The TREM of claim 64, wherein the non-naturally occurring modification is present on the 2′-position of a nucleotide sugar or within the internucleotide region (e.g., a backbone modification).

66. The TREM of any one of claims 64-65, wherein the non-naturally occurring modification is selected from a 2′-O-methyl (2-OMe), 2′-halo (e.g., 2′F or 2′Cl), 2′-O-methoxyethyl (2′MOE), or 2′deoxy modification.

67. The TREM of any one of claims 64-66, wherein the non-naturally occurring modification is a 2′OMe modification.

68. The TREM of any one of claims 64-67, wherein the non-naturally occurring modification is a 2′halo (e.g., 2′F or 2′Cl) modification.

69. The TREM of any one of claims 64-68, wherein the non-naturally occurring modification is a 2′MOE modification.

70. The TREM of any one of claims 64-69, wherein the non-naturally occurring modification is a 2′-deoxy modification.

71. The TREM of any one of claims 64-70, wherein the non-naturally occurring modification is present in the internucleotide region (e.g., a backbone modification).

72. The TREM of claim 71, wherein the non-naturally occurring modification is a phosphorothioate modification.

73. The TREM of any one of claims 64-72, wherein the TREM has a sequence selected from a sequence provided in FIG. 2.

74. The TREM of any one of claims 64-73, wherein the TREM is a TREM provided in FIG. 2.

75. The TREM of any one of claims 64-74, wherein the TREM comprises a TREM having at least 70%, 75%, 80%, 85%, 90%, 95%, or 99% sequence identity with a TREM provided in FIG. 2.

76. The TREM of any one of claims 64-75, wherein the TREM comprises a sequence that differs by no more than 1, 2, 3, 4, 5, 6, 7, 8, 9, or 10 nucleotides from a TREM provided in FIG. 2.

77. The TREM of any one of claims 64-76, wherein the TREM comprises 1, 2, 3, 4, 5, 6, 7, 8, 9, or 10 additional non-naturally occurring modifications compared with a TREM provided in FIG. 2 (e.g., 2′-ribose modifications or an internucleotide modification, e.g., 2′OMe, 2′-halo, 2′-MOE, 2′-deoxy, or phosphorothiorate modifications).

78. The TREM of any one of claims 64-77, wherein the TREM is selected from TREM NO. 1-500, 501-1000, 1001-1500, 1501-2000, 2001-2500, 2501-3000, 3001-3500, 3501-4000, 4001-4500, 4501-5000, 5001-5500, 5501-6000, 6001-6500, 6501-7000, 7001-7500, 7501-8000, 8001-8500, 8501-9000, and 9001-9136 in FIG. 2.

79. The TREM of any one of claims 64-78, wherein the non-naturally occurring modification is present at a nucleotide position which corresponds to one or more of nucleotides 44-48 of SEQ ID NO: 622.

80. The TREM of any one of claims 64-79, wherein:
(i) the non-naturally occurring modification is present at a nucleotide position which corresponds to one or more of nucleotides 44-48 of SEQ ID NO: 622; and/or
(ii) the TREM differs from the nucleotide sequence of SEQ ID NO: 622 by no more than 1, 2, 3, 4, 5, 6, 7, 8, 9, or 10 nucleotides nucleotides.

81. The TREM of any one of claims 64-80, wherein:
(i) the non-naturally occurring modification is present at a nucleotide position which corresponds to one or more of nucleotides 44-48 of SEQ ID NO: 622; and/or
(ii) the TREM comprises the nucleotide sequence of SEQ ID NO: 622.

82. The TREM of any one of claims 64-80, wherein the TREM comprises the nucleotide sequence of SEQ ID NO: 623.

83. The TREM of any one of claims 64-80, wherein the TREM comprises the nucleotide sequence of SEQ ID NO: 624.

84. The TREM of any one of claims 64-83, wherein the non-naturally occurring modification is present at a nucleotide position which corresponds to one or more of nucleotides 44-48, according to the CtNS.

85. A tRNA effector molecule (TREM) comprising a sequence of Formula (I):
[L1]-[ASt Domain1]-[L2]-[DH Domain]-[L3]-[ACH Domain]-[VL Domain]-[TH Domain]-[L4]-[ASt Domain2] (I),
wherein:
independently, [L1] and [VL Domain], are optional; and
a nucleotide within [TH Domain] comprises a nucleotide having a non-naturally occurring modification.

86. The TREM of claim 85, wherein the non-naturally occurring modification is present on the 2′-position of a nucleotide sugar or within the internucleotide region (e.g., a backbone modification).

87. The TREM of any one of claims 85-86, wherein the non-naturally occurring modification is selected from a 2′-O-methyl (2-OMe), 2′-halo (e.g., 2′F or 2′Cl), 2′-O-methoxyethyl (2′MOE), or 2′deoxy modification.

88. The TREM of any one of claims 85-87, wherein the non-naturally occurring modification is a 2′OMe modification.

89. The TREM of any one of claims 85-88, wherein the non-naturally occurring modification is a 2′halo (e.g., 2′F or 2′Cl) modification.

90. The TREM of any one of claims 85-89, wherein the non-naturally occurring modification is a 2′MOE modification.

91. The TREM of any one of claims 85-90, wherein the non-naturally occurring modification is a 2′-deoxy modification.

92. The TREM of any one of claims 85-91, wherein the non-naturally occurring modification is present in the internucleotide region (e.g., a backbone modification).

93. The TREM of claim 92 wherein the non-naturally occurring modification is a phosphorothioate modification.

94. The TREM of any one of claims 85-93, wherein the TREM has a sequence selected from a sequence provided in FIG. 2.

95. The TREM of any one of claims 85-94, wherein the TREM is a TREM provided in FIG. 2.

96. The TREM of any one of claims 85-95, wherein the TREM comprises a TREM having at least 70%, 75%, 80%, 85%, 90%, 95%, or 99% sequence identity with a TREM provided in FIG. 2.

97. The TREM of any one of claims 85-96, wherein the TREM comprises a sequence that differs by no more than 1, 2, 3, 4, 5, 6, 7, 8, 9, or 10 nucleotides from a TREM provided in FIG. 2.

98. The TREM of any one of claims 85-97, wherein the TREM comprises 1, 2, 3, 4, 5, 6, 7, 8, 9, or 10 additional non-naturally occurring modifications compared with a TREM provided in FIG. 2 (e.g., 2′-ribose modifications or an internucleotide modification, e.g., 2′OMe, 2′-halo, 2′-MOE, 2′-deoxy, or phosphorothiorate modifications).

99. The TREM of any one of claims 85-98, wherein the TREM is selected from TREM NO. 1-500, 501-1000, 1001-1500, 1501-2000, 2001-2500, 2501-3000, 3001-3500, 3501-4000, 4001-4500, 4501-5000, 5001-5500, 5501-6000, 6001-6500, 6501-7000, 7001-7500, 7501-8000, 8001-8500, 8501-9000, and 9001-9136 in FIG. 2.

100. The TREM of any one of claims 85-99, wherein the non-naturally occurring modification is present at a nucleotide position which corresponds to one or more of nucleotides 49-65 of SEQ ID NO: 622.

101. The TREM of any one of claims 85-100, wherein:
(i) the non-naturally occurring modification is present at a nucleotide position which corresponds to one or more of nucleotides 49-65 of SEQ ID NO: 622; and/or
(ii) the TREM differs from the nucleotide sequence of SEQ ID NO: 622 by no more than 1, 2, 3, 4, 5, 6, 7, 8, 9, or 10 nucleotides nucleotides.

102. The TREM of any one of claims 85-101, wherein:
(i) the non-naturally occurring modification is present at a nucleotide position which corresponds to one or more of nucleotides 49-65 of SEQ ID NO: 622; and/or
(ii) the TREM comprises the nucleotide sequence of SEQ ID NO: 622.

103. The TREM of any one of claims 85-101, wherein the TREM comprises the nucleotide sequence of SEQ ID NO: 623.

104. The TREM of any one of claims 85-101, wherein the TREM comprises the nucleotide sequence of SEQ ID NO: 624.

105. The TREM of any one of claims 85-104, wherein the non-naturally occurring modification is present at a nucleotide position which corresponds to one or more of nucleotides 10-25, according to the CtNS.

106. A tRNA effector molecule (TREM) comprising a sequence of Formula (I):
[L1]-[ASt Domain1]-[L2]-[DH Domain]-[L3]-[ACH Domain]-[VL Domain]-[TH Domain]-[L4]-[ASt Domain2] (I),
wherein:
independently, [L1] and [VL Domain], are optional; and
a nucleotide within [L4] or [ASt Domain 2] comprises a nucleotide having a non-naturally occurring modification.

107. The TREM of claim 106, wherein the non-naturally occurring modification is present on the 2′-position of a nucleotide sugar or within the internucleotide region (e.g., a backbone modification).

108. The TREM of any one of claims 106-107, wherein the non-naturally occurring modification is selected from a 2′-O-methyl (2-OMe), 2′-halo (e.g., 2′F or 2′Cl), 2′-O-methoxyethyl (2′MOE), or 2′deoxy modification.

109. The TREM of any one of claims 106-108, wherein the non-naturally occurring modification is a 2′OMe modification.

110. The TREM of any one of claims 106-109, wherein the non-naturally occurring modification is a 2′halo (e.g., 2′F or 2′Cl) modification.

111. The TREM of any one of claims 106-110, wherein the non-naturally occurring modification is a 2′MOE modification.

112. The TREM of any one of claims 106-111, wherein the non-naturally occurring modification is a 2′-deoxy modification.

113. The TREM of any one of claims 106-112, wherein the non-naturally occurring modification is present in the internucleotide region (e.g., a backbone modification).

114. The TREM of claim 113, wherein the non-naturally occurring modification is a phosphorothioate modification.

115. The TREM of any one of claims 106-114, wherein the TREM has a sequence selected from a sequence provided in FIG. 2.

116. The TREM of any one of claims 106-115, wherein the TREM is a TREM provided in FIG. 2.

117. The TREM of any one of claims 106-116, wherein the TREM comprises a TREM having at least 70%, 75%, 80%, 85%, 90%, 95%, or 99% sequence identity with a TREM provided in FIG. 2.

118. The TREM of any one of claims 106-117, wherein the TREM comprises a sequence that differs by no more than 1, 2, 3, 4, 5, 6, 7, 8, 9, or 10 nucleotides from a TREM provided in FIG. 2.

119. The TREM of any one of claims 106-118, wherein the TREM comprises 1, 2, 3, 4, 5, 6, 7, 8, 9, or 10 additional non-naturally occurring modifications compared with a TREM provided in FIG. 2 (e.g., 2′-ribose modifications or an internucleotide modification, e.g., 2′OMe, 2′-halo, 2′-MOE, 2′-deoxy, or phosphorothiorate modifications).

120. The TREM of any one of claims 106-119, wherein the TREM is selected from TREM NO. 1-100, 101-200, 201-300, 301-400, 401-500, 501-600, 601-700, 701-800, 801-900, 901-1000, 1001-1100, 1101-1200, 1201-1300, 1301-1400, 1401-1500, 1501-1600, 1601-1700, 1701-1800, 1801-1900, 1901-2000, 2001-2100, 2101-2200, 2201-2300, 2301-2400, 2401-2500, 2501-2600, and 2601-2663 in FIG. 2.

121. The TREM of any one of claims 106-120, wherein the non-naturally occurring modification is present at a nucleotide position which corresponds to one or more of nucleotides 66-76 of SEQ ID NO: 622.

122. The TREM of any one of claims 106-121, wherein:
(i) the non-naturally occurring modification is present at a nucleotide position which corresponds to one or more of nucleotides 66-76 of SEQ ID NO: 622; and/or
(ii) the TREM differs from the nucleotide sequence of SEQ ID NO: 622 by no more than 1, 2, 3, 4, 5, 6, 7, 8, 9, or 10 nucleotides nucleotides.

123. The TREM of any one of claims 106-122, wherein:
(i) the non-naturally occurring modification is present at a nucleotide position which corresponds to one or more of nucleotides 66-76 of SEQ ID NO: 622; and/or
(ii) the TREM comprises the nucleotide sequence of SEQ ID NO: 622.

124. The TREM of any one of claims 106-122, wherein the TREM comprises the nucleotide sequence of SEQ ID NO: 623.

125. The TREM of any one of claims 106-122, wherein the TREM comprises the nucleotide sequence of SEQ ID NO: 624.

126. The TREM of any one of claims 106-125, wherein the non-naturally occurring modification is present at a nucleotide position which corresponds to one or more of nucleotides 66-76, according to the CtNS.

127. A TREM (e.g., a TREM provided in FIG. 2), according to Design Guidance 1 described herein.

128. A TREM (e.g., a TREM provided in FIG. 2), according to Design Guidance 2 described herein.

129. A TREM (e.g., a TREM provided in FIG. 2), according to Design Guidance 3 described herein.

130. A TREM (e.g., a TREM provided in FIG. 2), according to Design Guidance 4 described herein.

131. A TREM (e.g., a TREM provided in FIG. 2), according to Design Guidance 5 described herein.

132. A TREM (e.g., a TREM provided in FIG. 2), according to Design Guidance 6 described herein.

133. A TREM (e.g., a TREM provided in FIG. 2), according to Design Guidance 1 and 2 described herein.

134. A TREM (e.g., a TREM provided in FIG. 2), according to Design Guidance 1 and 3 described herein.

135. A TREM (e.g., a TREM provided in FIG. 2), according to Design Guidance 1 and 4 described herein.

136. A TREM (e.g., a TREM provided in FIG. 2), according to Design Guidance 1 and 5 described herein.

137. A TREM (e.g., a TREM provided in FIG. 2), according to Design Guidance 1 and 6 described herein.

138. A TREM (e.g., a TREM provided in FIG. 2), according to Design Guidance 2 and 3 described herein.

139. A TREM (e.g., a TREM provided in FIG. 2), according to Design Guidance 2 and 4 described herein.

140. A TREM (e.g., a TREM provided in FIG. 2), according to Design Guidance 2 and 5 described herein.

141. A TREM (e.g., a TREM provided in FIG. 2), according to Design Guidance 2 and 6 described herein.

142. A TREM (e.g., a TREM provided in FIG. 2), according to Design Guidance 3 and 4 described herein.

143. A TREM (e.g., a TREM provided in FIG. 2), according to Design Guidance 3 and 5 described herein.

144. A TREM (e.g., a TREM provided in FIG. 2), according to Design Guidance 3 and 6 described herein.

145. A TREM (e.g., a TREM provided in FIG. 2), according to Design Guidance 4 and 5 described herein.

146. A TREM (e.g., a TREM provided in FIG. 2), according to Design Guidance 4 and 6 described herein.

147. A TREM (e.g., a TREM provided in FIG. 2), according to Design Guidance 5 and 6 described herein.

148. A TREM (e.g., a TREM provided in FIG. 2), according to any three of Design Guidances 1, 2, 3, 4, 5, and 6 described herein.

149. A TREM (e.g., a TREM provided in FIG. 2), according to any four of Design Guidances 1, 2, 3, 4, 5, and 6 described herein.

150. A TREM (e.g., a TREM provided in FIG. 2), according to any five of Design Guidances 1, 2, 3, 4, 5, and 6 described herein.

151. A TREM (e.g., a TREM provided in FIG. 2), according to all of Design Guidances 1, 2, 3, 4, 5, and 6 described herein.

152. A pharmaceutical composition comprising a TREM of any one of the preceding claims.

153. The pharmaceutical composition of claim 152, further comprising a pharmaceutically acceptable component, e.g., an excipient.

154. A lipid nanoparticle formulation comprising a TREM of any one of claims 1-153.

155. A lipid nanoparticle formulation comprising a pharmaceutical composition of claim 154.

156. A method of treating a subject having a disease or disorder associated with a PTC comprising administering to the subject a TREM, TREM core fragment, or TREM fragment described herein (e.g., a TREM of any one of claims 1-151), thereby treating the subject having the disease or disorder.

157. The method of claim 156, wherein the disease or disorder associated with a PTC comprises Hemophilia B, Fabry disease, Usher syndrome, or CLN2 disease.
